United States Patent Application Publication US 2017/0114356 A1 - sequence listing, part 30

SEQ ID NO: 39800 - DNA, 2580 bp, Zea Mays
tctcattctcatcaaatccacgatgcgagtggcagcgcgcgagcgcccattcccgttcctcctcgcccatcggcttctcgcggtctcgccccggcacctcgcactcccaccgcagtccaaaatcctcggcctcacaccctatgcctccgcctgttcttcgcctgttcgcggcagctccgccccgcgctctcggtggccgcgccagggcgcatcgtggcgatggcgggttcgcgcgcctgcgcctgcgcgtcagagcagcggctggggaggccgcgccggcgccttccagaacccagatgataatggataagatctctgctggcgaaggagtcggaggcgctggaggggcttactcatatagtgcgttgaaaagattggatcaaatatggtctagtatttgtgaagctcaagcagattccaaagtccctgaagttgttactcgggttgaagggctgttggctgattctgatcttggttctggttcagagatatttgatgtaattgtatgtggcggcacattaggtatatttgtagctactgctctcagttctaaaggccttcggattggaattatcgaaagaaacataatcaaagggagggaacaggagtggaatatttcaagaaaggagcttatggaaattgtagagattggtattctttcagaagcagaacttgaacaaataatttcaagtgatttcaatcctaatagatgtggatttgaagataaaggtgaaatttgggtggagaacattcttaatcttggtgtttcgcctgctaaacttgttgagaacatgaaagaacgcttcatttcttcgggaggagcaatatttgaggagaaaagtctatcaagcatttatgtctatgatgatctcgctgtactgaaacttagtgatggtgattctttgtcttgccgacttgttgttgatgctatgggaaatttttctccaatagtacggcagatccggtctggtagaaaaccagatggaatgtgccttgttgttggtgcttgcgctcatggattcgaaaaaaatacaacaagtgatattattttcagtagctcatcagtgaaaagagctgggaattcaggagtacagctcttttgggaggcttttcctgctggttctggtcccaatgaccgtactacatacatgttcacttatgttgatccaacatttggaggcccaaagctagaagaacttttggaagtgttttgggatcttatgcctgcttaccagttcttcacaacagtgggccctgttggctttgattttacaacaaaagtctgatgcgtccatggaagttcccttgtctattttataggatgtgcttcttcaaaatttggatataagaagagttatatttggaattttcccaacttatcgggatagccccttgccagctgcatttgaccgtatcttacaggttggcgatgctagtggaatacagtcacctgtttcttttggaggttttggaagcttgacgagacatcttggccgtttgtctagtggtatatgtgaagcagttgaaggtgatttcctggatgctcatagtttgcagctgctcaacccttacatgccaaacttaagtgcatcatggttgttccaacgagcgatgtcagtaaggccacatgtcaatgtttcaccaacctttatcaatgagcttctctttgctaattttcagtcaatgcagaaactaggggattcggtacttcggccatttctacaggatgtaatacagtttggacctcttgtgaaaactttggggctagtaatgatcactagaccacaaattttaccttccatatttaagcaggttggactgggagtcatccttgagtggtcaggccattttatgatgcttggttactacacattcctttctacctatattgatccgatcctgaggtcttgggtggaatccttgcccccacgggacaaatatcagtggaaacggtacctggaagcttggagatatggagccggtttagattaccgccaaggggaataaactgtttcactaaaaacacatgaaagtttcctcagaaacaaaattatgtatagatacatgaatatagcactgtcaggggaaagatgaatagagtacatatatgatctctgattgatttagttttccttttccagagcacaagattgaacatcaagtttagaatgtgtattatctagtttcacttgtaatttgcccactttactgaactgatggagtgaatatgtatagtactctagaatttcaaataatgctgaatggagctgagatgctcaatatttgttgatcaatgtatcaattatgtgaaataaaagtaaatgtccggtttcattcagattgcaagtgtaacaacaaaataaacagccatttacacatgttggtaaagagaattttgtgatttactttaccataagataattactaatgtaaataatagatgcctggaagttgtgaaatggtctatttagagccagttagagaaagatgtcagtgcagcaataaaccgacgctgtaagaagtgttgttatgtctcataatattccgttatcaggtccataggatgataggaggaccact

SEQ ID NO: 39801 - DNA, 3351 bp, Zea Mays
acgatgcgagtggcagcgcgcgagcgcccattcccgttcctcctcgcccatcggcttctcgcggtctcgccccggcacctcgcactcccaccgcagtccaaaatcctcggcctcacaccctatgcctccgcctgttcttcgcctgttcgcggcagctccgccccgcgctctcggtggccgcgccagggcgcatcgtggcgatggcgggttcgcgcgcctgcgcctgcgcgtcagagcagcggctggggaggccgcgccggcgccttccagaacccagatgataatggataagatctctgctggcgaaggagtcggaggcgctggaggggcttactcatatagtgcgttgaaaagattggatcaaatatggtctagtatttgtgaagctcaagcagattccaaagtccctgaagttgttactcgggttgaagggctgttggctgattctgatcttggttctggttcagagatatttgatgtaattgtatgtggcggcacattaggtatatttgtagctactgctctcagttctaaaggccttcggattggaattatcgaaagaaacataatcaaagggagggaacaggagtggaatatttcaagaaaggagcttatggaaattgtagagattggtattctttcagaagcagaacttgaacaaataatttcaagtgatttcaatcctaatagatgtggatttgaagataaaggtgaaatttgggtggagaacattcttaatcttggtgtttcgcctgctaaacttgttgagaacatgaaagaacgcttcatttcttcgggaggagcaatatttgaggagaaaagtctatcaagcatttatgtctatgatgatctcgctgtactgaaacttagtgatggtgattctttgtcttgccgacttgttgttgatgctatgggaaatttttctccaatagtacggcagatccggtctggtagaaaaccagatggaatgtgccttgttgttggtgcttgcgctcatggattcgaaaaaaatacaacaagtgatattattttcagtagctcatcagtgaaaagagctgggaattcaggagtacagctcttttgggaggcttttcctgctggttctggtcccaatgaccgtactacatacatgttcacttatgttgatccaacatttggaggcccaaagctagaagaacttttggaagtgttttgggatcttatgcctgcttaccaggatgtgcttcttcaaaatttggatataagaagagttatatttggaattttcccaacttatcgggatagccccttgccagctgcatttgaccgtatcttacaggttggcgatgctagtggaatacagtcacctgtttcttttggaggttttggaagcttgacgagacatcttggccgtttgtctagtggtttgtctgttgaattatccttttcttaatatataactgtttgattatcaaaaaaaaggaatatgtttgatctaatattaagaaaacagagcaaagagtgctgcagccaccggggccagtgccaatacagaaacggaatgcccgtgtagccacctatgtgtccagaaaaagttatttgcaccatcaaccacagaagcagcaaagagtgctgcagcattagggcatatacaacctcatttaatatgaagtctcttgaggggtctttagggggttagataaaaaaatacaaaagacgggctcttcacgaatattgtttatattgtctcttaactgcatttatagtctagaggcttgtatcacagagtcttttaagtgtctcttatacttagaaaaccgaaccagagtctcaaagttgtacatgccaggttgtacatgcccttagagtgaacaagtgactgcaggtccttctaagggccgtcattcctggccttccttaaccagagccacctcatgttcagcgagacagcgaccaacccaaagcttctaaattatggattccaagaccgccttggttgagtgacctgcagactctttcccaaccaacaagacaatgccctccttgtacgtttattcgacctttctagaggaacctcttctaattttatcaatgactttaaaaactcattcagagcagcgcaaatacggagaggctactttgaacccgttacctgactcagtgagacaactcttaccagtgcaccagacctgcccttctgcagtatcactttattgatgatgaattttggatagctctacatgtgctggtttcttatcatttgatttcacatacttcttttttttattttggggttaaggtatatgtgaagcagttgaaggtgatttcctggatgctcatagtttgcagctgctcaacccttacatgccaaacttaagtgcatcatggttgttccaacgagcgatgtcagtaaggccacatgtcaatgtttcaccaacctttatcaatgagcttctctttgctaattttcagtcaatgcagaaactaggggattcggtacttcggccatttctacaggatgtaatacagtttggacctcttgtgaaaactttggggctagtaatgatcactagaccacaaattttaccttccatatttaagcaggttggactgggagtcatccttgagtggtcaggccattttatgatgcttggttactacacattcctttctacctatattgatccgatcctgaggtcttgggtggaatccttgcccccacgggacaaatatcagtggaaacggtacctggaagcttggagatatggagccggtttagattaccgccaaggggaataaactgtttcactaaaaacacatgaaagtttcctcagaaacaaaattatgtatagatacatgaatatagcactgtcaggggaaagatgaatagagtacatatatgatctctgattgatttagttttccttttccagagcacaagattgaacatcaagtttagaatgtgtattatctagtttcacttgtaatttgcccactttactgaactgatggagtgaatatgtatagtactctagaatttcaaataatgctgaatggagctgagatgctcaatatttgttgatcaatgtatcaattatgtgaaataaaagtaaatgtccggtttcattcagattgcaagtgtaacaacaaaataaacagccatttacacatgttggtaaagagaattttgtgatttactttaccataagataattactaatgtaaataatagatgcctggaagttgtgaaatggtctatttagagccagttagagaaagatgtcagtgcagcaataaaccgacgctgtaagaagtgttgttatgtctcataatattccgttatcaggtccataggatgataggaggaccact

SEQ ID NO: 39802 - DNA, 2173 bp, Zea Mays
ctgatctctctgttccaagcattggaaaccacctctgaaaatcctggggaactagcaaggtgttgggaaaagcagaggtctagctgatggagattccaaagtccctgaagttgttactcgggttgaagggctgttggctgattctgatcttggttctggttcagagatatttgatgtaattgtatgtggcggcacattaggtatatttgtagctactgctctcagttctaaaggccttcggattggaattatcgaaagaaacataatcaaagggagggaacaggagtggaatatttcaagaaaggagcttatggaaattgtagagattggtattctttcagaagcagaacttgaacaaataatttcaagtgatttcaatcctaatagatgtggatttgaagataaaggtgaaatttgggtggagaacattcttaatcttggtgtttcgcctgctaaacttgttgagaacatgaaagaacgcttcatttcttcgggaggagcaatatttgaggagaaaagtctatcaagcatttatgtctatgatgatctcgctgtactgaaacttagtgatggtgattctttgtcttgccgacttgttgttgatgctatgggaaatttttctccaatagtacggcagatccggtctggtagaaaaccagatggaatgtgccttgttgttggtgcttgcgctcatggattcgaaaaaaatacaacaagtgatattattttcagtagctcatcagtgaaaagagctgggaattcaggagtacagctcttttgggaggcttttcctgctggttctggtcccaatgaccgtactacatacatgttcacttatgttgatccaacatttggaggcccaaagctagaagaacttttggaagtgttttgggatcttatgcctgcttaccaggatgtgcttcttcaaaatttggatataagaagagttatatttggaattttcccaacttatcgggatagccccttgccagctgcatttgaccgtatcttacaggttggcgatgctagtggaatacagtcacctgtttcttttggaggttttggaagcttgacgagacatcttggccgtttgtctagtggtatatgtgaagcagttgaaggtgatttcctggatgctcatagtttgcagctgctcaacccttacatgccaaacttaagtgcatcatggttgttccaacgagcgatgtcagtaaggccacatgtcaatgtttcaccaacctttatcaatgagcttctctttgctaattttcagtcaatgcagaaactaggggattcggtacttcggccatttctacaggatgtaatacagtttggacctcttgtgaaaactttggggctagtaatgatcactagaccacaaattttaccttccatatttaagcaggttggactgggagtcatccttgagtggtcaggccattttatgatgcttggttactacacattcctttctacctatattgatccgatcctgaggtcttgggtggaatccttgcccccacgggacaaatatcagtggaaacggtacctggaagcttggagatatggagccggtttagattaccgccaaggggaataaactgtttcactaaaaacacatgaaagtttcctcagaaacaaaattatgtatagatacatgaatatagcactgtcaggggaaagatgaatagagtacatatatgatctctgattgatttagttttccttttccagagcacaagattgaacatcaagtttagaatgtgtattatctagtttcacttgtaatttgcccactttactgaactgatggagtgaatatgtatagtactctagaatttcaaataatgctgaatggagctgagatgctcaatatttgttgatcaatgtatcaattatgtgaaataaaagtaaatgtccggtttcattcagattgcaagtgtaacaacaaaataaacagccatttacacatgttggtaaagagaattttgtgatttactttaccataagataattactaatgtaaataatagatgcctggaagttgtgaaatggtctatttagagccagttagagaaagatgtcagtgcagcaataaaccgacgctgtaagaagtgttgttatgtctcataatattccgttatcaggtccataggatgataggaggaccact

SEQ ID NO: 39803 - DNA, 1876 bp, Zea Mays
gaaaagcagaggtctagctgatggagattccaaagtccctgaagttgttactcgggttgaagggctgttggctgattctgatcttggttctggttcagagatatttgatgtaattgtatgtggcggcacattaggtatatttgtagctactgctctcagttctaaaggccttcggattggaattatcgaaagaaacataatcaaagggagggaacaggagtggaatatttcaagaaaggagcttatggaaattgtagagattggtattctttcagaagcagaacttgaacaaataatttcaagtgatttcaatcctaatagatgtggatttgaagataaaggtgaaatttgggtggagaacattcttaatcttggtgtttcgcctgctaaacttgttgagaacatgaaagaacgcttcatttcttcgggaggagcaatatttgaggagaaaagtctatcaagcatttatgtctatgatgatctcgctgcttttcctgctggttctggtcccaatgaccgtactacatacatgttcacttatgttgatccaacatttggaggcccaaagctagaagaacttttggaagtgttttgggatcttatgcctgcttaccaggatgtgcttcttcaaaatttggatataagaagagttatatttggaattttcccaacttatcgggatagccccttgccagctgcatttgaccgtatcttacaggttggcgatgctagtggaatacagtcacctgtttcttttggaggttttggaagcttgacgagacatcttggccgtttgtctagtggtatatgtgaagcagttgaaggtgatttcctggatgctcatagtttgcagctgctcaacccttacatgccaaacttaagtgcatcatggttgttccaacgagcgatgtcagtaaggccacatgtcaatgtttcaccaacctttatcaatgagcttctctttgctaattttcagtcaatgcagaaactaggggattcggtacttcggccatttctacaggatgtaatacagtttggacctcttgtgaaaactttggggctagtaatgatcactagaccacaaattttaccttccatatttaagcaggttggactgggagtcatccttgagtggtcaggccattttatgatgcttggttactacacattcctttctacctatattgatccgatcctgaggtcttgggtggaatccttgcccccacgggacaaatatcagtggaaacggtacctggaagcttggagatatggagccggtttagattaccgccaaggggaataaactgtttcactaaaaacacatgaaagtttcctcagaaacaaaattatgtatagatacatgaatatagcactgtcaggggaaagatgaatagagtacatatatgatctctgattgatttagttttccttttccagagcacaagattgaacatcaagtttagaatgtgtattatctagtttcacttgtaatttgcccactttactgaactgatggagtgaatatgtatagtactctagaatttcaaataatgctgaatggagctgagatgctcaatatttgttgatcaatgtatcaattatgtgaaataaaagtaaatgtccggtttcattcagattgcaagtgtaacaacaaaataaacagccatttacacatgttggtaaagagaattttgtgatttactttaccataagataattactaatgtaaataatagatgcctggaagttgtgaaatggtctatttagagccagttagagaaagatgtcagtgcagcaataaaccgacgctgtaagaagtgttgttatgtctcataatattccgttatcaggtccataggatgataggaggaccact

SEQ ID NO: 39804 - DNA, 1818 bp, Zea Mays
aaaagttgacgtcaaatcgtcaattataatagatgtggatttgaagataaaggtgaaatttgggtggagaacattcttaatcttggtgtttcgcctgctaaacttgttgagaacatgaaagaacgcttcatttcttcgggaggagcaatatttgaggagaaaagtctatcaagcatttatgtctatgatgatctcgctgtactgaaacttagtgatggtgattctttgtcttgccgacttgttgttgatgctatgggaaatttttctccaatagtacggcagatccggtctggtagaaaaccagatggaatgtgccttgttgttggtgcttgcgctcatggattcgaaaaaaatacaacaagtgatattattttcagtagctcatcagtgaaaagagctgggaattcaggagtacagctcttttgggaggcttttcctgctggttctggtcccaatgaccgtactacatacatgttcacttatgttgatccaacatttggaggcccaaagctagaagaacttttggaagtgttttgggatcttatgcctgcttaccaggatgtgcttcttcaaaatttggatataagaagagttatatttggaattttcccaacttatcgggatagccccttgccagctgcatttgaccgtatcttacaggttggcgatgctagtggaatacagtcacctgtttcttttggaggttttggaagcttgacgagacatcttggccgtttgtctagtggtatatgtgaagcagttgaaggtgatttcctggatgctcatagtttgcagctgctcaacccttacatgccaaacttaagtgcatcatggttgttccaacgagcgatgtcagtaaggccacatgtcaatgtttcaccaacctttatcaatgagcttctctttgctaattttcagtcaatgcagaaactaggggattcggtacttcggccatttctacaggatgtaatacagtttggacctcttgtgaaaactttggggctagtaatgatcactagaccacaaattttaccttccatatttaagcaggttggactgggagtcatccttgagtggtcaggccattttatgatgcttggttactacacattcctttctacctatattgatccgatcctgaggtcttgggtggaatccttgcccccacgggacaaatatcagtggaaacggtacctggaagcttggagatatggagccggtttagattaccgccaaggggaataaactgtttcactaaaaacacatgaaagtttcctcagaaacaaaattatgtatagatacatgaatatagcactgtcaggggaaagatgaatagagtacatatatgatctctgattgatttagttttccttttccagagcacaagattgaacatcaagtttagaatgtgtattatctagtttcacttgtaatttgcccactttactgaactgatggagtgaatatgtatagtactctagaatttcaaataatgctgaatggagctgagatgctcaatatttgttgatcaatgtatcaattatgtgaaataaaagtaaatgtccggtttcattcagattgcaagtgtaacaacaaaataaacagccatttacacatgttggtaaagagaattttgtgatttactttaccataagataattactaatgtaaataatagatgcctggaagttgtgaaatggtctatttagagccagttagagaaagatgtcagtgcagcaataaaccgacgctgtaagaagtgttgttatgtctcataatattccgttatcaggtccataggatgataggaggaccact

SEQ ID NO: 39805 - DNA, 2160 bp, Zea Mays
ggaagttcccttgtctattttataggatgtgcttcttcaaaatttggatataagaagagttatatttggaattttcccaacttatcgggatagccccttgccagctgcatttgaccgtatcttacaggttggcgatgctagtggaatacagtcacctgtttcttttggaggttttggaagcttgacgagacatcttggccgtttgtctagtggtttgtctgttgaattatccttttcttaatatataactgtttgattatcaaaaaaaaggaatatgtttgatctaatattaagaaaacagagcaaagagtgctgcagccaccggggccagtgccaatacagaaacggaatgcccgtgtagccacctatgtgtccagaaaaagttatttgcaccatcaaccacagaagcagcaaagagtgctgcagcattagggcatatacaacctcatttaatatgaagtctcttgaggggtctttagggggttagataaaaaaatacaaaagacgggctcttcacgaatattgtttatattgtctcttaactgcatttatagtctagaggcttgtatcacagagtcttttaagtgtctcttatacttagaaaaccgaaccagagtctcaaagttgtacatgccaggttgtacatgcccttagagtgaacaagtgactgcaggtccttctaagggccgtcattcctggccttccttaaccagagccacctcatgttcagcgagacagcgaccaacccaaagcttctaaattatggattccaagaccgccttggttgagtgacctgcagactctttcccaaccaacaagacaatgccctccttgtacgtttattcgacctttctagaggaacctcttctaattttatcaatgactttaaaaactcattcagagcagcgcaaatacggagaggctactttgaacccgttacctgactcagtgagacaactcttaccagtgcaccagacctgcccttctgcagtatcactttattgatgatgaattttggatagctctacatgtgctggtttcttatcatttgatttcacatacttcttttttttattttggggttaaggtatatgtgaagcagttgaaggtgatttcctggatgctcatagtttgcagctgctcaacccttacatgccaaacttaagtgcatcatggttgttccaacgagcgatgtcagtaaggccacatgtcaatgtttcaccaacctttatcaatgagcttctctttgctaattttcagtcaatgcagaaactaggggattcggtacttcggccatttctacaggatgtaatacagtttggacctcttgtgaaaactttggggctagtaatgatcactagaccacaaattttaccttccatatttaagcaggttggactgggagtcatccttgagtggtcaggccattttatgatgcttggttactacacattcctttctacctatattgatccgatcctgaggtcttgggtggaatccttgcccccacgggacaaatatcagtggaaacggtacctggaagcttggagatatggagccggtttagattaccgccaaggggaataaactgtttcactaaaaacacatgaaagtttcctcagaaacaaaattatgtatagatacatgaatatagcactgtcaggggaaagatgaatagagtacatatatgatctctgattgatttagttttccttttccagagcacaagattgaacatcaagtttagaatgtgtattatctagtttcacttgtaatttgcccactttactgaactgatggagtgaatatgtatagtactctagaatttcaaataatgctgaatggagctgagatgctcaatatttgttgatcaatgtatcaattatgtgaaataaaagtaaatgtccggtttcattcagattgcaagtgtaacaacaaaataaacagccatttacacatgttggtaaagagaattttgtgatttactttaccataagataattactaatgtaaataatagatgcctggaagttgtgaaatggtctatttagagccagttagagaaagatgtcagtgcagcaataaaccgacgctgtaagaagtgttgttatgtctcataatattccgttatcaggtccataggatgataggaggaccact

SEQ ID NO: 39806 - DNA, 779 bp, Zea Mays
gcttggacattgttggactgggagtcatccttgagtggtcaggccattttatgatgcttggttactacacattcctttctacctatattgatccgatcctgaggtcttgggtggaatccttgcccccacgggacaaatatcagtggaaacggtacctggaagcttggagatatggagccggtttagattaccgccaaggggaataaactgtttcactaaaaacacatgaaagtttcctcagaaacaaaattatgtatagatacatgaatatagcactgtcaggggaaagatgaatagagtacatatatgatctctgattgatttagttttccttttccagagcacaagattgaacatcaagtttagaatgtgtattatctagtttcacttgtaatttgcccactttactgaactgatggagtgaatatgtatagtactctagaatttcaaataatgctgaatggagctgagatgctcaatatttgttgatcaatgtatcaattatgtgaaataaaagtaaatgtccggtttcattcagattgcaagtgtaacaacaaaataaacagccatttacacatgttggtaaagagaattttgtgatttactttaccataagataattactaatgtaaataatagatgcctggaagttgtgaaatggtctatttagagccagttagagaaagatgtcagtgcagcaataaaccgacgctgtaagaagtgttgttatgtctcataatattccgttatcaggtccataggatgataggaggaccact

SEQ ID NO: 39807 - DNA, 678 bp, Zea Mays
ccagcatcgttgcatatcctcgcgtcgccagatgtctccatgccatccgcgacaccggccatctttgcgccatctgggacatcggtggaggcggtggcagctacaacccgaggaagttcttcattggacggctcccgcgggacaccacaaatgaggtactacacgatgcccggccgccgcctcgctgtgatgctctcccgatctccacgtctcgtaggggacgacccgaggctgtcgatcgacgtgccgacttcatcattgaaacccttgtatgaactttaccactattaggttgcagatgaatttatcaaggtggacattggcggtgtgaataagcacctataaggctatccaacacgcgataggtgggcacaacagcttatcaatgggcaccagacgaccgtgacgactatctaggagggagcaggggaagacaatggcaacgatttgctagagatgcaggcatctgaccctgaggcgtacaatgacaaggtcatcagagcgctctgtgtgtgagctatatgcacctttgaacgcggtgttcctcctggagcttcatcacaaggctggtggtgatgtctgtgtctgctacagctgctaagggcagccgatagccttttgatcatctcggcatgttatagaagaagaaatgcttctagctgtaaaggaaaggaaggc

SEQ ID NO: 39808 - DNA, 558 bp, Zea Mays
cttcattggacggctcccgcgggacaccacaaatggtactacacgatgcccggccgccgcctcgctgtgatgctctcccgatctccacgtctcgtaggggacgacccgaggctgtcgatcgacgtgccgacttcatcattgaaacccttgtatgaactttaccactattaggttgcagatgaatttatcaaggtggacattggcggtgtgaataagcacctataaggctatccaacacgcgataggtgggcacaacagcttatcaatgggcaccagacgaccgtgacgactatctaggagggagcaggggaagacaatggcaacgatttgctagagatgcaggcatctgaccctgaggcgtacaatgacaaggtcatcagagcgctctgtgtgtgagctatatgcacctttgaacgcggtgttcctcctggagcttcatcacaaggctggtggtgatgtctgtgtctgctacagctgctaagggcagccgatagccttttgatcatctcggcatgttatagaagaagaaatgcttctagctgtaaaggaaaggaaggc

SEQ ID NO: 39809 - DNA, 881 bp, Zea Mays
atgatccatatacctccactccttgtctccttttgttgttcttttctatttgagcgagaactccagctgcctgaaaaggttcatgggaaggaacaagtgttgtttgatactgctttgcagtgttttgagaattccatagaagtgaaaatatatagagggattaacagcttagttttgcatgaggttacatgctagcaattgctccctccgttctaattctaaattagaagtacacatggtctttgctatgtatatagacatagagtagtatctaggtgtattgcaaaaggctagtttggaaactcaaatctcctccggggattggagggggtttgattttccaaattagcccataatttagaacggggactagaatgcaatacacgaaacagaacctccaggaaatctacaactttcagcatcacaacgcaaatatatttgcctcttctaggtatattgcttttactatgtaagtatgtatgtagacagtgtgtgtatctaagtgcacagcaaaaacttttttttcttgaaagcgcaggataactgcgcgataatatattaaagaagaggaacagttacaaaaacaaaccggggcacaacaaaaactatatatcaaaaaatgcctaaaacgtcttataattggaatctgagtttaatgcaccttatcccattttttcttaaagcctatgaactgataacatatcttcaaatactatgatagtactgaaaaacagcaaatgccagtcttccatgcatcaaaatattggtaatgagatcccaattacatttatggacattcttttttttatgaaaatatttatagacattctctgccaggcaatgataatatggttacttctaaattagttaagtcagtctag

SEQ ID NO: 39810 - DNA, 2396 bp, Zea Mays
atgtctccagacacacacgatgtccccggaactctgtcgggtgatggcttccacagggcgacggcctccacggaaaaccggcgagtcctctctaagcgctcgatctcagatcagtatgtgatggttataccaatttggagagggaaggggttccgatggataaaactgcagcatctgcaccacttctcaatgctatcttggatggagattgacgcaaatgatacaggacttgaaaactcaatgcttggagcactttaatcaggaatggtcaatctaaagttcaatgtttcagcatagttcttatcctagaacttctctttaaaacccttcctctattgataacaggtagccacatttaactgaaagtcaatgtgctcatcagcctttcattcgttgcttcttctcattgcgtattgcattgcttcttctcattgtatactgcaaatgtgtgagtatatgctaaaatactaaatcacaatcttttactttctcaacaggttcttggtgtcagtgaccacattttggtttagttacaatgactatagcatgactttacgacattccctcaagcatctagtttttttaccatatggatatgtatggatacaatatatatatagcaattagttttattgtctatcccaattaagaatggccacaatgtagcatttgattgccatacacctctaatctatcctacataagcaagaatatgttaatacagcggcagtttgttacattacctgaatttatttattaaaatggccattaaaaagggtgttttgttacctatatgaacacatattgcactatatacaaattgaactgtgaaccatgaaatcattgaaaggatgttttcgtattagaaaaggttagctggtttactttcagaaatgaatttatcagtgaggcaactattagatacctttttaaaaaatatataacattttagttcacttttaaaaagggattaaaacatcataccaaggtaaaataaccaactttagtcgctgcagcattgttttgatgtaaaaaaaagaggttagtattacaggctccttccttgaacactaaatcctataagtacttcgatgccctatatgtcattcctccaattgcagtcagtacatagtttacctcctttattataatatataaatttaacaatgcattttatagcttctttcttcgatatttagaagctcaaaaaaagtgttcaactgtgtaggaacagtgagatcaatgattcaatgcctgcacctagatatgacatgtggtgattttgttgactgtactttaaactcaagttttgaacaactcattaaactcaaattgtgaacaactcattgtaacacataactgttgtcttttctacaatgttcactattatcttgtgtatggtttctattatgctcctagaaccttcattgcagccgtcgagttttttttgcatgtgtatatatatgtccgaacctcgtggtgcaaaaaaacatgaaaaatgttgaaaaacaggtattatgctggtaaaggcatatgtggttgcagacatgttcaactaatatccttttttcacatatttgccaatgatccgattattgtttttaaactttctttaccatgaagattactaattgtatattgttataattcaagtttagttatattccttcttcatataaaagtatcctacaataaaaaattgtgcgcgctctggcgtgcgccaaccaccagtatatatataaagtgaaggggtaaatagcgttagtcagaaaaagacaacattgtattggtcacaacattatataacatgttttgtaacgatagcgttagtgcagaaaaaggtacgcatctgaaacggacgtgccagcaaaaaccgccacgtgctgaaccgcctgccgcaccgcactagcgtccgcaacagcaggagacgtcctcgctttccacctgcacagagcgccagggccgtagcgtgccgatcgctcgatcccaccaactgaggccactgtctagttgccgactctcctcgcaggccgcaatctcgcagacacgcaccgtcgcggtatccgtatcgccagagtcctcacggatggcctcgccagcgatggtcccgctgcggcagctcttcgtcgacggcgagtggcgcccgcccgcgcagggccgccgcctccccgtcgtcaaccccaccaccgaggctcacatcggcgagatccctgcgggcacagcggaggacgtggacgccgcggtggcggcggcgcgggcggcgctcaagaggaaccgtggccgcgactgggcgcgcgccccgggggccgtccgggccaagtacctccgcgctatcgccgccaaggtgattgagaggaaacctgagctggctaagctagaggcacttgattgtggga

SEQ ID NO: 39811 - DNA, 2259 bp, Zea Mays
cagacacacacgatgtccccggaactctgtcgggtgatggcttccacagggcgacggcctccacggaaaaccggcgagtcctctctaagcgctcgatctcagatcagtatgtgatggttataccaatttggagagagttgtctactacaattggtagggaaggggttccgatggataaaactgcagcatctgcaccacttctcaatgctatcttggatggagattgacgcaaatgatacaggacttgaaaactcaatgcttggagcactttaatcaggaatggtcaatctaaagttcaatgtttcagcatagttcttatcctagaacttctctttaaaacccttcctctattgataacaggttcttggtgtcagtgaccacattttggtttagttacaatgactatagcatgactttacgacattccctcaagcatctagtttttttaccatatggatatgtatggatacaatatatatatagcaattagttttattgtctatcccaattaagaatggccacaatgtagcatttgattgccatacacctctaatctatcctacataagcaagaatatgttaatacagcggcagtttgttacattacctgaatttatttattaaaatggccattaaaaagggtgttttgttacctatatgaacacatattgcactatatacaaattgaactgtgaaccatgaaatcattgaaaggatgttttcgtattagaaaaggttagctggtttactttcagaaatgaatttatcagtgaggcaactattagatacctttttaaaaaatatataacattttagttcacttttaaaaagggattaaaacatcataccaaggtaaaataaccaactttagtcgctgcagcattgttttgatgtaaaaaaaagaggttagtattacaggctccttccttgaacactaaatcctataagtacttcgatgccctatatgtcattcctccaattgcagtcagtacatagtttacctcctttattataatatataaatttaacaatgcattttatagcttctttcttcgatatttagaagctcaaaaaaagtgttcaactgtgtaggaacagtgagatcaatgattcaatgcctgcacctagatatgacatgtggtgattttgttgactgtactttaaactcaagttttgaacaactcattaaactcaaattgtgaacaactcattgtaacacataactgttgtcttttctacaatgttcactattatcttgtgtatggtttctattatgctcctagaaccttcattgcagccgtcgagttttttttgcatgtgtatatatatgtccgaacctcgtggtgcaaaaaaacatgaaaaatgttgaaaaacaggtattatgctggtaaaggcatatgtggttgcagacatgttcaactaatatccttttttcacatatttgccaatgatccgattattgtttttaaactttctttaccatgaagattactaattgtatattgttataattcaagtttagttatattccttcttcatataaaagtatcctacaataaaaaattgtgcgcgctctggcgtgcgccaaccaccagtatatatataaagtgaaggggtaaatagcgttagtcagaaaaagacaacattgtattggtcacaacattatataacatgttttgtaacgatagcgttagtgcagaaaaaggtacgcatctgaaacggacgtgccagcaaaaaccgccacgtgctgaaccgcctgccgcaccgcactagcgtccgcaacagcaggagacgtcctcgctttccacctgcacagagcgccagggccgtagcgtgccgatcgctcgatcccaccaactgaggccactgtctagttgccgactctcctcgcaggccgcaatctcgcagacacgcaccgtcgcggtatccgtatcgccagagtcctcacggatggcctcgccagcgatggtcccgctgcggcagctcttcgtcgacggcgagtggcgcccgcccgcgcagggccgccgcctccccgtcgtcaaccccaccaccgaggctcacatcggcgagatccctgcgggcacagcggaggacgtggacgccgcggtggcggcggcgcgggcggcgctcaagaggaaccgtggccgcgactgggcgcgcgccccgggggccgtccgggccaagtacctccgcgctatcgccgccaaggtgattgagaggaaacctgagctggctaagctagaggcacttgattgtggga

SEQ ID NO: 39812 - DNA, 543 bp, Zea Mays
gaaattctgttgcattccttaacattgcatttttcttgacagcctgttacactggaacttggtggaaaaagtcctatagtagtatttgatgatgttgacattgacaaagctgtcgagtggactctgtttgggtgcttttggaccaatggtcagatttgcagcgcaacatctcgtcttcttatccatacaaaaattgctaaaaaatttaatgagaggatggttgcatgggccaaaaatattaaggtttcggatccacttgaagagggttgcaggcttgggccagttgttagtgaaggacagtatgagaagattaagaagttcatatcgaatgccaaaagccaaggtgctactattctgactggaggtgttagacctgcgcatcttgagaaggggttctttattgaaccaactattattactgatatcaccacatcaatggaaatctggagggaggaagtctttggtccagtcctgtgcgttaaagaatttagcactgaagatgaagccatcgaacttgccaacgatacacatatccttcttttg

SEQ ID NO: 39813 - DNA, 2363 bp, Zea Mays
gtcagttggttggccgccaagccagtgcaaccgttacgttccaaacttccaactcaaaggcgtcaatctcgtggtcatgctcttgtgcaagtgcagcaaagcacgggtcaccggatcctttccagctctcggccgcgggccgcccgcttgaaatagagcgcaggccacctgccgccggtggcccgtgcactgcacccgggagtacctgctctaccgcgccggcgcgccttgctccgccctaggcaagcaacacgcacgccggtcgctggcgtggcggcggcacttaaaaaaaatcctgcgagcccgttcggcgcgagccgagttttcgcatttgtctcgacgcggccgcgcgatctctggcgctgcatcacgggccggggccgcgagccacacacggagcaagcagccaagcgagcgaagcgaacaaaaagctcacgggggccagctaagcgcacggaccgacgcccgacgatggccgctctgccgcggcggaggctcctcctctttctcgcgctgctccgtgttctaatctgcggagcggcgccgttccgggcgagggacctgctgccgctgctgccgcggcggatggcgtggcagctcatgggcgccacggcccacagcgccgtcgacctgctcccgtcgttcgtcggcgccgtggcgccgggcgggcccgcggccgcctggcgcggcgcgtgcttcgacgaaaaccaggccgtgctcgacctcacccccggccgcaacgggaccgccgggggcctcggtggcgccgtcctccgcctcaagactgcttcgcctcagagctggacatgcatggacctgtacgtgttcgcaacgccctacagggtagcctgggactactacatgaggtcgaacgagaaccacaccttcgagatcaaagcgtgggaggacgcggcagagatggaatacgtaaagcagcacgggatcgccgtcttcctgatgccatctgggatgcttgggacgctgctgtccttggccgacgtggcgcctttgttctccaacaccggctggggccaggacgccaacttggcgttccttgggaagcacatgggggcgtcgttcgagaggcgtcgttccgcgaacacaattataaggagggaggacgtgcggtcgggcgacttcttggcgctctccaagatccggggccggtggggcgggttccagacgctggagaagtgggtcaccggcgccttcgccggccacaccgcggttgtcctcaaagatggtgacgccaacctctgggtcgcagaatcaggctacgaaaataacaagggtgacgagatcattagcatgactccgtgggacgagtggtgggggatggcgctcaaggacgagtccaaccctcagatagcgcttctgccgctgcaccccgatgtacgggcaaggttcgacgaaagcgccgcgtgggaattcgcccggagcatgtgcgggaaaccctacggctaccacaacatgatatttagctggatcgatacggcgtcagacaattacccgcctcctcttgacgccaacctggtaatggccattatgtccatgtggaccagactgcagccgcgctatgcttccaacatgtggaacgaagcacttaacaagcgacttgggactgagaaactggacctccatgggatcattagggagaccgagagacggggcctgtccttcaaccagctgctcaccgtacctgagcgagacgactgggagtacagcgacggcaagtccacgacgtgcgtcgccttcatcctgtccatgtacaaggcggccggagtcttcgctccctacacggagtccatccaggtcaccgagttcaccatccgggacgcgtacatgctcaagatcttcgaggacaaccagacgcggctgcccagctggtgcaacgcggcggcggacggcctccccttctgccagatcctcggggagtacaagatgggcctgccggagtacaacaccatcgagccctacgccaacatgaacgagaactgcccctcggcgccgcccacctacagccgcccgtcgcgctgctagctcggcgttgcctggggtaagtcgtcgtcgacgtcgtacgtgcagagtatatgttgttgttgttgttgttcgctcgtatgcttaattcagccattaattcagctacggcctagctaccggcacaagttaatttgcttagcctttagccttcgctgctgtaaagtgactgctcgtggaaatgattactacaaaattagtgtaaagcggccgcacatctggccttcagtatgttgtctgttttgtgtaatgcaagagccttatcaacatgaaacatcagaacgactgctccagtagcgtgttctggaaaatatacttgctcaacg

SEQ ID NO: 39814 - DNA, 1824 bp, Zea Mays
cctctgttgtacacttgtcaatcttaattggatgaactgggactgctacattcgactgcttcgcctcagagctggacatgcatggacctgtacgtgttcgcaacgccctacagggtagcctgggactactacatgaggtcgaacgagaaccacaccttcgagatcaaagcgtgggaggacgcggcagagatggaatacgtacgtaaagcagcacgggatcgccgtcttcctgatgccatctgggatgcttgggacgctgctgtccttggccgacgtggcgcctttgttctccaacaccggctggggccaggacgccaacttggcgttccttgggaagcacatgggggcgtcgttcgagaggcgtcgttccgcgaacacaattataaggagggaggacgtgcggtcgggcgacttcttggcgctctccaagatccggggccggtggggcgggttccagacgctggagaagtgggtcaccggcgccttcgccggccacaccgcggttgtcctcaaagatggtgacgccaacctctgggtcgcagaatcaggctacgaaaataacaaggcagttcttgctggttcagttttttcatagctagagctaggaagctagctttgattcagccttatagctagctaatttatggcaataattgtggcctgcagggtgacgagatcattagcatgactccgtgggacgagtggtgggggatggcgctcaaggacgagtccaaccctcagatagcgcttctgccgctgcaccccgatgtacgggcaaggttcgacgaaagcgccgcgtgggaattcgcccggagcatgtgcgggaaaccctacggctaccacaacatgatatttagctggatcgatacggcgtcagacaattacccgcctcctcttgacgccaacctggtaatggccattatgtccatgtggaccagactgcagccgcgctatgcttccaacatgtggaacgaagcacttaacaagcgacttgggactgagaaactggacctccatgggatcattagggagaccgagagacggggcctgtccttcaaccagctgctcaccgtacctgagcgagacgactgggagtacagcgacggcaagtccacgacgtgcgtcgccttcatcctgtccatgtacaaggcggccggagtcttcgctccctacacggagtccatccaggtcaccgagttcaccatccgggacgcgtacatgctcaagatcttcgaggacaaccagacgcggctgcccagctggtgcaacgcggcggcggacggcctccccttctgccagatcctcggggagtacaagatgggcctgccggagtacaacaccatcgagccctacgccaacatgaacgagaactgcccctcggcgccgcccacctacagccgcccgtcgcgctgctagctcggcgttgcctggggtgtgtgtaaactgtaaactaagctagctaagtgtaaatagaccacgctgtgtgcatgctattcatgcagtggtttcatttgcaggtaagtcgtcgtcgacgtcgtacgtgcagagtatatgttgttgttgttgttgttcgctcgtatgcttaattcagccattaattcagctacggcctagctaccggcacaagttaatttgcttagcctttagccttcgctgctgtaaagtgactgctcgtggaaatgattactacaaaattagtgtaaagcggccgcacatctggccttcagtatgttgtctgttttgtgtaatgcaagagccttatcaacatgaaacatcagaacgactgctccagtagcgtgttctggaaaatatacttgctcaacg

SEQ ID NO: 39815 - DNA, 1764 bp, Zea Mays
gtcaatcttaattggatgaactgggactgctacattcgactgcttcgcctcagagctggacatgcatggacctgtacgtgttcgcaacgccctacagggtagcctgggactactacatgaggtcgaacgagaaccacaccttcgagatcaaagcgtgggaggacgcggcagagatggaatacgtacgtaaagcagcacgggatcgccgtcttcctgatgccatctgggatgcttgggacgctgctgtccttggccgacgtggcgcctttgttctccaacaccggctggggccaggacgccaacttggcgttccttgggaagcacatgggggcgtcgttcgagaggcgtcgttccgcgaacacaattataaggagggaggacgtgcggtcgggcgacttcttggcgctctccaagatccggggccggtggggcgggttccagacgctggagaagtgggtcaccggcgccttcgccggccacaccgcggttgtcctcaaagatggtgacgccaacctctgggtcgcagaatcaggctacgaaaataacaaggcagttcttgctggttcagttttttcatagctagagctaggaagctagctttgattcagccttatagctagctaatttatggcaataattgtggcctgcagggtgacgagatcattagcatgactccgtgggacgagtggtgggggatggcgctcaaggacgagtccaaccctcagatagcgcttctgccgctgcaccccgatgtacgggcaaggttcgacgaaagcgccgcgtgggaattcgcccggagcatgtgcgggaaaccctacggctaccacaacatgatatttagctggatcgatacggcgtcagacaattacccgcctcctcttgacgccaacctgactgcagccgcgctatgcttccaacatgtggaacgaagcacttaacaagcgacttgggactgagaaactggacctccatgggatcattagggagaccgagagacggggcctgtccttcaaccagctgctcaccgtacctgagcgagacgactgggagtacagcgacggcaagtccacgacgtgcgtcgccttcatcctgtccatgtacaaggcggccggagtcttcgctccctacacggagtccatccagatccgggacgcgtacatgctcaagatcttcgaggacaaccagacgcggctgcccagctggtgcaacgcggcggcggacggcctccccttctgccagatcctcggggagtacaagatgggcctgccggagtacaacaccatcgagccctacgccaacatgaacgagaactgcccctcggcgccgcccacctacagccgcccgtcgcgctgctagctcggcgttgcctggggtgtgtgtaaactgtaaactaagctagctaagtgtaaatagaccacgctgtgtgcatgctattcatgcagtggtttcatttgcaggtaagtcgtcgtcgacgtcgtacgtgcagagtatatgttgttgttgttgttgttcgctcgtatgcttaattcagccattaattcagctacggcctagctaccggcacaagttaatttgcttagcctttagccttcgctgctgtaaagtgactgctcgtggaaatgattactacaaaattagtgtaaagcggccgcacatctggccttcagtatgttgtctgttttgtgtaatgcaagagccttatcaacatgaaacatcagaacgactgctccagtagcgtgttctggaaaatatacttgctcaacg

SEQ ID NO: 39816 - DNA, 1033 bp, Zea Mays
aaaaaagaggtataaagaagacggaggtgggagggaccgagagagtatagcgtctgtttcgcaccaaccgaatagtcacataaaattccgtttgcccaaacctagagctacctccgccgccgccgccggcaatcaagacagctgatggatcctatgcagtcatcggtgagaggccgcaggtcttcgttgcatgctgatgctgtcataactattggaggagtccgacctgcaccacccccacaaacatccacacaacatgtatgtcaagatgaggcaatggtcagcagcggggatccctcttggatgtctggttacagcactgattcctgccggggtggttattacacttctgcactcaacctggagggtgcatcaattagagaactgaagctgaaatatcagaagctgaaatatcggaataaacctaacaattgtaatgcggacgatcatgtcaatgctgaaagatcacccggaagaaaagctgaggagaaaaaagtgctggcgagaaagcatgaagattgtgatgatgaccctttcattgaagaaattaaaaagacgagagaagcacatcaagaaatagagagagatcgaaaggcccgtgatgataagttctatgagctagagaagattaagcttgacttgaagcgagaccgactggatacaatgataatgcaaactgacacgagcgcaatggacagtgaagcaaaacaatactttaagctgatgaaagaagagattttggctcgtcgattcaagagtaggaaagcataggtgtttccatttaatggattttagactgaagttgtttttcgttctttttaatggagttagtatttggtttgtatcttcaataatgctataatacttgtggatgctctgcattagggccagaaaaaaagctcgagctggctcgggctcgtagcagttcggctcgaaccggtttaacgctccgaatgagtctgagtcgaacctctttttatagctcgtgaaaagagcgagccagctcgcgagctggttcgtggctcgaccgaag

SEQ ID NO: 39817 - DNA, 1556 bp, Zea Mays
ctaatattgtggatgatcataatttggtaatgatatatatggttgattcccatcttggatgaagttgaagtgtcttttttgaatcacgttatatgaagtgttgtaggcatatcatgcacatcacatcatccatattgcattttgaagttatgtcgtgatcttatggtccgaccgtaccggtacatttttagcatcgtacgttgcccgaggaggggtacgatgcggcttcatatccttagaggtatgaaggcagaagtcatccttgcatttgcatacatttgcactcatgaggaatatatgaagtgtgacattactatgttactattgtggtttctacccgcgaggtgtggtaactaggtgtgttgtatgttgtatacgtgctgcaccttcgtaataagaaggttgtggaatcaagtggtggtaaaacaatgttcttatgtggttaaagagtttgatattattttacatgctgagatgtgtcatctcactcttgcattactcaatgcaggtacttgatacatgttgggaatgaggggagtagcagcacgtccactttcactctcacaataacgctacccaggcgcagccatgatttaattagaaacttattgtcaaaggaagtttgtttttttatatagtcgtgcgcactggttaattcatttcaggtcgtatgtttatctttccttgctagccgattaataatacttagtatgcttttgtcatgatatatgtttatacactgttgccccctcatttatgcaatcttgcaaaggggatgctgccgaaatttaatatatggacgtcggaagtgtagttcagtagcattccgggttgtttgtggaacccggagtgttacaaatacatcctttccttttgttttttatatacctcttttcattggcagccgtaaatatgcggcccactattccttgatttactctcgttttaggctgccgccttttgtgcatccacctcctattcctgtaaaagcagagggtaaacactgccgattgaaagtaggatatgtgagtagtgactttggaaatcaccccctttcccatctcatgggatcagtatttggaatgtatgatcgtgccaatatcgaggtcttttgctatgcactcagtcaaaacgatggtactgagtggaggcagcgtattcggtctgaggcagaacattttgtcgatgtttctgccatgacttccgataatatcgccgagcttatcaatcaagacaaaatacagattttgataaatcttaatggctacacaaaggattccgactctcatcaagtgactcctccccctcacgatgactttgcggacagatgtctcaattctagtggtggagctacgaacaacaattcgatgtcccgatcaagagcgatggagctaatgtttgaacttgtgaactaaaaatgtgaactatggatgtgaacttaagtgaatttgtgaacttatgtatttggactatgtgaatttgtgaacttatgtatttggacttgtgtgaatttgtgatatgaatatttatccatgtgtttgaaatctgtattgtat

SEQ ID NO: 39818 - DNA, 2381 bp, Zea Mays
cccatgcatatcccccattctgtgtatttatactcgtctgatcagtctttttctcataatatctcttgccttttaataccgtaacctaaccaagagtccaagattagctagttgacaacacaagaaaccaactgcattcgatctcggcttccttaatacctcatctccgtggacatctcaagagcaatagtgacgggccaagagaagggagaggaagcaatggctgtagctagctagctactgcgatagcaagtcacagaaaaatcatcaccacacacaaacacacacataagcacaagcaaaaaagcatcatccccagcaggtcccaataagaactccaaccatcactgccttcatcatccgatctcatatatccttacgccaacgacagctgctagctgcagcggagggagggcggcggcgcacgcgcggcacctatggaggcgcgggcagtgtcggcgctggacctttcgctgcacatcagcctgccgagcagcgccgccgggtcggcatcgcccgccccggagctgggcggcgggggagggattgggcgaggtgcgcagccgccggccggagcggacccatggcgtcgactgaacggatccacggcgtcgaccgagctgtcgctctcgccgccgctgtggcagcaggacgtggctgccggggatgtccttccgtgccgtcggctccggccggcagcgccgaatcactactcctccaccgcggatgcaacgacgttcgtgccagtgaccgtaccccggcttatttcgttcgacgccgcggcgggagcggaggacgaggcggcgcgggcgaggccaatcgaaggcgtgcccgtctacagcagctcgcgggctgcccgtcgtccatttctaggcgccggtgccggtgagtaccaccgccagggccaccacccaaaggcggccgggctatacaatcgtccctgtcactcctcgtcgcggccctcgtccctgcgctcgacgacgacgacgacgtctcccgccgtggctccccccgcggagtcctcgtacctctcgccgtccgcgtaccaccggatgctgtcgagcaccagcaggctccgcctccagggcgtgctcgccgacacgctccggggctacggcggacaccaccaccagcagcagcacttggacagcctcgccgcggcccgctatatgccgaggttcctggcctccaggcgcggcatgcgcgcaccgcggatgcggtggaccagcagcctgcacgcgcgtttcgtccacgccgtcgagctcctcggcggccacgagcatctgccagaatcatttcatgcgggatatgattaatctccccttctctctctccccggccggcctctctcggcacacaaacaggggcgacgcccaagtcggtgctcgagctgatggacgtcaaggatctgacgctagcgcatgtgaagagccacttgcagatgtacaggaccgtgaagagcactgacaagcctgcaacgacctcatcgggcgggccgcctgtggacggtggcggcgacgacgatgatctcccgagtgcccggcgggctcagtcgtcgtcgtcgtcgccagctggacgacgggacggcagcagcccgcaggcgttcaccagacaccggtcggctgcctcctcggagggcgcggcgagcctcgcgggcggcgacgacgtcgaatgctcctcctcggccgacgattccgactgcggcagggcgcgcagtgcttcgtcgtcaagagatcagttgctaccaccaagtgcaggcagtgcaggcacccttccttcagttggcgtatcatcatccactactgaggatatggagccagcttatcgatcagtaggcttgcaacaggcacccaaccatgaaatgagctgccctcctagcctggagttcaggctagggcgaccgatctggaacggagcagaacattagtagctaacactatctgcaacagcttattcaaactccactatgtaaacggtacagtctacaatgtagaacagtgcaaaacaatgttttaggtaaccatatgggtaaatgttggacacggtctaagcaacactagttacacacatgaatggcacattattagttcaacacttccactatacagtttactatatataccttgattggtccttgcatcatctagaatttaggaatgtggtgaaacgaaatgtggaattaatgatattagttttgtgttggccccaagatcgtcacaacatgaacttgctttgggttttgtttccttttttacattttggcttttgttgtggtcatataaaacaaaggtatatattgttgtttttttggtgatggcaagctagagaagggagttcaaacaaattatatgtatatcatgatgagttgggttggctaacag

SEQ ID NO: 39819 - DNA, 2016 bp, Zea Mays
gcccggcgtgcccgaacagcgcctcaccgcgccgcacgcctgcgtcggtcgccgaccccagtcaccggtccacgcccgcctccccctttctcctccgccctttcttgtgaccgccgccgcgggccctagcccgccgttccctctccggcgccccgctcccgcacccgcaccggatcagtccgggccgcgtggtcgcccccacctaccgcctcgggtccactcgctcgcggttgcgtgtcccgcggggtggcccctcgggcctcggcagctccggtttcgaatggggctctcgtcggccgccactggcgacggggtgcagctctgcgtgttcgacctccagagggggcaacaggagggccaggagctcgacaagatcctctacttctaccccgccgactgccccatcctgctccagctctctgtcatcggcctctgcgaggggatcgtcactttcactaggttgtggaaaaaaacaaggaaaatgaattgacttggcgttgtggtgcactacaagggattcttaaagaggctcattctctctttgcaatgtttcatggaccaatccgaactttgcttcacaaacaacccagtgcagagcttgctcgtggtcacctccgcacatttcttacagattatttgagcgattttaatgttggaaagaagttacaatttccaacctaccgtgacagcctaaaggagaggggaacagtccaaatgcttacggtatcacgagaagtggcacttgacgttcagtcactcgccacagtacttggatcatgtcttggaaatgttacctgccaatcacttgtactatttgaagacctcttggtgtcaacgacactgcccccggatgatactttaaacctatatacatatgctgttctgaggttaactccgcgtgctttatattccaatgcaagttcttggtcctatttgcggaaaggaacttctgttagtgctggccaaacatcaagttcatcaaatggaacaactgcaggagaaaggcctctcctacgtgagaaattgtcaaagggaaaggatggctttgttgctgctgatttcacagctacagaagctcgttgtgctgtaccctcgactccaatactttggttccagcaggcagatgagtgcatgcacctatgcatttatcagcacaaaagtctcactatcttactgctggttcctgcttcctcagtgataaatggagaagagggcattactcatgtgaagaaggcgatgcttgaaaatgcatcacagaagattgtcactgttgagcagaaattgacacgaggatggggaggagaaaatgcgtatcatgttagtggatatcgttatttgcttgttgatccggagagaagagtatcaagagcctccccacctgggaaagtcaccaccctagcaaaggattctctacttgccctcaacatgctaagacaagaagtagatctagagaagtcaagatacaagagaggcgacccttgtcatgataaggatttcgaagtatgtatcagaacaaaaaacaatgcgtgggttattgctaaaatcagtcaaggaagggagctttacatggctctagagaagggtggtgaaacgcttctatatgcatccacagctgtagagaaattcagcaacaggtactgtgagggagcattctctacagattagaagcaccagagggagatcttagcttttccatacattacctattatgtacatcctgtttttttcccagctgtatcgttgccccctattgttgagagactcggaccactctttgcgaagggaataaggagttcgtatcagttgtacagctgctctgctgtcgtgtgctatctgcaaaagaatagcctagtctgggaataacgcagagcgggatagagtttgtttgttcacttatgcccttccttaacgcagagcattgtgcgtgttttcattttgctgtaacagccggcgatttacctgcagactgggaaagtaacttagcgtttaatttggtattctgcattttgatggtct

SEQ ID NO: 39820 - DNA, 2143 bp, Zea Mays
gcccggcgtgcccgaacagcgcctcaccgcgccgcacgcctgcgtcggtcgccgaccccagtcaccggtccacgcccgcctccccctttctcctccgccctttcttgtgaccgccgccgcgggccctagcccgccgttccctctccggcgccccgctcccgcacccgcaccggatcagtccgggccgcgtggtcgcccccacctaccgcctcgggtccactcgctcgcggttgcgtgtcccgcggggtggcccctcgggcctcggcagctccggtttcgaatggggctctcgtcggccgccactggcgacggggtgcagctctgcgtgttcgacctccagagggggcaacaggagggccaggagctcgacaagatcctctacttctaccccgccgactgccccatcctgctccagctctctgtcatcggcctctgcgaggggatcgtcactttcactagaatattttccccagaagaggattgcgaggttatagaatcagagaaacactcccatgttttttaccaagccgaaacggatatttggatggttctggttgtggaaaaaaacaaggaaaatgaattgacttggcgttgtggtgcactacaagggattcttaaagaggctcattctctctttgcaatgtttcatggaccaatccgaactttgcttcacaaacaacccagtgcagagcttgctcgtggtcacctccgcacatttcttacagattatttgagcgattttaatgttggaaagaagttacaatttccaacctaccgtgacagcctaaaggagaggggaacagtccaaatgcttacggtatcacgagaagtggcacttgacgttcagtcactcgccacagtacttggatcatgtcttggaaatgttacctgccaatcacttgtactatttgaagacctcttggtgtcaacgacactgcccccggatgatactttaaacctatatacatatgctgttctgaggttaactccgcgtgctttatattccaatgcaagttcttggtcctatttgcggaaaggaacttctgttagtgctggccaaacatcaagttcatcaaatggaacaactgcaggagaaaggtaccgtagtcgatctcgtgatacttctccaggtggacaaaatcagatgaatcgtaatttcaggcctctcctacgtgagaaattgtcaaagggaaaggatggctttgttgctgctgatttcacagctacagaagctcgttgtgctgtaccctcgactccaatactttggttccagcaggcagatgagtgcatgcacctatgcatttatcagcacaaaagtctcactatcttactgctggttcctgcttcctcagtgataaatggagaagagggcattactcatgtgaagaaggcgatgcttgaaaataaattgacacgaggatggggaggagaaaatgcgtatcatgttagtggatatcgttatttgcttgttgatccggagagaagagtatcaagagcctccccacctgggaaagtcaccaccctagcaaaggattctctacttgccctcaacatgctaagacaagaagtagatctagagaagtcaagatacaagagaggcgacccttgtcatgataaggatttcgaagtatgtatcagaacaaaaaacaatgcgtgggttattgctaaaatcagtcaaggaagggagctttacatggctctagagaagggtggtgaaacgcttctatatgcatccacagctgtagagaaattcagcaacaggtactgtgagggagcattctctacagattagaagcaccagagggagatcttagcttttccatacattacctattatgtacatcctgtttttttcccagctgtatcgttgccccctattgttgagagactcggaccactctttgcgaagggaataaggagttcgtatcagttgtacagctgctctgctgtcgtgtgctatctgcaaaagaatagcctagtctgggaataacgcagagcgggatagagtttgtttgttcacttatgcccttccttaacgcagagcattgtgcgtgttttcattttgctgtaacagccggcgatttacctgcagactgggaaagtaacttagcgtttaatttggtattctgcattttgatggtct

SEQ ID NO: 39821 - DNA, 2090 bp, Zea Mays
gcccggcgtgcccgaacagcgcctcaccgcgccgcacgcctgcgtcggtcgccgaccccagtcaccggtccacgcccgcctccccctttctcctccgccctttcttgtgaccgccgccgcgggccctagcccgccgttccctctccggcgccccgctcccgcacccgcaccggatcagtccgggccgcgtggtcgcccccacctaccgcctcgggtccactcgctcgcggttgcgtgtcccgcggggtggcccctcgggcctcggcagctccggtttcgaatggggctctcgtcggccgccactggcgacggggtgcagctctgcgtgttcgacctccagagggggcaacaggagggccaggagctcgacaagatcctctacttctaccccgccgactgccccatcctgctccagctctctgtcatcggcctctgcgaggggatcgtcactttcactagttatatgcagaatattttccccagaagaggattgcgaggttatagaatcagagaaacactcccatgttttttaccaagccgaaacggatatttggatggttctggttgtggaaaaaaacaaggaaaatgaattgacttggcgttgtggtgcactacaagggattcttaaagaggctcattctctctttgcaatgtttcatggaccaatccgaactttgcttcacaaacaacccagtgcagagcttgctcgtggtcacctccgcacatttcttacagattatttgagcgattttaatgttggaaagaagttacaatttccaacctaccgtgacagcctaaaggagaggggaacagtccaaatgcttacggtatcacgagaagtggcacttgacgttcagtcactcgccacagtacttggatcatgtcttggaaatgttacctgccaatcacttgtactatttgaagacctcttggtgtcaacgacactgcccccggatgatactttaaacctatatacatatgctgttctgaggttaactccgcgtgctttatattccaatgcaagttcttggtcctatttgcggaaaggaacttctgttagtgctggccaaacatcaagttcatcaaatggaacaactgcaggagaaaggcctctcctacgtgagaaattgtcaaagggaaaggatggctttgttgctgctgatttcacagctacagaagctcgttgtgctgtaccctcgactccaatactttggttccagcaggcagatgagtgcatgcacctatgcatttatcagcacaaaagtctcactatcttactgctggttcctgcttcctcagtgataaatggagaagagggcattactcatgtgaagaaggcgatgcttgaaaataaattgacacgaggatggggaggagaaaatgcgtatcatgttagtggatatcgttatttgcttgttgatccggagagaagagtatcaagagcctccccacctgggaaagtcaccaccctagcaaaggattctctacttgccctcaacatgctaagacaagaagtagatctagagaagtcaagatacaagagaggcgacccttgtcatgataaggatttcgaagtatgtatcagaacaaaaaacaatgcgtgggttattgctaaaatcagtcaaggaagggagctttacatggctctagagaagggtggtgaaacgcttctatatgcatccacagctgtagagaaattcagcaacaggtactgtgagggagcattctctacagattagaagcaccagagggagatcttagcttttccatacattacctattatgtacatcctgtttttttcccagctgtatcgttgccccctattgttgagagactcggaccactctttgcgaagggaataaggagttcgtatcagttgtacagctgctctgctgtcgtgtgctatctgcaaaagaatagcctagtctgggaataacgcagagcgggatagagtttgtttgttcacttatgcccttccttaacgcagagcattgtgcgtgttttcattttgctgtaacagccggcgatttacctgcagactgggaaagtaacttagcgtttaatttggtattctgcattttgatggtct

SEQ ID NO: 39822 - DNA, 1774 bp, Zea Mays
ctcagactgacatgggggttaacatcagtaattggggcccttcataagcaacatctcttttgtggtcacattatgacttccgtttgctctttgatagtgtattctccccaaattgccatccaaaatattttccccagaagaggattgcgaggttatagaatcagagaaacactcccatgttttttaccaagccgaaacggatatttggatggttctggttgtggaaaaaaacaaggaaaatgaattgacttggcgttgtggtgcactacaagggattcttaaagaggctcattctctctttgcaatgtttcatggaccaatccgaactttgcttcacaaacaacccagtgcagagcttgctcgtggtcacctccgcacatttcttacagattatttgagcgattttaatgttggaaagaagttacaatttccaacctaccgtgacagcctaaaggagaggggaacagtccaaatgcttacggtatcacgagaagtggcacttgacgttcagtcactcgccacagtacttggatcatgtcttggaaatgttacctgccaatcacttgtactatttgaagacctcttggtgtcaacgacactgcccccggatgatactttaaacctatatacatatgctgttctgaggttaactccgcgtgctttatattccaatgcaagttcttggtcctatttgcggaaaggaacttctgttagtgctggccaaacatcaagttcatcaaatggaacaactgcaggagaaaggcctctcctacgtgagaaattgtcaaagggaaaggatggctttgttgctgctgatttcacagctacagaagctcgttgtgctgtaccctcgactccaatactttggttccagcaggcagatgagtgcatgcacctatgcatttatcagcacaaaagtctcactatcttactgctggttcctgcttcctcagtgataaatggagaagagggcattactcatgtgaagaaggcgatgcttgaaaatgcatcacagaagattgtcactgttgagcagaaattgacacgaggatggggaggagaaaatgcgtatcatgttagtggatatcgttatttgcttgttgatccggagagaagagtatcaagagcctccccacctgggaaagtcaccaccctagcaaaggattctctacttgccctcaacatgctaagacaagaagtagatctagagaagtcaagatacaagagaggcgacccttgtcatgataaggatttcgaagtatgtatcagaacaaaaaacaatgcgtgggttattgctaaaatcagtcaaggaagggagctttacatggctctagagaagggtggtgaaacgcttctatatgcatccacagctgtagagaaattcagcaacaggtactgtgagggagcattctctacagattagaagcaccagagggagatcttagcttttccatacattacctattatgtacatcctgtttttttcccagctgtatcgttgccccctattgttgagagactcggaccactctttgcgaagggaataaggagttcgtatcagttgtacagctgctctgctgtcgtgtgctatctgcaaaagaatagcctagtctgggaataacgcagagcgggatagagtttgtttgttcacttatgcccttccttaacgcagagcattgtgcgtgttttcattttgctgtaacagccggcgatttacctgcagactgggaaagtaacttagcgtttaatttggtattctgcattttgatggtct

SEQ ID NO: 39823 - DNA, 1649 bp, Zea Mays
aagaagtaaaaagggcaaagatagccctggttgtggaaaaaaacaaggaaaatgaattgacttggcgttgtggtgcactacaagggattcttaaagaggctcattctctctttgcaatgtttcatggaccaatccgaactttgcttcacaaacaacccagtgcagagcttgctcgtggtcacctccgcacatttcttacagattatttgagcgattttaatgttggaaagaagttacaatttccaacctaccgtgacagcctaaaggagaggggaacagtccaaatgcttacggtatcacgagaagtggcacttgacgttcagtcactcgccacagtacttggatcatgtcttggaaatgttacctgccaatcacttgtactatttgaagacctcttggtgtcaacgacactgcccccggatgatactttaaacctatatacatatgctgttctgaggttaactccgcgtgctttatattccaatgcaagttcttggtcctatttgcggaaaggaacttctgttagtgctggccaaacatcaagttcatcaaatggaacaactgcaggagaaaggtaccgtagtcgatctcgtgatacttctccaggtggacaaaatcagatgaatcgtaatttcaggcctctcctacgtgagaaattgtcaaagggaaaggatggctttgttgctgctgatttcacagctacagaagctcgttgtgctgtaccctcgactccaatactttggttccagcaggcagatgagtgcatgcacctatgcatttatcagcacaaaagtctcactatcttactgctggttcctgcttcctcagtgataaatggagaagagggcattactcatgtgaagaaggcgatgcttgaaaatgcatcacagaagattgtcactgttgagcagaaattgacacgaggatggggaggagaaaatgcgtatcatgttagtggatatcgttatttgcttgttgatccggagagaagagtatcaagagcctccccacctgggaaagtcaccaccctagcaaaggattctctacttgccctcaacatgctaagacaagaagtagatctagagaagtcaagatacaagagaggcgacccttgtcatgataaggatttcgaagtatgtatcagaacaaaaaacaatgcgtgggttattgctaaaatcagtcaaggaagggagctttacatggctctagagaagggtggtgaaacgcttctatatgcatccacagctgtagagaaattcagcaacaggtactgtgagggagcattctctacagattagaagcaccagagggagatcttagcttttccatacattacctattatgtacatcctgtttttttcccagctgtatcgttgccccctattgttgagagactcggaccactctttgcgaagggaataaggagttcgtatcagttgtacagctgctctgctgtcgtgtgctatctgcaaaagaatagcctagtctgggaataacgcagagcgggatagagtttgtttgttcacttatgcccttccttaacgcagagcattgtgcgtgttttcattttgctgtaacagccggcgatttacctgcagactgggaaagtaacttagcgtttaatttggtattctgcattttgatggtct

SEQ ID NO: 39824 - DNA, 1438 bp, Zea Mays
caggtgcatgaagtggcgttaagcatatgttctatgtgacaagagggtaccatagaaactaaaagattttaatgttggaaagaagttacaatttccaacctaccgtgacagcctaaaggagaggggaacagtccaaatgcttacggtatcacgagaagtggcacttgacgttcagtcactcgccacagtacttggatcatgtcttggaaatgttacctgccaatcacttgtactatttgaagacctcttggtgtcaacgacactgcccccggatgatactttaaacctatatacatatgctgttctgaggttaactccgcgtgctttatattccaatgcaagttcttggtcctatttgcggaaaggaacttctgttagtgctggccaaacatcaagttcatcaaatggaacaactgcaggagaaaggcctctcctacgtgagaaattgtcaaagggaaaggatggctttgttgctgctgatttcacagctacagaagctcgttgtgctgtaccctcgactccaatactttggttccagcaggcagatgagtgcatgcacctatgcatttatcagcacaaaagtctcactatcttactgctggttcctgcttcctcagtgataaatggagaagagggcattactcatgtgaagaaggcgatgcttgaaaatgcatcacagaagattgtcactgttgagcagaaattgacacgaggatggggaggagaaaatgcgtatcatgttagtggatatcgttatttgcttgttgatccggagagaagagtatcaagagcctccccacctgggaaagtcaccaccctagcaaaggattctctacttgccctcaacatgctaagacaagaagtagatctagagaagtcaagatacaagagaggcgacccttgtcatgataaggatttcgaagtatgtatcagaacaaaaaacaatgcgtgggttattgctaaaatcagtcaaggaagggagctttacatggctctagagaagggtggtgaaacgcttctatatgcatccacagctgtagagaaattcagcaacaggtactgtgagggagcattctctacagattagaagcaccagagggagatcttagcttttccatacattacctattatgtacatcctgtttttttcccagctgtatcgttgccccctattgttgagagactcggaccactctttgcgaagggaataaggagttcgtatcagttgtacagctgctctgctgtcgtgtgctatctgcaaaagaatagcctagtctgggaataacgcagagcgggatagagtttgtttgttcacttatgcccttccttaacgcagagcattgtgcgtgttttcattttgctgtaacagccggcgatttacctgcagactgggaaagtaacttagcgtttaatttggtattctgcattttgatggtct

SEQ ID NO: 39825 - DNA, 1240 bp, Zea Mays
caacgttcgaccatcccttgtaaaaagacttcaggacaaactcacatagttgaactgatcccttggggggctagtgttggagcggaggccgaacttgacctcaatctgtctaacccgactacaaccagacatttcttacacaggagcatcagacgaagggtacttcagattcgacgcgcaatagtctccgcttgactctccacaggagggcccgtgacagtaagaaggggggctcgccgcagccccagtcgcaccccgaaggcctttcctccgacgacggcgcccagctttttgtgcccagatgcacaggattaacagctgatggtctggtgaaaatcattcattttctgcatgggcagcacaaaggcaatctaagtcgtgttcgactgcatggtatctgcaagaaatgtgagactcgtgtttgattgtacaaggaagaactgcagggaagtgaaggatggccggtctcgatgccgcggttgcttcttttgtgttgctagatgtgaaacttgtggtggctgcatcgacctggaggagctcggtgagtctggactagcctgctctgactttctgtgcatggattgctggctcaagcttccaaaatgctgcacatgcaaccgtccctactgcgagaggcattcaaatttgaaagagaatctatcagcgtctgggcagttcacatgtcaggagtgtgcagcgtttgctacctcactcagaagtcggggagaaggttactagaagagatgttggctgctctgtctcggtaaccaaataattgggacttttaacacgtgactcgttcccctgtaacaaacagcctttcttattgattcaatcatctcgtgtggacggagcttataagacctgatggagtaactagaagcttaattgtcttactgctttcgtcaaacaaagtgggtgcagacctcaaggtcttgcgcatccaacttgtctgaatgaagggactgccatgtcaaggggggacaatgtgagcaacattgacagttgaagggctgccataattcaacattgacaatgtgagcaacgttgtttaagagtcgtgtgtgcccattgcaacatggcaataactttgtacctcagggctgtcagtgcaaatgtttctcaacgtttgtcttggttctgtataatttacaacgtactgccatgtatacacaccatgtgagcgaagcaacatctgatctgaagtgaggaagaaagaatacaaaagttatattgtcaa

SEQ ID NO: 39826 - DNA, 2819 bp, Zea Mays
tatgaaacattttcttataacaatataacacacattttatatataagttatcgtagtatactggtattatatattaccgttgcaacgcacgagcactcagctagttataatttaagcgaggacaggaatccacaagcgttcatagggatccgcacgaaaaaagaaattcgtggcggagacagggataaggagctaaaaactgatgaggaatattcctatgccatccctacacccacccacccaaaaaaagtttgagaaaactaaagctggcaaaacatattctgcaaacacagatgcaataagacgcgatctagcagtacgccaaatagatttgggaatctcagctcaggggcgcaaaaccgcaagacctgattcctgaaaccgaacagcgtgtttccgacatcttttcagtgacaactagaactagccaccacgaaaccgtctggatggtccaggagcaaatgcttgcaacaagttcaggagattcccgtccagtctgcttcaagatggcatgtgcaaagctttatcccaagcttctgcaacagagttgcgggacgtgtcccgcagattgtgagccagtatctgcttgttcccctgagctacagattaaaacgatcataaagtgtatcagatcaatcttatagtaatgataggttagtttagagtcatgtcttttagtatatattattttcaaagaaaaaaaaacagttcaacaaaaatgtaggcaagtggagcacatgttgcagcaatttgacctcaaattaacttaacagcatatctaagtaatgggatccaaggtctaagttgtcagctacaacctcatgctctctgcatgaatatgctagcacccatttgctaaaatgttcctccttttagctgttcggctgctggctgaacagctgctccacagccatccttcacacatggccagctgcggcagcataagtacagccgaacttctctccaaggacgcaatagagttgtgcgtcattccaataaggaaaatgcaaaagagaagcaaaaggcctactcccacacacccacacaatgacacaaaagcttataatttgctgagtgagtattcttagaaactggaggctttggctgtcttaataagcaacaagagaaatgcctagatcaagggaagtactttggccctgaactgtttttttttatcaaaaaccagaaaccgcaggtcagtttaaaatcagcaaatctctcctgttgacaaccatgaatacagcttgtgttctggtaaacaagtgttgccgtcagctccctacaaatttatgcagaagcagggtgtagcaaaaaaaaaaagaacgagagggggcaacaaactgaaaaaaaacactgccatgtgatagcagaggctctgcgttgcaagcagtcaaacaacaacaaagctgccatgcaggtaccttggatgctggtttgatccatagataacgatgattgcagtggaacatctatgttccccttgaatttttttctatgctccaacgtgcttcatgataacacctggtgaaaattgcagggaacaccagttaaaatccaagtactggtccccagacacctaaaactaaaactagtgcagcagcctagaatgtggtgaatgtatccaaagctaaagaattattaagcttctaaaagcttgctatgcactacagcagcagtatagaagaatcggattaatgactactacaagcactttttttcatttctaacccattttgttacctttcctagcttgaccactgcaattcagcataaacaatactgctaccataataacaaagggatcaattgagatgcagaatatggcatccatttaaaatgtgagcaacaaatgtgtacgacagcatggaatcttacttggaagtttcaggttatcacgcacacaacaaaactagggcctccatcttgccatgaagcataaaagagtcccaagttccagaaaatcgccactatccacagcacatatgggggaaaatactgtttcactttcatgtatttatggatcaggagtgaagcatcagggcaaatggctcacatactactcccaagtgaataggatttgcatgcatcaatgaatatgtacccaggccatgaacacgccatggaattggtttcgcccaaagcatggaccaatgatcacgcattgaattctgtctaccattagtgacacgaagacatttggtggtcctattggtgcataacatgatggggtcttcgacttgggtcagggaagccataggggggacctgtggctggattgaatcgtcatctacttaactaaactaaggacatcaaagatcacgctggccatttcaatcagcaggataactgtcttcatatacattagtatcatcactagttcactacataagccatgttgtgaaacattataacaaaacatagactactgaaccaattaaacccatacgttgcacatggttgccaaagccaaacaaatcatatttatactagaaagaaatgcactgctggtccaaacttttcccacattctcatctaggtccatgaactctcaaagtgataatctggaattctgggtcattcggtcctttcaactagttcattctaatcatggactctcaatgtaaatttttcttgtggcttgctgccctccaaagctgctggacagcagatcggctacaaaaacgagggcttgagcatcctgatagttgccctctttgtgaccaggaaccggaaacaattgaccatctgctggcagattgtgtttttacaagacaactatggtttcggttccttgggcaggtcaacctgcaggacctccc

SEQ ID NO: 39827 - DNA, 1925 bp, Zea Mays
attaccgttgcaacgcacgagcactcagctagttataatttaagcgaggacaggaatccacaagcgttcatagggatccgcacgaaaaaagaaattcgtggcggagacagggataaggagctaaaaactgatgaggaatattcctatgccatccctacacccacccacccaaaaaaagtttgagaaaactaaagctggcaaaacatattctgcaaacacagatgcaataagacgcgatctagcagtacgccaaatagatttgggaatctcagctcaggggcgcaaaaccgcaagacctgattcctgaaaccgaacagcgtgtttccgacatcttttcagtgacaactagaactagccaccacgaaaccgtctggatggtccaggagcaaatgcttgcaacaagttcaggagattcccgtccagtctgcttcaagatggcatgtgcaaagctttatcccaagcttctgcaacagagttgcgggacgtgtcccgcagattgtgagccagtatctgcttgttcccctgagcttggatgctggtttgatccatagataacgatgattgcagtggaacatctatgttccccttgaatttttttctatgctccaacgtgcttcatgataacacctggtgaaaattgcagggaacaccagttaaaatccaagtactggtccccagacacctaaaactaaaactagtgcagcagcctagaatgtggtgaatgtatccaaagctaaagaattattaagcttctaaaagcttgctatgcactacagcagcagtatagaagaatcggattaatgactactacaagcactttttttcatttctaacccattttgttacctttcctagcttgaccactgcaattcagcataaacaatactgctaccataataacaaagggatcaattgagatgcagaatatggcatccatttaaaatgtgagcaacaaatgtgtacgacagcatggaatcttacttggaagtttcaggttatcacgcacacaacaaaactagggcctccatcttgccatgaagcataaaagagtcccaagttccagaaaatcgccactatccacagcacatatgggggaaaatactgtttcactttcatgtatttatggatcaggagtgaagcatcagggcaaatggctcacatactactcccaagtgaataggatttgcatgcatcaatgaatatgtacccaggccatgaacacgccatggaattggtttcgcccaaagcatggaccaatgatcacgcattgaattctgtctaccattagtgacacgaagacatttggtggtcctattggtgcataacatgatggggtcttcgacttgggtcagggaagccataggggggacctgtggctggattgaatcgtcatctacttaactaaactaaggacatcaaagatcacgctggccatttcaatcagcaggataactgtcttcatatacattagtatcatcactagttcactacataagccatgttgtgaaacattataacaaaacatagactactgaaccaattaaacccatacgttgcacatggttgccaaagccaaacaaatcatatttatactagaaagaaatgcactgctggtccaaacttttcccacattctcatctaggtccatgaactctcaaagtgataatctggaattctgggtcattcggtcctttcaactagttcattctaatcatggactctcaatgtaaatttttcttgtggcttgctgccctccaaagctgctggacagcagatcggctacaaaaacgagggcttgagcatcctgatagttgccctctttgtgaccaggaaccggaaacaattgaccatctgctggcagattgtgtttttacaagacaactatggtttcggttccttgggcaggtcaacctgcaggacctccc

SEQ ID NO: 39828 - DNA, 1641 bp, Zea Mays
cggcaagtcctcccccccccctcctccccagctgggtgaatcaaattttatgggctcgtggaggaaggttaatgatcaggtgcaaggcatcgctgaaaagggcttaaattcattaatcattcttggattctggacgctttggaatcacaggaatggtggtaccttcgatatgaccactccaagtgtggattttgccatcagaagagctgaggaagaaagagagctatgggagatggcaggagctaatagtctctctcctttcggcccccattcctggactgttggtttagggtggtttggtttcagttatggatacatttatgtgttttcatttttggccaccataaggtggtcttttccctccatgttttggtctatttcggaccctcttatcctcttaatataatgatacacagctctcatgtgtgttcaagaaaaattcacaacttcaagtgaactacttgaaaaattaaaggacacatacgatcactttgagagtttatggactcaaatgagaacaggaaaagtttagggacacagtgtatttcgctctttatactactagtattagacaagattgcagacaattgtgcaggtgaaacaatggggaagataacatgtgatttatgactttctccatgttagttatgctgcctataatatgaagacaacatataagatgtatccaaaggcaagttagtaaatggatatttgccctactcaggtaattatgcaatagcatccatttagagctgtaagacttgaacacagaccaaaatggattcacatgctcaagaaacacaacacactttcagtgcttcggttcgttatattaaccaacttaatatgatttacacattaaaaagaacacggcatgctgacagaaataaccagcagtgttcttaaggtgcctaggcgagcaagtacaccagacaaccaccttagcgcctaggcgggtaaggcgagcaaggcggccagttttgcccgagcgcctggacgcctaggcgacgccttaagaacactgataaccagtcaaaaaatgttatttaattattgacaatttcttatgcattttcaaatggtacaaagttaaatccattatatcatatacataatatatgtaatatgtattatgtatacatgccaagagtcaaccatggtgtactctgtttaccaattgtctacttaaactctgttccatcttaaaccataatatatttatgacacaatcaggtcagcactcattggcccatttgacaagacacaaaacgaagtggcagctcggcgttcatggccattggatcacgtaaagtaatgtgtgatagtaaacaaacagacatagcatgctaattctcccctaattcaggtgtaggtcaaacctgttccttattcccttgtatacattttttttaaaaatggcatgctaatccttgcaacggcaggaatatagatggtcagagacttcctccagtactccagaaagcagttgttattataaatactcgtaaatggaacaaaactaattatggccaaaataccgtggtatcctctttgatgtacaaaagcagtaagctgacctttctcctgaaaagaagacatcaaagtcaattttgtggcattgaaagaaaatgtagagtaaag

SEQ ID NO: 39829 - DNA, 1488 bp, Zea Mays
agctgaaggttttatggtgagaacatccaacaattgtgtcctggttgccatgtggaagtactctctcaagatagtggtataaggggatgttggtttagatgtttgattctgaagaggcataaagataaaatcaaggtgcgctacctagaacttcaggatgctgatgagactggaaacttggaggagtgggttatgctaacacgagttgccaaacctgatcaactgggtgtacgtttccttggaaggccaatggttcgtccacagcgcgtggaacaaagcaaggcctcatgctttgatgttggagccattgttgatgcgtggtggcatggtggctggtgggagggaatcgtgctgtaccaggtgggcagtgggcgtctacaagtttattttccaggagaaaagcgaacagctgaatttggtgaagatgagctgaggtgttcccttgagtgggttggtaacaaatggaatcctttgaagggaagaaaagatgtcacaagcaagctgacctccactgcagattgtggaagtgaatatttgattgcgaaacaagatccactgaattttcatgtgcctaaaaattcagaacctcaactagagggacatcaatatgacaagaggggtattgagaaatcttcagtcagcacaatttcacgagatcagaaacgtgtccttgccgacctgactaatgatttgaagttagataacttgaggtggaggccaagaaagaggagcagaagatctggctcaagaaagcagtcggacacaagcagtggaagcagcagcggggacatggacctgttcagccccagccccagtggaagctttggtcaacataatttagtgcctgacgaggagacatgcaagagcagtggagagcagacttttatgggtgtgcctgtgcaggttcccaatcttgtgatgtccaggtgaaagccatcttagcaccggttgaagattaacatgttagcttctggagttacaccgaccttggcgagatgtggttttgtgcatccccaggttatttttgccagcacaacccagatccagttttctgcagtttttttggaggctcatcagctgtgatcagttagatgtgaaaatgtctcaccaagaaccagtatacagtttgtatgtagggagagaagaaaatgctcggtttggttttggttttagagctttcagttttttttcttttcttttcaatcctagtctttgttgtttgaaggacaggtcctagatttgacatagcctctttacatcggttattctttcccatagttgtcagtacttggtagtccttgttttttatttgtccatgcagtcttgtagcagtcgcgcgccttacgtaaaattatcctgaactgaactcagtgaaatgtcacaaaatagtgcttattgcctatttctgtgttcttttaaatgtcagttagggtactagttgggttacattttctcacagtggtgaactttattgggcctgcttctttc

SEQ ID NO: 39830 - DNA, 2424 bp, Zea Mays
caaatccctccccgtcctctctcttcgcccacccccacattattctctccccaaatctgaccttccctcgtgcgaggcctcacctcttccgacgcgacgcgatacgcaccacacgcggagaccaagccgagcccatctagggttagcgtcccactgcggcggccatggacgaggcagcgacagcggccctggcggcggcgagggggcggtggacgcagtgggaggaggtggtggtgtccaacgaccgcggcagccgcctcgtgcactactacctccgcggcaacagcgaggagaagcagctggcggtggttgggcgggagcggagcccgcgtcacatgtcgtacgccgtgcaggggcggttcctccgcgcgctcgcggctgccgccggggcggtcgccgtcgcgccgtcgccatcacggtcgcctctgccggctgctggggcggacggcggcgctccgaggaggtggcggtccagacgggaggtcgtggactggctgtcctccctcgtttctggtcataattatggttcctcctcaatggcaactaggtgcagtagggattcatatgatgacagtgttaacaactgcacacaagttactgcttcgaaggatgtttcttctagggaaccttcaaatgtcttcacatggttaggagctccatgttattgcccacaacgtttgaagcactacaaatctttctgccgtagaggaattactatctcggtgcatagttttgtattcatcatgagtgaagagatgaagagacttattgcttatgtggaagatctctacgaggatacaaactcatgcaacatggtcaaggtacaatggttcgacaaagttgatgagtcctgagtgtccagcactacgagaagttcaaggctgcaaggctactggagccaggaagtacttaggaccatgttcaatgcaacttcctctctgaaggttttatggtgagaacatccaacaattgtgtcctggttgccatgtggaagtactctctcaagatagtggtataaggggatgttggtttagatgtttgattctgaagaggcataaagataaaatcaaggtgcgctacctagaacttcaggatgctgatgagactggaaacttggaggagtgggttatgctaacacgagttgccaaacctgatcaactgggtgtacgtttccttggaaggccaatggttcgtccacagcgcgtggaacaaagcaaggcctcatgctttgatgttggagccattgttgatgcgtggtggcatggtggctggtgggagggaatcgtgctgtaccaggtgggcagtgggcgtctacaagtttattttccaggagaaaagcgaacagctgaatttggtgaagatgagctgaggtgttcccttgagtgggttggtaacaaatggaatcctttgaagggaagaaaagatgtcacaagcaagctgacctccactgcagattgtggaagtgaatatttgattgcgaaacaagatccactgaattttcatgtgcctaaaaattcagaacctcaactagagggacatcaatatgacaagaggggtattgagaaatcttcagtcagcacaatttcacgagatcagaaacgtgtccttgccgacctgactaatgatttgaagttagataacttgaggtggaggccaagaaagaggagcagaagatctggctcaagaaagcagtcggacacaagcagtggaagcagcagcggggacatggacctgttcagccccagccccagtggaagctttggtcaacataatttagtgcctgacgaggagacatgcaagagcagtggagagcagacttttatgggtgtgcctgtgcaggttcccaatcttgtgatgtccaggtgaaagccatcttagcaccggttgaagattaacatgttagcttctggagttacaccgaccttggcgagatgtggttttgtgcatccccaggttatttttgccagcacaacccagatccagttttctgcagtttttttggaggctcatcagctgtgatcagttagatgtgaaaatgtctcaccaagaaccagtatacagtttgtatgtagggagagaagaaaatgctcggtttggttttggttttagagctttcagttttttttcttttcttttcaatcctagtctttgttgtttgaaggacaggtcctagatttgacatagcctctttacatcggttattctttcccatagttgtcagtacttggtagtccttgttttttatttgtccatgcagtcttgtagcagtcgcgcgccttacgtaaaattatcctgaactgaactcagtgaaatgtcacaaaatagtgcttattgcctatttctgtgttcttttaaatgtcagttagggtactagttgggttacattttctcacagtggtgaactttattgggcctgcttctttc

SEQ ID NO: 39831 - DNA, 2583 bp, Zea Mays
tctcttcgcccacccccacattattctctccccaaatctgaccttccctcgtgcgaggcctcacctcttccgacgcgacgcgatacgcaccacacgcggagaccaagccgagcccatctagggttagcgtcccactgcggcggccatggacgaggcagcgacagcggccctggcggcggcgagggggcggtggacgcagtgggaggaggtggtggtgtccaacgaccgcggcagccgcctcgtgcactactacctccgcggcaacagcgaggagaagcagctggcggtggttgggcgggagcggagcccgcgtcacatgtcgtacgccgtgcaggggcggttcctccgcgcgctcgcggctgccgccggggcggtcgccgtcgcgccgtcgccatcacggtcgcctctgccggctgctggggcggacggcggcgctccgaggaggtggcggtccagacgggaggtcgtggactggctgtcctccctcgtttctggtcataattatggttcctcctcaatggcaactaggtgcagtagggattcatatgatgacagtgttaacaactgcacacaagttactgcttcgaaggatgtttcttctagggaaccttcaaatgtcttcacatggttaggagctccatgttattgcccacaacgtttgaagcactacaaatctttctgccgtagaggaattactatctcgttttgtattcatcatgagtgaagagatgaagagacttattgcttatgtggaagatctctacgaggatacaaactcatgcaacatggtcaaggtacaatggttcgacaaagttgatgaggttggtgttcccttgcccatggatttcgatgacagggagatcttcttctctctgggtcgtcaagatctcaatgtagaatgcattgatggattggctgcagtcctgagtgtccagcactacgagaagttcaagggtgataccagatacaacttgtggcaaccttatttttgctgtcggcagattgataatggtgacatcaaaccttttgatgtcacacagctgcaaggctactggagccaggaagtacttaggaccatgttcaatgcaacttcctctctgaaggttttatggtgagaacatccaacaattgtgtcctggttgccatgtggaagtactctctcaagatagtggtataaggggatgttggtttagatgtttgattctgaagaggcataaagataaaatcaaggtgcgctacctagaacttcaggatgctgatgagactggaaacttggaggagtgggttatgctaacacgagttgccaaacctgatcaactgggtgtacgtttccttggaaggccaatggttcgtccacagcgcgtggaacaaagcaaggcctcatgctttgatgttggagccattgttgatgcgtggtggcatggtggctggtgggagggaatcgtgctgtaccaggtgggcagtgggcgtctacaagtttattttccaggagaaaagcgaacagctgaatttggtgaagatgagctgaggtgttcccttgagtgggttggtaacaaatggaatcctttgaagggaagaaaagatgtcacaagcaagctgacctccactgcagattgtggaagtgaatatttgattgcgaaacaagatccactgaattttcatgtgcctaaaaattcagaacctcaactagagggacatcaatatgacaagaggggtattgagaaatcttcagtcagcacaatttcacgagatcagaaacgtgtccttgccgacctgactaatgatttgaagttagataacttgaggtggaggccaagaaagaggagcagaagatctggctcaagaaagcagtcggacacaagcagtggaagcagcagcggggacatggacctgttcagccccagccccagtggaagctttggtcaacataatttagtgcctgacgaggagacatgcaagagcagtggagagcagacttttatgggtgtgcctgtgcaggttcccaatcttgtgatgtccaggtgaaagccatcttagcaccggttgaagattaacatgttagcttctggagttacaccgaccttggcgagatgtggttttgtgcatccccaggttatttttgccagcacaacccagatccagttttctgcagtttttttggaggctcatcagctgtgatcagttagatgtgaaaatgtctcaccaagaaccagtatacagtttgtatgtagggagagaagaaaatgctcggtttggttttggttttagagctttcagttttttttcttttcttttcaatcctagtctttgttgtttgaaggacaggtcctagatttgacatagcctctttacatcggttattctttcccatagttgtcagtacttggtagtccttgttttttatttgtccatgcagtcttgtagcagtcgcgcgccttacgtaaaattatcctgaactgaactcagtgaaatgtcacaaaatagtgcttattgcctatttctgtgttcttttaaatgtcagttagggtactagttgggttacattttctcacagtggtgaactttattgggcctgcttctttc

SEQ ID NO: 39832 - DNA, 2616 bp, Zea Mays
tctcttcgcccacccccacattattctctccccaaatctgaccttccctcgtgcgaggcctcacctcttccgacgcgacgcgatacgcaccacacgcggagaccaagccgagcccatctagggttagcgtcccactgcggcggccatggacgaggcagcgacagcggccctggcggcggcgagggggcggtggacgcagtgggaggaggtggtggtgtccaacgaccgcggcagccgcctcgtgcactactacctccgcggcaacagcgaggagaagcagctggcggtggttgggcgggagcggagcccgcgtcacatgtcgtacgccgtgcaggggcggttcctccgcgcgctcgcggctgccgccggggcggtcgccgtcgcgccgtcgccatcacggtcgcctctgccggctgctggggcggacggcggcgctccgaggaggtggcggtccagacgggaggtcgtggactggctgtcctccctcgtttctggaatatggagaatacaggtgtgccccagtggaagcagctgctggcttcctttgggccaattgcataaccttggcatttgggaatagagataagcgaagcagcagcatgaatgtatgctccatcaggtcataattatggttcctcctcaatggcaactaggtgcagtagggattcatatgatgacagtgttaacaactgcacacaagttactgcttcgaaggatgtttcttctagggaaccttcaaatgtcttcacatggttaggagctccatgttattgcccacaacgtttgaagcactacaaatctttctgccgtagaggaattactatctcggtgcatagttttgtattcatcatgagtgaagagatgaagagacttattgcttatgtggaagatctctacgaggatacaaactcatgcaacatggtcaaggtacaatggttcgacaaagttgatgagtcctgagtgtccagcactacgagaagttcaagggtgataccagatacaacttgtggcaaccttatttttgctgtcggcagattgataatggtgacatcaaaccttttgatgtcacacagctgcaaggctactggagccaggaagtacttaggaccatgttcaatgcaacttcctctctgaaggttttatggtgagaacatccaacaattgtgtcctggttgccatgtggaagtactctctcaagatagtggtataaggggatgttggtttagatgtttgattctgaagaggcataaagataaaatcaaggtgcgctacctagaacttcaggatgctgatgagactggaaacttggaggagtgggttatgctaacacgagttgccaaacctgatcaactgggtgtacgtttccttggaaggccaatggttcgtccacagcgcgtggaacaaagcaaggcctcatgctttgatgttggagccattgttgatgcgtggtggcatggtggctggtgggagggaatcgtgctgtaccaggtgggcagtgggcgtctacaagtttattttccaggagaaaagcgaacagctgaatttggtgaagatgagctgaggtgttcccttgagtgggttggtaacaaatggaatcctttgaagggaagaaaagatgtcacaagcaagctgacctccactgcagattgtggaagtgaatatttgattgcgaaacaagatccactgaattttcatgtgcctaaaaattcagaacctcaactagagggacatcaatatgacaagaggggtattgagaaatcttcagtcagcacaatttcacgagatcagaaacgtgtccttgccgacctgactaatgatttgaagttagataacttgaggtggaggccaagaaagaggagcagaagatctggctcaagaaagcagtcggacacaagcagtggaagcagcagcggggacatggacctgttcagccccagccccagtggaagctttggtcaacataatttagtgcctgacgaggagacatgcaagagcagtggagagcagacttttatgggtgtgcctgtgcaggttcccaatcttgtgatgtccaggtgaaagccatcttagcaccggttgaagattaacatgttagcttctggagttacaccgaccttggcgagatgtggttttgtgcatccccaggttatttttgccagcacaacccagatccagttttctgcagtttttttggaggctcatcagctgtgatcagttagatgtgaaaatgtctcaccaagaaccagtatacagtttgtatgtagggagagaagaaaatgctcggtttggttttggttttagagctttcagttttttttcttttcttttcaatcctagtctttgttgtttgaaggacaggtcctagatttgacatagcctctttacatcggttattctttcccatagttgtcagtacttggtagtccttgttttttatttgtccatgcagtcttgtagcagtcgcgcgccttacgtaaaattatcctgaactgaactcagtgaaatgtcacaaaatagtgcttattgcctatttctgtgttcttttaaatgtcagttagggtactagttgggttacattttctcacagtggtgaactttattgggcctgcttctttc

SEQ ID NO: 39833 - DNA, 446 bp, Zea Mays
aaacgaggaaacagattcctcgtcaagcgccgcatcctcctcggacttgtctcccccgagtgtcgtgtcgcacacctgcgcctcctcctcgtcggactcggctcccccctagagccgtgtcgcacgcctcaggtgaggaaacaacggagttttgttgtttctgttcaaaggtgataccaaaagaggagccaaatccgtgatcgtgtaggcgggaggatgtttgcctcccagtttgaaaacactgaacttttatgcgggagggtgttttgcctccttggtttgtaataatactttatgcactcttaataccctagtattgtaataataatactctctatatattttatgaatgtaaattaagttattgtaatctgcttccgcttatcctttcctctgatgtgatgtaatatttgcgtgacgggtgaagcattcttaggcgaaatgat

SEQ ID NO: 39834 - DNA, 7325 bp, Zea Mays
  misc_feature (1)..(1): n is a, c, g, or t
nccgagctcacacaagagacgagtaactccgtctctctaagacgggcatcacaagatcaaaggaaattcgactacgactacaaacaggaggaagaccgcgatgcgcatttgttgccaagcctcgagacaccccctcgagacagctccgatttttcatcaacgagacatccaaatcatgatcctcctcgccctcgacagtagccaaaccttcgaaggtggttctaagcgagtcagatttaagtgaaacaaacggtaacccacaagcaccaaccaatgtaaacttttcatatttctttcacaatagtacaaaatgatgtgactttacaaaaccaccaagaaaattattttttatagatgcaaaatatttataacttagaatgatatatctagtgccttgtttgcttgggccttttctcactattagcttttagacttttcaaaatccaaacgtctcttagtatagtgagcctctgattttttttgtttgtcggagttctttggattttaaaaggtccaaagtctctgggaagcccaaacaaacatggactaaatgtattttagaccaactattctcgactatgctaagaacagttacttaagatgtacaacacaaatagtacaggtgtaccaattcctatgctacatataacattttgaggccccttcggaatgcaggaatttcataggaattatataagaattttacaggatttcacagaaaaaacacagaaaacggggaaaattttgtatgtagatggtaacattatttttttatggctacatatgtaggaaaagaatacaaaagtgaacataacttacataaaaatggtacataaacatgtttaaagaaagaatgaaagtttagatcaagttatcttgcgagtaaacatattttgataagtaaacgaagatgagaatacagtaacaaactcataacttatttgtcttagaaaatctccagcatggcaaaaaaaaaaaagacacaagctagcaggactgtactcaggttcccaaaagttacatatatgggcggtttaacaaactcaaagtaactttaccagcttcctttgaagcgaaaggttttgttcttttcgttgtagttgtagtccctactctaaagtagagatcatatggttgtccagtcactctcatttatgttaattaattgaaagcttttccaatcttactagctctggcaaagggaggcagaaagcttgaggcagcaactgcataacttaaaagagcaccatcggcagttgttgggtcagcagctttctggcctgaacgtgggagatttgcagaatttagagaataagctggagacgagcctaagaaatattcgtctgaaaaaggaccaactttttttttatcagattcaagaattaaacaggaagggaagcctcatgcaccaggaaagcatagaactatacaacaaagttaaccttcttcatcaacataacactgaattacggagaaaggtgtatcgacaaggagtaaataatgagcaaacaagtactactgttagacacagtactcggaatacagagaatcttccgatcaatcctgagctaagtgtgcaaagggacaaatcagaaacaccaagtgtagggtgagatttttgtccaaacttcaggataactcagagtcagtaaaccagatgatttaataaagaacactgaaagtgccatatgactttaaatacagtgaggataattaaaccgagtgataagaaatggatatcgttggttgaatcgcaagacctaacagctaaactttaagctgctagatgcgattgtttatgtatgaagaagaatgttgattttaattttgcttttcatataagcttgccatgtatgctattgtaaattgtactctgaattataagtcctcttggttttctaggtacatagttttttctatacacctagatatactatgtctcttgagctaaaaccacttataatttagaatggagtaacttcaaaagatagttataagttaaatattggatgaccttttaccattagaacataacggaaaacaatgcactcatcagataattacaagacatcagaaggagctattgagacataaataacgataaaacaacgagctacatgattttttttcttgcaagaaatgctcttacaaaagtctataagacaagcagtacgtgaatttgtcaatggcaacaagtacatgagtatagcctccctgagctttcttaaaaggtctgatcatgtccagcccccagcattgcaaatgaccatgttacaggaatggtctgtagctgctgtgcgggtaaatgttgttgctttgataaaaattggcaagcttcacatctctggactaactcggcagcatcactcttcgttgttggccaatagaaaccagatctgaaagcctttccgaccagagttctggacgctgcatgtactccgcactgtccggcatggatttcgtctaacagttgcttcccaatagccgagtgaatgcacttcatgagaactcctgccgcacctcttctgtacagtatgccccctatgagggtgtagtgtgctgactgccttgcgatgcgttccgttgccgccttgtcattcggttcttcttcattttttatgtacctgatgatagactctctccagtcattggggtccatataccatcaacttcttgcccatggaatcagtcgagcaatcctagtctttgtttatctggcttatgaccactagcgaatctccatataccatcagcttcttgatgctgagtgatacggcgatgtttaatccgtggatcagtgcttcatattctgctgtattatttgatgccggaaacaatagctggagtgcatacttgagttgttcacttccaggagcaataaagagaatctctgcatctgctccttacaacttctcgatacttcggtagtctccgggttgtttgggacctggtgttcagttcactcagatacgaagtcaaccagtgcatgagtcttgattgccgtgcggggccggaattctatgtcgtgagctcccagctcgcacgcccacttggctatccttccgatagcttctttgttgtgaagaatgtcccctattggaaatcttgtgactactatgactttgtggtcatcaaagtagtgacggagcttgcgagcggttagaagtaccgcgtatagtagtttctggacttggggatacttcatttttgagggcccgagaacttcgctgatgtagaccggatgttgcaccgggtatgtatgtccttcctccacccgctcgactactaacgcggtgctcaccacgtgagttgtgcaggagatatataacaacagatcttctgctagctgattcggcgtggctcggcgtggtggcttgagtactggtggtgtagtcagaaactttttcagtgcctctagagcttcctgtgcctctgtggtccactgaaacttgtccacctttttgagcaatttgtagaatggcatgcctttctcccctagccttgatatgaacctgctcagggctgtcatgcatccagtaagcctctgtacctttttctgtgatcgtggcgcttccattctcatgatggcctcgattttttctagttagcttcaatttctcggtggctgacaatgaatccgagtaacttccctgccggtactccgataacacacttttctagattgagcttccaacagtatcgcctcaagctgttgaagaccagccgcaaatcttcaatgaagttttctgagttttctgttttgatcaccacatcatcaacataggcttccactcgcttgcccagtgatcggctaagcatgtttgaatggctctctggtaggtcactcctgcgttcttaagaccgaacgacatggaggtatagcagaaagctccaaatggggtgatgaatgccgttttttcctcatcttcttttgccaagctgatctgataatatccagaataaaagtctaggaaggacaacatagaacagcaagcggtcgaatcaaccacctgatctattctagggagcccgaagggatccttcggacaatgcttgttgagatcagtatagtcgacgcagaagcgtcaatccactttattctttttagtacaagaacaaaatttgctagccactcaggatgcagcacttctctaatgaaccctgcagccactaagcgagctaactcggcgcgaatagcttctctcttgtcagacgtgaaacgacgtagcttctgtcgaatcggccttgcttcagtataaaccttcaatttgtgctcggccagttctctcgggactcccgacatatctgcgggttgccatgcgaatacgtctcggttgtcttgcaggaaccggacgagcgcgctttcctatttgtcgtcaaggctagaactgatgatggcagtcttgcgctcatcggagaatcctaggttgatttttttagtctcctcaagcggccatatggaggtcacggcttgagcttcatttgcgggcattgcgaggtcttcctcaggctttgtgtctgcctgcgtggagcaagtcgtcgatggtcctgcagtgagggttgcctggatggctccccgaaagcattctgcggcgccttgtaagtcagcgcgcatggtgatgattccttgtggtcccggcatctttaatatcatgtacgagtagtgcggaatggccatgaatttcgccagtcccggcctgccgatgatggcgttgtatccgcagtcgaaacgtgccaccttgaaccttaggaactcagttctgtagttatctggagtcccaaaggtgacgtgcatgtaaatgtgtccgagtggatactctccctcggtcgacacgatgccgaagaagggggtatctgacttggtgaggtctttgagtgcaacccccaaggccaggagtgttcgagggaaggtaacgttaatgctacttcccccgtccactagtactttatttaccctgctctctcggatcaccggatcaacgagcagcaggtacttaccggggtggtcaaagttgagccactaatctacccggctgaaggttatcgcgtgctctgaccaccgataaggagctagggcactagtggttgccgccaagacctgccggtcattgagcttctgttgccttttgttctcttgcgatccgtggcctccgaaaatgacgttggcctccctgtcaacgcgtgggaatgctccaccccctcccccttctggttgctgaggctgcttgggctcaccaggctctcctcgtggtgggggaggtggtagaggttggaacggtcggccattcccgacggagtgcttgaagtccctacagttccgtaaggtgtggcgcatatccttgtggtacgggcactaggcgtcgaggatgtcgtccagtgtccgctcgcctccacggggtggtacgggcacgagcgacgggtggtccggcggcgtgaacctactcacgaggcctcttctcccaacgcctgtcgggttgctggttcgcgtcgcgccgcggtgccggtggtgcaggtttcgttcttccgataaggtcctaggcccgctcgtcagcggtgatgtagaggtccgcatctcaaaacagttgttcggaggtggtcggcgctttctgcagtatggctcggacgaaaggccgagtcattagatccccggtagatgtcctcaatcactgatgcctcagtgacctcagggatacgatttctcatggtccgaaaacctcttgaggtacgaccgaagtgtttcatcgctccggcacctgatggatttgaggtcccatggctacgccgacttgtcggagggactgaaagttgacgatgaaacaccgactgaagtcactccaatcgtcgatgcagtgtcgtggcagatgtcgtagccaatgcaatgcatcttgcccgaggacgatgggcaaatatgcggtcatcacatctttggttgccccagcggcccaggtagcggtcatatagacggccaaccagcctctcgggtcctgcttaggctcgtacttgtcgacgttggagaccttgaagtttgggggccactggatggccctaagacgcggagtaagcgcggatactccacatgtgtcttcctatcaactttcatggtgtcgatcccggtgaggggagtcggtgatgtgtcgtctcgaccgtccccggatcgggccactggttaaggctgcagccgactcaactcgggtgggcgtggcgtgacttcgagccgggacgtcatggtcccgatcatactcctcccggctccttatctcgttttcgtgtcgtcggtcgcgcgaagcgttgatggagctccgcgcgtctcggcgacttttgatggcgtgtcgcaggtcgctcgggggatgagcgatgggtagaagatgattagctgcccgagtaagcagccgtcgatagccttcagcatccggagtccgcgggaggccatcaactatctgagccagcactcctccgacttcgctcagcgtgttcattgcgcgagcgaagtcaaggttccttgtaatccgcatccactcctttgtggacgaagtgggcagcggagttcttcgggcaagtaattcccgattctcggcttgcaaaaagtagtcttcgtctggggcgtaggaggttgcgttgtccgctgtcttgttctggctttcctagggatttccaaggaaagtttcttctccggtggatctgctatgcggtgcagaattcccttctcatctgccacggataagatagtcccgaagcagaatacagattcagggcgaagagcaatcttgcactgggagataacggccattgagctagcttggatcaacgacacaccccctacctgccgcgccagctggcggtgtttggagcccgaccgcacacccgaggttacccctcgcggtgcttttgggtaggacggtgttgttgactgtaattcaatggttcgtgcgagatgcacgagagacgacaggcgactttctacaggtttgggccgcttcgagaggcgtaatattctacttcctggtgaggatctttatgtggtgggttacaagaggaatctccggaacgaaaagaaactagtgagatgggatggtgcttaagtcccacgagtcgcttgggcctgagtctgctcctttctcatgccggcccattccgccagcagttttctcctggcccatgaagagatggtctagcgagataacaggcctaaagcctctcgcgaggccttcttaccttctagtggacccgggggatatgaaagggaattaggcttacacctatttcctaattgattttggtggttgaattgcccaacacaaataattggactaactagtttgctctag

SEQ ID NO: 39835 - DNA, 7770 bp, Zea Mays
  misc_feature (1)..(1): n is a, c, g, or t
nccgagctcacacaagagacgagtaactccgtctctctaagacgggcatcacaagatcaaaggaaattcgactacgactacaaacaggaggaagaccgcgatgcgcatttgttgccaagcctcgagacaccccctcgagacagctccgatttttcatcaacgagacatccaaatcatgatcctcctcgccctcgacagtagccaaaccttcgaaggtggttctaagcgagtcagatttaagtgaaacaaacggtaacccacaagcaccaaccaatgtaaacttttcatatttctttcacaatagtacaaaatgatgtgactttacaaaaccaccaagaaaattattttttatagatgcaaaatatttataacttagaatgatatatctagtgccttgtttgcttgggccttttctcactattagcttttagacttttcaaaatccaaacgtctcttagtatagtgagcctctgattttttttgtttgtcggagttctttggattttaaaaggtccaaagtctctgggaagcccaaacaaacatggactaaatgtattttagaccaactattctcgactatgctaagaacagttacttaagatgtacaacacaaatagtacaggtgtaccaattcctatgctacatataacattttgaggccccttcggaatgcaggaatttcataggaattatataagaattttacaggatttcacagaaaaaacacagaaaacggggaaaattttgtatgtagatggtaacattatttttttatggctacatatgtaggaaaagaatacaaaagtgaacataacttacataaaaatggtacataaacatgtttaaagaaagaatgaaagtttagatcaagttatcttgcgagtaaacatattttgataagtaaacgaagatgagaatacagtaacaaactcataacttatttgtcttagaaaatctccagcatggcaaaaaaaaaaaagacacaagctagcaggactgtactcaggttcccaaaagttacatatatgggcggtttaacaaactcaaagtaactttaccagcttcctttgaagcgaaaggttttgttcttttcgttgtagttgtagtccctactctaaagtagagatcatatggttgtccagtcactctcatttatgttaattaattgaaagcttttccaatcttactagctctggcaaagggaggcagaaagcttgaggcagcaactgcataacttaaaagagcaccatcgagatagaatcaatgggaacaaggtcataaatatataaatataaaaaagaattcagaacaaattctcagcacatgatgatgaaatgcaagatgcatttggttatatgttctggtgtgtatatccattaatgtttacgcacaggaagtttgaagtctccaaatcaaagtaaaaccttatacagtatgggtccaaaactttcagaaacagcaacaagcaacgatctgcttcattattattctatttgattaagagtgtgtgcttactccacacacaaaggaagttatgttattcgttgattaattcaactgtacactagatggctacaaaaaatggtactttattttaatgttctctcttacatgtgaaattggtttgtacattgtacaataacatttgcattctcagaaatgcataagctaatgttctatgcaattttccactgcaggcagttgttgggtcagcagctttctggcctgaacgtgggagatttgcagaatttagagaataagctggagacgagcctaagaaatattcgtctgaaaaaggaccaactttttttttatcagattcaagaattaaacaggaagggaagcctcatgcaccaggaaagcatagaactatacaacaaagttaaccttcttcatcaacataacactgaattacggagaaaggtgtatcgacaaggagtaaataatgagcaaacaagtactactgttagacacagtactcggaatacagagaatcttccgatcaatcctgagctaagtgtgcaaagggacaaatcagaaacaccaagtgtagggtgagatttttgtccaaacttcaggataactcagagtcagtaaaccagatgatttaataaagaacactgaaagtgccatatgactttaaatacagtgaggataattaaaccgagtgataagaaatggatatcgttggttgaatcgcaagacctaacagctaaactttaagctgctagatgcgattgtttatgtatgaagaagaatgttgattttaattttgcttttcatataagcttgccatgtatgctattgtaaattgtactctgaattataagtcctcttggttttctaggtacatagttttttctatacacctagatatactatgtctcttgagctaaaaccacttataatttagaatggagtaacttcaaaagatagttataagttaaatattggatgaccttttaccattagaacataacggaaaacaatgcactcatcagataattacaagacatcagaaggagctattgagacataaataacgataaaacaacgagctacatgattttttttcttgcaagaaatgctcttacaaaagtctataagacaagcagtacgtgaatttgtcaatggcaacaagtacatgagtatagcctccctgagctttcttaaaaggtctgatcatgtccagcccccagcattgcaaatgaccatgttacaggaatggtctgtagctgctgtgcgggtaaatgttgttgctttgataaaaattggcaagcttcacatctctggactaactcggcagcatcactcttcgttgttggccaatagaaaccagatctgaaagcctttccgaccagagttctggacgctgcatgtactccgcactgtccggcatggatttcgtctaacagttgcttcccaatagccgagtgaatgcacttcatgagaactcctgccgcacctcttctgtacagtatgccccctatgagggtgtagtgtgctgactgccttgcgatgcgttccgttgccgccttgtcattcggttcttcttcattttttatgtacctgatgatagactctctccagtcattggggtccatataccatcaacttcttgcccatggaatcagtcgagcaatcctagtctttgtttatctggcttatgaccactagcgaatctccatataccatcagcttcttgatgctgagtgatacggcgatgtttaatccgtggatcagtgcttcatattctgctgtattatttgatgccggaaacaatagctggagtgcatacttgagttgttcacttccaggagcaataaagagaatctctgcatctgctccttacaacttctcgatacttcggtagtctccgggttgtttgggacctggtgttcagttcactcagatacgaagtcaaccagtgcatgagtcttgattgccgtgcggggccggaattctatgtcgtgagctcccagctcgcacgcccacttggctatccttccgatagcttctttgttgtgaagaatgtcccctattggaaatcttgtgactactatgactttgtggtcatcaaagtagtgacggagcttgcgagcggttagaagtaccgcgtatagtagtttctggacttggggatacttcatttttgagggcccgagaacttcgctgatgtagaccggatgttgcaccgggtatgtatgtccttcctccacccgctcgactactaacgcggtgctcaccacgtgagttgtgcaggagatatataacaacagatcttctgctagctgattcggcgtggctcggcgtggtggcttgagtactggtggtgtagtcagaaactttttcagtgcctctagagcttcctgtgcctctgtggtccactgaaacttgtccacctttttgagcaatttgtagaatggcatgcctttctcccctagccttgatatgaacctgctcagggctgtcatgcatccagtaagcctctgtacctttttctgtgatcgtggcgcttccattctcatgatggcctcgattttttctagttagcttcaatttctcggtggctgacaatgaatccgagtaacttccctgccggtactccgataacacacttttctagattgagcttccaacagtatcgcctcaagctgttgaagaccagccgcaaatcttcaatgaagttttctgagttttctgttttgatcaccacatcatcaacataggcttccactcgcttgcccagtgatcggctaagcatgtttgaatggctctctggtaggtcactcctgcgttcttaagaccgaacgacatggaggtatagcagaaagctccaaatggggtgatgaatgccgttttttcctcatcttcttttgccaagctgatctgataatatccagaataaaagtctaggaaggacaacatagaacagcaagcggtcgaatcaaccacctgatctattctagggagcccgaagggatccttcggacaatgcttgttgagatcagtatagtcgacgcagaagcgtcaatccactttattctttttagtacaagaacaaaatttgctagccactcaggatgcagcacttctctaatgaaccctgcagccactaagcgagctaactcggcgcgaatagcttctctcttgtcagacgtgaaacgacgtagcttctgtcgaatcggccttgcttcagtataaaccttcaatttgtgctcggccagttctctcgggactcccgacatatctgcgggttgccatgcgaatacgtctcggttgtcttgcaggaaccggacgagcgcgctttcctatttgtcgtcaaggctagaactgatgatggcagtcttgcgctcatcggagaatcctaggttgatttttttagtctcctcaagcggccatatggaggtcacggcttgagcttcatttgcgggcattgcgaggtcttcctcaggctttgtgtctgcctgcgtggagcaagtcgtcgatggtcctgcagtgagggttgcctggatggctccccgaaagcattctgcggcgccttgtaagtcagcgcgcatggtgatgattccttgtggtcccggcatctttaatatcatgtacgagtagtgcggaatggccatgaatttcgccagtcccggcctgccgatgatggcgttgtatccgcagtcgaaacgtgccaccttgaaccttaggaactcagttctgtagttatctggagtcccaaaggtgacgtgcatgtaaatgtgtccgagtggatactctccctcggtcgacacgatgccgaagaagggggtatctgacttggtgaggtctttgagtgcaacccccaaggccaggagtgttcgagggaaggtaacgttaatgctacttcccccgtccactagtactttatttaccctgctctctcggatcaccggatcaacgagcagcaggtacttaccggggtggtcaaagttgagccactaatctacccggctgaaggttatcgcgtgctctgaccaccgataaggagctagggcactagtggttgccgccaagacctgccggtcattgagcttctgttgccttttgttctcttgcgatccgtggcctccgaaaatgacgttggcctccctgtcaacgcgtgggaatgctccaccccctcccccttctggttgctgaggctgcttgggctcaccaggctctcctcgtggtgggggaggtggtagaggttggaacggtcggccattcccgacggagtgcttgaagtccctacagttccgtaaggtgtggcgcatatccttgtggtacgggcactaggcgtcgaggatgtcgtccagtgtccgctcgcctccacggggtggtacgggcacgagcgacgggtggtccggcggcgtgaacctactcacgaggcctcttctcccaacgcctgtcgggttgctggttcgcgtcgcgccgcggtgccggtggtgcaggtttcgttcttccgataaggtcctaggcccgctcgtcagcggtgatgtagaggtccgcatctcaaaacagttgttcggaggtggtcggcgctttctgcagtatggctcggacgaaaggccgagtcattagatccccggtagatgtcctcaatcactgatgcctcagtgacctcagggatacgatttctcatggtccgaaaacctcttgaggtacgaccgaagtgtttcatcgctccggcacctgatggatttgaggtcccatggctacgccgacttgtcggagggactgaaagttgacgatgaaacaccgactgaagtcactccaatcgtcgatgcagtgtcgtggcagatgtcgtagccaatgcaatgcatcttgcccgaggacgatgggcaaatatgcggtcatcacatctttggttgccccagcggcccaggtagcggtcatatagacggccaaccagcctctcgggtcctgcttaggctcgtacttgtcgacgttggagaccttgaagtttgggggccactggatggccctaagacgcggagtaagcgcggatactccacatgtgtcttcctatcaactttcatggtgtcgatcccggtgaggggagtcggtgatgtgtcgtctcgaccgtccccggatcgggccactggttaaggctgcagccgactcaactcgggtgggcgtggcgtgacttcgagccgggacgtcatggtcccgatcatactcctcccggctccttatctcgttttcgtgtcgtcggtcgcgcgaagcgttgatggagctccgcgcgtctcggcgacttttgatggcgtgtcgcaggtcgctcgggggatgagcgatgggtagaagatgattagctgcccgagtaagcagccgtcgatagccttcagcatccggagtccgcgggaggccatcaactatctgagccagcactcctccgacttcgctcagcgtgttcattgcgcgagcgaagtcaaggttccttgtaatccgcatccactcctttgtggacgaagtgggcagcggagttcttcgggcaagtaattcccgattctcggcttgcaaaaagtagtcttcgtctggggcgtaggaggttgcgttgtccgctgtcttgttctggctttcctagggatttccaaggaaagtttcttctccggtggatctgctatgcggtgcagaattcccttctcatctgccacggataagatagtcccgaagcagaatacagattcagggcgaagagcaatcttgcactgggagataacggccattgagctagcttggatcaacgacacaccccctacctgccgcgccagctggcggtgtttggagcccgaccgcacacccgaggttacccctcgcggtgcttttgggtaggacggtgttgttgactgtaattcaatggttcgtgcgagatgcacgagagacgacaggcgactttctacaggtttgggccgcttcgagaggcgtaatattctacttcctggtgaggatctttatgtggtgggttacaagaggaatctccggaacgaaaagaaactagtgagatgggatggtgcttaagtcccacgagtcgcttgggcctgagtctgctcctttctcatgccggcccattccgccagcagttttctcctggcccatgaagagatggtctagcgagataacaggcctaaagcctctcgcgaggccttcttaccttctagtggacccgggggatatgaaagggaattaggcttacacctatttcctaattgattttggtggttgaattgcccaacacaaataattggactaactagtttgctctag

SEQ ID NO: 39836 - DNA, 7293 bp, Zea Mays
gggcatcacaagatcaaaggaaattcgactacgactacaaacaggaggaagaccgcgatgcgcatttgttgccaagcctcgagacaccccctcgagacagctccgatttttcatcaacgagacatccaaatcatgatcctcctcgccctcgacagtagccaaaccttcgaaggtggttctaagcgagtcagatttaagtgaaacaaacggtaacccacaagcaccaaccaatgtaaacttttcatatttctttcacaatagtacaaaatgatgtgactttacaaaaccaccaagaaaattattttttatagatgcaaaatatttataacttagaatgatatatctagtgccttgtttgcttgggccttttctcactattagcttttagacttttcaaaatccaaacgtctcttagtatagtgagcctctgattttttttgtttgtcggagttctttggattttaaaaggtccaaagtctctgggaagcccaaacaaacatggactaaatgtattttagaccaactattctcgactatgctaagaacagttacttaagatgtacaacacaaatagtacaggtgtaccaattcctatgctacatataacattttgaggccccttcggaatgcaggaatttcataggaattatataagaattttacaggatttcacagaaaaaacacagaaaacggggaaaattttgtatgtagatggtaacattatttttttatggctacatatgtaggaaaagaatacaaaagtgaacataacttacataaaaatggtacataaacatgtttaaagaaagaatgaaagtttagatcaagttatcttgcgagtaaacatattttgataagtaaacgaagatgagaatacagtaacaaactcataacttatttgtcttagaaaatctccagcatggcaaaaaaaaaaaagacacaagctagcaggactgtactcaggttcccaaaagttacatatatgggcggtttaacaaactcaaagtaactttaccagcttcctttgaagcgaaaggttttgttcttttcgttgtagttgtagtccctactctaaagtagagatcatatggttgtccagtcactctcatttatgttaattaattgaaagcttttccaatcttactagctctggcaaagggaggcagaaagcttgaggcagcaactgcataacttaaaagagcaccatcggcagttgttgggtcagcagctttctggcctgaacgtgggagatttgcagaatttagagaataagctggagacgagcctaagaaatattcgtctgaaaaagccaatttgcaggaccaactttttttttatcagattcaagaattaaacaggaagggaagcctcatgcaccaggaaagcatagaactatacaacaaagttaaccttcttcatcaacataacactgaattacggagaaaggtgtatcgacaaggagtaaataatgagcaaacaagtactactgttagacacagtactcggaatacagagaatcttccgatcaatcctgagctaagtgtgcaaagggacaaatcagaaacaccaagtgtagggtgagatttttgtccaaacttcaggataactcagagtcagtaaaccagatgatttaataaagaacactgaaagtgccatatgactttaaatacagtgaggataattaaaccgagtgataagaaatggatatcgttggttgaatcgcaagacctaacagctaaactttaagctgctagatgcgattgtttatgtatgaagaagaatgttgattttaattttgcttttcatataagcttgccatgtatgctattgtaaattgtactctgaattataagtcctcttggttttctaggtacatagttttttctatacacctagatatactatgtctcttgagctaaaaccacttataatttagaatggagtaacttcaaaagatagttataagttaaatattggatgaccttttaccattagaacataacggaaaacaatgcactcatcagataattacaagacatcagaaggagctattgagacataaataacgataaaacaacgagctacatgattttttttcttgcaagaaatgctcttacaaaagtctataagacaagcagtacgtgaatttgtcaatggcaacaagtacatgagtatagcctccctgagctttcttaaaaggtctgatcatgtccagcccccagcattgcaaatgaccatgttacaggaatggtctgtagctgctgtgcgggtaaatgttgttgctttgataaaaattggcaagcttcacatctctggactaactcggcagcatcactcttcgttgttggccaatagaaaccagatctgaaagcctttccgaccagagttctggacgctgcatgtactccgcactgtccggcatggatttcgtctaacagttgcttcccaatagccgagtgaatgcacttcatgagaactcctgccgcacctcttctgtacagtatgccccctatgagggtgtagtgtgctgactgccttgcgatgcgttccgttgccgccttgtcattcggttcttcttcattttttatgtacctgatgatagactctctccagtcattggggtccatataccatcaacttcttgcccatggaatcagtcgagcaatcctagtctttgtttatctggcttatgaccactagcgaatctccatataccatcagcttcttgatgctgagtgatacggcgatgtttaatccgtggatcagtgcttcatattctgctgtattatttgatgccggaaacaatagctggagtgcatacttgagttgttcacttccaggagcaataaagagaatctctgcatctgctccttacaacttctcgatacttcggtagtctccgggttgtttgggacctggtgttcagttcactcagatacgaagtcaaccagtgcatgagtcttgattgccgtgcggggccggaattctatgtcgtgagctcccagctcgcacgcccacttggctatccttccgatagcttctttgttgtgaagaatgtcccctattggaaatcttgtgactactatgactttgtggtcatcaaagtagtgacggagcttgcgagcggttagaagtaccgcgtatagtagtttctggacttggggatacttcatttttgagggcccgagaacttcgctgatgtagaccggatgttgcaccgggtatgtatgtccttcctccacccgctcgactactaacgcggtgctcaccacgtgagttgtgcaggagatatataacaacagatcttctgctagctgattcggcgtggctcggcgtggtggcttgagtactggtggtgtagtcagaaactttttcagtgcctctagagcttcctgtgcctctgtggtccactgaaacttgtccacctttttgagcaatttgtagaatggcatgcctttctcccctagccttgatatgaacctgctcagggctgtcatgcatccagtaagcctctgtacctttttctgtgatcgtggcgcttccattctcatgatggcctcgattttttctagttagcttcaatttctcggtggctgacaatgaatccgagtaacttccctgccggtactccgataacacacttttctagattgagcttccaacagtatcgcctcaagctgttgaagaccagccgcaaatcttcaatgaagttttctgagttttctgttttgatcaccacatcatcaacataggcttccactcgcttgcccagtgatcggctaagcatgtttgaatggctctctggtaggtcactcctgcgttcttaagaccgaacgacatggaggtatagcagaaagctccaaatggggtgatgaatgccgttttttcctcatcttcttttgccaagctgatctgataatatccagaataaaagtctaggaaggacaacatagaacagcaagcggtcgaatcaaccacctgatctattctagggagcccgaagggatccttcggacaatgcttgttgagatcagtatagtcgacgcagaagcgtcaatccactttattctttttagtacaagaacaaaatttgctagccactcaggatgcagcacttctctaatgaaccctgcagccactaagcgagctaactcggcgcgaatagcttctctcttgtcagacgtgaaacgacgtagcttctgtcgaatcggccttgcttcagtataaaccttcaatttgtgctcggccagttctctcgggactcccgacatatctgcgggttgccatgcgaatacgtctcggttgtcttgcaggaaccggacgagcgcgctttcctatttgtcgtcaaggctagaactgatgatggcagtcttgcgctcatcggagaatcctaggttgatttttttagtctcctcaagcggccatatggaggtcacggcttgagcttcatttgcgggcattgcgaggtcttcctcaggctttgtgtctgcctgcgtggagcaagtcgtcgatggtcctgcagtgagggttgcctggatggctccccgaaagcattctgcggcgccttgtaagtcagcgcgcatggtgatgattccttgtggtcccggcatctttaatatcatgtacgagtagtgcggaatggccatgaatttcgccagtcccggcctgccgatgatggcgttgtatccgcagtcgaaacgtgccaccttgaaccttaggaactcagttctgtagttatctggagtcccaaaggtgacgtgcatgtaaatgtgtccgagtggatactctccctcggtcgacacgatgccgaagaagggggtatctgacttggtgaggtctttgagtgcaacccccaaggccaggagtgttcgagggaaggtaacgttaatgctacttcccccgtccactagtactttatttaccctgctctctcggatcaccggatcaacgagcagcaggtacttaccggggtggtcaaagttgagccactaatctacccggctgaaggttatcgcgtgctctgaccaccgataaggagctagggcactagtggttgccgccaagacctgccggtcattgagcttctgttgccttttgttctcttgcgatccgtggcctccgaaaatgacgttggcctccctgtcaacgcgtgggaatgctccaccccctcccccttctggttgctgaggctgcttgggctcaccaggctctcctcgtggtgggggaggtggtagaggttggaacggtcggccattcccgacggagtgcttgaagtccctacagttccgtaaggtgtggcgcatatccttgtggtacgggcactaggcgtcgaggatgtcgtccagtgtccgctcgcctccacggggtggtacgggcacgagcgacgggtggtccggcggcgtgaacctactcacgaggcctcttctcccaacgcctgtcgggttgctggttcgcgtcgcgccgcggtgccggtggtgcaggtttcgttcttccgataaggtcctaggcccgctcgtcagcggtgatgtagaggtccgcatctcaaaacagttgttcggaggtggtcggcgctttctgcagtatggctcggacgaaaggccgagtcattagatccccggtagatgtcctcaatcactgatgcctcagtgacctcagggatacgatttctcatggtccgaaaacctcttgaggtacgaccgaagtgtttcatcgctccggcacctgatggatttgaggtcccatggctacgccgacttgtcggagggactgaaagttgacgatgaaacaccgactgaagtcactccaatcgtcgatgcagtgtcgtggcagatgtcgtagccaatgcaatgcatcttgcccgaggacgatgggcaaatatgcggtcatcacatctttggttgccccagcggcccaggtagcggtcatatagacggccaaccagcctctcgggtcctgcttaggctcgtacttgtcgacgttggagaccttgaagtttgggggccactggatggccctaagacgcggagtaagcgcggatactccacatgtgtcttcctatcaactttcatggtgtcgatcccggtgaggggagtcggtgatgtgtcgtctcgaccgtccccggatcgggccactggttaaggctgcagccgactcaactcgggtgggcgtggcgtgacttcgagccgggacgtcatggtcccgatcatactcctcccggctccttatctcgttttcgtgtcgtcggtcgcgcgaagcgttgatggagctccgcgcgtctcggcgacttttgatggcgtgtcgcaggtcgctcgggggatgagcgatgggtagaagatgattagctgcccgagtaagcagccgtcgatagccttcagcatccggagtccgcgggaggccatcaactatctgagccagcactcctccgacttcgctcagcgtgttcattgcgcgagcgaagtcaaggttccttgtaatccgcatccactcctttgtggacgaagtgggcagcggagttcttcgggcaagtaattcccgattctcggcttgcaaaaagtagtcttcgtctggggcgtaggaggttgcgttgtccgctgtcttgttctggctttcctagggatttccaaggaaagtttcttctccggtggatctgctatgcggtgcagaattcccttctcatctgccacggataagatagtcccgaagcagaatacagattcagggcgaagagcaatcttgcactgggagataacggccattgagctagcttggatcaacgacacaccccctacctgccgcgccagctggcggtgtttggagcccgaccgcacacccgaggttacccctcgcggtgcttttgggtaggacggtgttgttgactgtaattcaatggttcgtgcgagatgcacgagagacgacaggcgactttctacaggtttgggccgcttcgagaggcgtaatattctacttcctggtgaggatctttatgtggtgggttacaagaggaatctccggaacgaaaagaaactagtgagatgggatggtgcttaagtcccacgagtcgcttgggcctgagtctgctcctttctcatgccggcccattccgccagcagttttctcctggcccatgaagagatggtctagcgagataacaggcctaaagcctctcgcgaggccttcttaccttctagtggacccgggggatatgaaagggaattaggcttacacctatttcctaattgattttggtggttgaattgcccaacacaaataattggactaactagtttgctctag

SEQ ID NO: 39837 - DNA, 1852 bp, Zea Mays
cccgcgtctgctttgaaaattggaattttggcccggtggcccacttgacttgccaactattttggcccaccagctcagcccatattcccttttcccacgtgaacacaggcagctgcaactgcaacgcgtgaagccgtgaacacgggcacaccagtacgacagtaccacgccacatgaactcgtgaagaatagagccgccactgaggaaccctagcgacggcggcgcgctaccggtgacatcgtccaactcggcccctccatccccgacgcggcggcgccagcgtgcaatcccgttcatctctacaggtgttaggatacttggattggagtcgagtgctaggctgctagtgctagtgttcaaagcctgaagccatgtccatgggcgtgtggttgttgcctgtttgtccaccggcagttcaaagcctgaagccatgtcctggcggccgcgaagaacctgcgcagtgcgcacggaggccgcctcgggagcgcagagcgattaatcgggctgatcgtcgactaatcgtaattagtcggctgatcgcccttctggcgatcagaggctaatcgccgatctgaaaactttgctctgctggtgctgcaacggattcggaacctgctgctgcgatggatccgggacctggttgctgtaacgcattcagctcctgctgctcttaatggtctgttcacaaattgcagctcagcatgcagccaattctaaccttgataaactatttattacaaaagtttggctactgacgagggcgaggaggatcatgatttggatgtctcgttggtgaaaaatcggagctgtctcgaggcttggcaacaaatgcgcatcgcggtcttcctcctatttgtagtcgtcgtcgagtttcctttgatcttgtgatgcccgtcttagagagttggagttgctcgtctgttgtgttgagctcggcaacgatgactcagcatgagtattgtgtgtggggttgctgttatctgagttggcaccctgtgtaggttttagaactggttttccttaaaactggatcaatttctttattcttaattaagagattgtcattacgtttttttaaaaaagaaccaccttcccgtccacgttgtggttgagatgatcagaacctggagccaacaatgtgtgtccaacacaagttcttgaggatggaaggtaattagtacatgaaatgtttgtttcgatcagttttgtgatttctatatttgaggtcaacatagtctgaatatagcagcaggtgatgcttcatatagcggctacgttatatagcgttggagtcatttgccgttattacaaattacgatgatgtgcatggcccctgttgcttaaatccctagatgagaatctaaaggtaggacatgcatgatgccagtcaaattccatgcgtctttggcttggtctatggctttatgctcacactataaatggtgataggtcaccatacacacctataactcttatatagataattaatttacagtccctaaaagcagacagaccacaaatggtagctaaactacagtaaaagtagtcactaactattttccttactcggattcagtaatacatcttaccacgccaaatatatagtgatattgaacattgaacttgttaacaccttaaactctcaattccaagtacatttttgcgcttgctcattacgcatatgaaagttttcaaatgtatcatttgcaggtattgtctaagtgaaagtttatgccgaaagaaaatagacgaaaagaatagcattcaagccattgactcactttcttttacgctgatttgtactgcagtttatatatgaaattaagatcgactgtttcaagggaaaaaaac

SEQ ID NO: 39838 - DNA, 1199 bp, Zea Mays
ccgcgtctgctttgaaaattggaattttggcccggtggcccacttgacttgccaactattttggcccaccagctcagcccatattcccttttcccacgtgaacacaggcagctgcaactgcaacgcgtgaagccgtgaacacgggcacaccagtacgacagtaccacgccacatgaactcgtgaagaatagagccgccactgaggaaccctagcgacggcggcgcgctaccggtgacatcgtccaactcggcccctccatccccgacgcggcggcgccagcgtgcaatcccgttcatctctacaggtgttaggatacttggattggagtcgagtgctaggctgctagtgctagtgttcaaagcctgaagccatgtccatgggcgtgtggttgttgcctgtttgtccaccggcagttcaaagcctgaagccatgtcctggcggccgcgaagaacctgcgcagtgcgcacggaggccgcctcgggagcgcagagcgattaatcgggctgatcgtcgactaatcgtaattagtcggctgatcgcccttctggcgatcagaggctaatcgccgatctgaaaactttgctctgctggtgctgcaacggattcggaacctgctgctgcgatggatccgggacctggttgctgtaacgcattcagctcctgctgctcttaatgaggtctgttcacaaattgcagctcagcgtgcagccaatcctaaccttgataaactatatattacaaaattcatgaagaaattgtttcttatgcctagcaaacgcttcaaatgcaaggaaatgaagcagtgatcgacgtcctagaaaccctagctccggaagaagggtaggagctcgacctcctagaaatagaaccttcgtgtcatgagaacttcgaagaagttggccccacatgctcaagcgacgaggaaagcttcatacatcgttggaatggatccacaccagagcgtgcatccgaccttggcgctcttcggccgagcagcacaccagagcgcgcatccgaactctcgttcggtggggtgcgggacggctcgccatataaatttccgtctcctgctccgaccgaagtggcgccccaacgtgcaaactactgccgccctcgccctcctccggcagctgcaactgcaacgcgtgaagccgtgaacacgggcacaccagtacgacagtaccacgccacatgaact

SEQ ID NO: 39839 - DNA, 1870 bp, Zea Mays
gcaacgcgtgaagccgtgaacacgggcacaccagtacgacagtaccacgccacatgaactcgtgaagaatagagccgccactgaggaaccctagcgacggcggcgcgctaccggtgacatcgtccaactcggcccctccatccccgacgcggcggcgccagcgtgcaagtgttaggatacttggattggagtcgagtgctaggctgctagtgctagtgttcaaagcctgaagccatgtccatgggcgtgtggttgttgcctgtttgtccaccggcagttcaaagcctgaagccatgtcctggcggccgcgaagaacctgcgcagtgcgcacggaggccgcctcgggagcgcagagcgattaatcgggctgatcgtcgactaatcgtaattagtcggctgatcgcccttctggcgatcagaggctaatcgccgatctgaaaactttgctctgctggtgctgcaacggattcggaacctgctgctgcgatggatccgggacctggttgctgtaacgcattcagctcctgctgctcttaatggtctgttcacaaattgcagctcagcatgcagccaattctaaccttgataaactatttattacaaaattcgtgaagaaattgtttcttgtgcctagcaaacgcttcaaatgcaaggaaatgaagaagcagtgatcgacgtcctagaaaccctagctccggaagaagggtaggagctcgacctcccagaaatagaaccttcgtgtcatgagaacttcgaagaaggtttggctactgacgagggcgaggaggatcatgatttggatgtctcgttggtgaaaaatcggagctgtctcgaggcttggcaacaaatgcgcatcgcggtcttcctcctatttgtagtcgtcgtcgagtttcctttgatcttgtgatgcccgtcttagagagttggagttgctcgtctgttgtgttgagctcggcaacgatgactcagcatgagtattgtgtgtggggttgctgttatctgagttggcaccctgtgtaggttttagaactggttttccttaaaactggatcaatttctttattcttaattaagagattgtcattacgtttttttaaaaaagaaccaccttcccgtccacgttgtggttgagatgatcagaacctggagccaacaatgtgtgtccaacacaagttcttgaggatggaaggtaattagtacatgaaatgtttgtttcgatcagttttgtgatttctatatttgaggtcaacatagtctgaatatagcagcaggtgatgcttcatatagcggctacgttatatagcgttggagtcatttgccgttattacaaattacgatgatgtgcatggcccctgttgcttaaatccctagatgagaatctaaaggtaggacatgcatgatgccagtcaaattccatgcgtctttggcttggtctatggctttatgctcacactataaatggtgataggtcaccatacacacctataactcttatatagataattaatttacagtccctaaaagcagacagaccacaaatggtagctaaactacagtaaaagtagtcactaactattttccttactcggattcagtaatacatcttaccacgccaaatatatagtgatattgaacattgaacttgttaacaccttaaactctcaattccaagtacatttttgcgcttgctcattacgcatatgaaagttttcaaatgtatcatttgcaggtattgtctaagtgaaagtttatgccgaaagaaaatagacgaaaagaatagcattcaagccattgactcactttcttttacgctgatttgtactgcagtttatatatgaaattaagatcgactgtttcaagggaaaaaaac

SEQ ID NO: 39840 - DNA, 1787 bp, Zea Mays
gaggaaccctagcgacggcggcgcgctaccggtgacatcgtccaactcggcccctccatccccgacgcggcggcgccagcgtgcaagtacgattcccttctcagtctccacggctccaccagggcaccagtccatctcttatcccccgtccccagtcccgttcatctctacaggtgttaggatacttggattggagtcgagtgctaggctgctagtgctagtgttcaaagcctgaagccatgtccatgggcgtgtggttgttgcctgtttgtccaccggcagttcaaagcctgaagccatgtcctggcggccgcgaagaacctgcgcagtgcgcacggaggccgcctcgggagcgcagagcgattaatcgggctgatcgtcgactaatcgtaattagtcggctgatcgcccttctggcgatcagaggctaatcgccgatctgaaaactttgctctgctggtgctgcaacggattcggaacctgctgctgcgatggatccgggacctggttgctgtaacgcattcagctcctgctgctcttaatgaggtctgttcacaaattgcagctcagcgtgcagccaatcctaaccttgataaactatatattacaaaagtctgttcacaaattgcagctcagcatgcagccaattctaaccttgataaactatttattacaaaagtttggctactgacgagggcgaggaggatcatgatttggatgtctcgttggtgaaaaatcggagctgtctcgaggcttggcaacaaatgcgcatcgcggtcttcctcctatttgtagtcgtcgtcgagtttcctttgatcttgtgatgcccgtcttagagagttggagttgctcgtctgttgtgttgagctcggcaacgatgactcagcatgagtattgtgtgtggggttgctgttatctgagttggcaccctgtgtaggttttagaactggttttccttaaaactggatcaatttctttattcttaattaagagattgtcattacgtttttttaaaaaagaaccaccttcccgtccacgttgtggttgagatgatcagaacctggagccaacaatgtgtgtccaacacaagttcttgaggatggaaggtaattagtacatgaaatgtttgtttcgatcagttttgtgatttctatatttgaggtcaacatagtctgaatatagcagcaggtgatgcttcatatagcggctacgttatatagcgttggagtcatttgccgttattacaaattacgatgatgtgcatggcccctgttgcttaaatccctagatgagaatctaaaggtaggacatgcatgatgccagtcaaattccatgcgtctttggcttggtctatggctttatgctcacactataaatggtgataggtcaccatacacacctataactcttatatagataattaatttacagtccctaaaagcagacagaccacaaatggtagctaaactacagtaaaagtagtcactaactattttccttactcggattcagtaatacatcttaccacgccaaatatatagtgatattgaacattgaacttgttaacaccttaaactctcaattccaagtacatttttgcgcttgctcattacgcatatgaaagttttcaaatgtatcatttgcaggtattgtctaagtgaaagtttatgccgaaagaaaatagacgaaaagaatagcattcaagccattgactcactttcttttacgctgatttgtactgcagtttatatatgaaattaagatcgactgtttcaagggaaaaaaac

SEQ ID NO: 39841 - DNA, 1379 bp, Zea Mays
tatgtcatctttcaaaatgagatggtcggcgtcattgaatttcaattctgtgcctgcatattttgagtacacaacttgtgcaccaacctgtacaagattataattcgatgtcaagttacttaattggcttaggacagtacaagtgttacaacggaaaaaaatgttactggtgtctggtgacaaggccatgaggaaaattgtcttccaaaattagaagttcaaacgtagaagaagattggatacagaaaaaatctcagcatacaaaacatacaactactttatttatggtaacccgaaggccacaccgagctcctccaaggtgccggcctccctacatctatgtatttctaatgcagctctccgttcattgtttttgctgctgctctgcaatggatagattgacagcacttgtccatgatcgatacacacggtagatttataattaattgtataatactgtaatcatattttagacctatctatctttattgtacagcaatttctatttaacaaactcaaaagacattacaattattgcctatgagctattatcagctcaggggcattcaggtcgttttacagctataatcaggatagcaaaaaactcagcttattgaggcagcagattctctggacagcaaaattatcagacaagcctgctacccagagaatcgagttcctaaaaagcgactacaaacagggcctaactctatcgttcataagcctattgcttatctttcactaagtagcctgcatgatacattactgttctggttgggtaaataagatgctctccccgtagtgaaattctaatgctaacaagattaaagtgaagaacttgcatacatgcagcaatacgtgtgcaaccagcaaaaaattagttaggtgatagataaaagcctgcaacaatattacctaacagaggtacaggaagggcatgggacagaaaattagttaggtgatagataaaagcctgcaacaatattacctaacagaggtacaggaagggcatgggacagccggaccctactttggtcaagtaagcgccctcggttccaatggcatcatccctcccattggtatactgagaaaatgactccactctcctggtgctcatgtcaatggtgaccagccacatctttctcacgtatccgaactcgctgatgacaaactagcaacaaaatgctatatgagcaataatgttcagaaacataaatcacaacacaaataccaccatagcaatgatgataagaaacataaatcacactacaaataacactataatcagtcacatgaccatcgttcaatgatgctcaaattacagctctaacagcaaaatatcataatctttctcacgtatccgaactcgctgatgacaa

SEQ ID NO: 39842 - DNA, 1962 bp, Zea Mays
caaagactcaaacctatgtgcaccctaatttctcaagaactcggggaattttatgcatttaatcatcctcatctgatgtgcggtaagaaccacctgaccagctactggatgcaattccaaatcctgaagttccttttctgacttttattaaaggatgtttgtttatttgggtattctttgtcatgaccataaactgtggtgtggttatagatgaatgttctttaaagcaacacatttgtactaactttgtgttttcagtaaatgttctcaacaactgatccatttagctgcaaagtgataactgtggcaacataagcttcaggcaattgcatcaagatggttatcatttcatcctttttaatgaaccacctcagatgatcatacatcttaaaaaaatatgatacttgtttgttaacaacaagatacatgaatgtgaaacaattctataccatcattagaaataattttgttaagaagatattgtatctcagctgaaggtacactagagtagatatcatctttaataatagtatggacagacacataattactcttaatgccctcagtaagctgttcagagataagatttctaaggtcacatccgtaaatctcatctcaccaagagagcttactttgatattgttggcactgaaatcagattagaaaacaccacgctccttattttatcttatcctctcaagcattgtcctaaaagtttgcttactaatatttgttgcaatttcatatgaagatacaatatcagtctcaccagataaaactataaaaactccatccacatctgtcatcccaaattaacgaaccatctctcctcctgattttatgaaattattaagaaaaattgaatcattataaccttcttcaactagagtgccgtcagggagcagcagcatgtagcgagtgtaggagatctaaggtaaaactggttgcgggactgttaacaaaagaaactgtacgtcagacaaatgtatacccaaaaaagttataagatacaaagattattttatattgaggggatggggacaggagcagcctgaatctcacacagtcaccctacgccacaaaaaactcaacaaatgtatgcacaacaagacaaaacagaaacaatcccttctaatcttaccaattcacagaatcagtaaaagtacatgcacaagaatgctactgttgattagtataaatagcttcaatgatcaaaggatgagcatttgtacaaaactagttgaacatcattgaacttattgaccaggaataaactcattcaatactatagttatataaactccaaaaatactccaaatcaaagttttgaatactacaatttgagaataccacaattttaatacaaagtttttcaaagaagcccgccaaacaccttgtggctatgaatgccatagttttttctaataccatggtattacctaaaaactatgaaaaacgtggctactaaacagggcctcatatacttaccattaagagcagcaggagcagaatgcgttaccgcaccatgagtcggatccacgtccatcggggaactaggtcccggatccatcagcagcaggttctgaatccgttgcagcaccagctgtaaaataggaatacccaaaagaaaggctcagatcccgaacaaaggctcagatcccgaacaaaggctcagatcctctgcaaaatagaaatacccggatccatcagcagcaggttctgaatctgttactgatttcatagaatcaggaggagtgatggttaatgaatttgggatgacaaatgtggataaagttttattgttttacccggtgagactgatgttgtagcttcatatgaaattgcaacaaatattagtaagcagactgtcaggacaatgcttgggggataagaggaaataaggagcgtgatgtttgtttatttaatttcagtgtcaaacaatatcatagtaagctatcttgg

SEQ ID NO: 39843 - DNA, 1707 bp, Zea Mays
attttttgttactaagtgactatgattgtcaagaaaagctaaattcagccttttttagacatttcactctgattgtagtatgaaactcgttcctgtgatgtatatataagcaaaaacaagtaatgctcctccatttctgtaatttagactgcatggcattctgcaaagaaaagcgttagatagaaggacacaattcacctccaattactggaatcaatgtcagacatccacaatgtgttccatgtattccagctccaaaaatgcctataagtgctagaaacccatatcgtagaatagccaatccaagtctaggaagatctgcagtctcgagaaaaacgactgaaaatcttggacctagccgttcacaaaacccggaactcagaggtaagggtctataatgtttagtggggctgagaaggtgaagaagaagcaacctgggaaagtgagggctcaatgaggaaggaatactcttatcttttctcagacccatcctaaatctcgtgggaaagattcttttaagtgggtaagtttataacatcccgattctcaaaacagaggttagtagaagaaaccctaatcgcataatcccaaaaccccaacatcatcacatctatctttggaaaacctatattcatgcatggatgatgattgttagaaacattgcacataactattttcacgttactagcaaatggtagggatttattttacacctaggaaaatatacacaagagagagagagagaagaaaggaaatagaaaaaaggaaatagaattctacccggaggcccacacctatgccccctcctcgtgcccgcgtcctccccctggcccatctctgacacacccctcgccctctccctctccgctaacccggccctgcttgtcagcaccatcgtctccctcctaacaaactcaaagtgctcgcaccctcgccatcgatcgccatcctcctcccccttgctgatagacacagttgagctgggcaccgtttttccctctcccgctgtgcgcatgtacctacacgccaccatcgtccttcaccgtcgtggcatcacatcgccacccatgtgcgccaccctttttcactgcctgccggcatccagctggccaccaagctccctccctgaccgcctataaaaagaccgcccaaagcccctattcacctcgcaccactcaccatccctcctctctaagctcaatctgtgcccacgcggccaccctcccccaacttcggtgagatctccatatcctcctccagtcgtccaaagctcaatcaagctagcgcacaagcttcactgcttcctcatgaccacaatgaacctctccacgcccccaatcaaccaccaccacctcgtcagcggcattaccatcacggtgaccctccaccccaccgtggctggccctccctagcttgcctccggccaaattgagtctggccccatgaacacccacctctccttgtgctagcacacctccccattgcccgggaaccagagcaacgacggagaaccgccgcgaacctcaccggcggccggttcgccctccccccatcaatagccgctaagcgccgtttccctccccctccctctgacacgtgggcctagccccttcacgctattgcccattgttcccttccccgtgggctagctaggccttgtgcccgcaccgcacctcgcccagctggcccgaattgctctcgccaggc

SEQ ID NO: 39844 - DNA, 4477 bp, Zea Mays
cccaagggatcctcgtttgatttaataggatattccgatgccgattgggcagggtgtaaaattgataggaagagcacattagagacttgtcagtttctggggagatccctggtgtcatgggcttcaaagaaacaaaactcagtagctctttccaccgccgaagctgagtacattgccgcaggccattgttgtgcgcaattactttggatgaggcaaatccttggggactatggctacaaattgagcaaagtccctctcctatatgataatgagagtgcaatccgcatggcgaataatcccgttgaacacagccgcactaagcacatagacattcgatatcactttctgagggatcaccaacaaaagggagatatcgaaattgcttatgttaatacccaaaaccaattagctgatatctttatcaagccactagatgagaacaccattagcaaacttaggaatgagctaaatatacttgattctcagaattttgattgaaacattgcgcacatagctcatttatatacctttgatcatgtctctttcattttggtacaaatgcatatttcttattattcttgtaccaaggctacgactaatatgctttgaagtgtatttctatactaagtcgtagattgaaagggaaatggaatcttcggcaaagacaaggcttccactccatctctaacggtatcatctactctttgtcgttgtttctccactctcaattggtataacccttcactcatatttatattaccatttgggagaaagtattataagggctctcgaagtctctgttttttgcgattaatgcgaaagggggataaaatattaagcccaaagcaaaaggaccgcacaactaccatttcaaaaaatttcaaaatgaagttttacttggtattttcgattggtatctaatttacaattaatccttcaattggtatctttaaaaatcaaaccttaatttggtatctatttcaaaaccctctaagaggagaagttcattcagggggagttttatttagtcaaaggaaaagcatttgaaacagggggagagttttcaaatcttgaaaaatgcttcttgcaatcttattcatatacctttgactatttgcaaaaagactttgaaaagattttccaaaagtatttgcaaaaacaaaacaagtggtgcaaatgtggtccaaaatgttaaataaaagaaaaagcaatccattcatatttagtgagatattcaattggtttaactcccaagtaacctatgcacattctaaatgcaaactagttacatttctacactttatatttgctttggtttgtgttatcatcaatcaccaaaaagggggagattgaaagggaaatagggttaaccttttcctagaattcatgtattacaggtgcataaggttcaacacaaaccaataaaagattcgagttagggactcaatttaaaaagagcaaaaggaatcgagtgggctgaaaaatggcgcaccggactgtccggtgtgccaccggactgtgtccggtgcaccagggccgtacaggtgtcaaccaaccactctcgggaaaacgaaggcgcgctccgctataattcaccggactgtccggtgtgccactagactgtccgatgagccagcgggcaacgactatccagcgccaacgttcgactctgcaaagtgctacagtgagccacagtgctgcggcagaagtcagagccgcgaagtcagagggcaccggactgtccggtgtggcaccagactatccgatgccgcaagaggaaaaagctccaacgatcgacttcgctctgaaccctaacgattgggtgacatggcggggaaccggacagtgcacagtgcctgtccggtggcgcaccggactgtccggtgcgcccatcgccagcagcctccccaactgctacctaagtggttgggggctataaatacccccaaccaccacaacattgagcatccaagttttctgaagatcacattcaatacaaagagctctagcattcactccaagacacaatacaaaagatcaaatcacctctaagccccaaattcattccaaacacttagtggcttgtgagagagagatttttgtgttcatttgagttcttgtcgtttggattgcctttctttttttcccattcttattctcaagtgatttgcaagcgaggcaagagacaccaagtgtgtggtagtccttgcgaggtcttagtgacccgtgagattaaggaagaaggctcactcggtctaagtgaccgtttgagagagggaaagggttgaaatggatccagtctttgtgacctcctcaatagggactaggttctttggaaccgaacctcggtaaaacaaatcaccgtgttcactcactttatttcttggttgatttgttttccctctctttccgacttgaatttaattgtaacgctatcccccgaccttagtgcgcgtttaaagttataaatttcaagtttcgcctattcaccccctctaggcgactttcagagatgatccaagacgccagtaagatcgtttgttttaattgatgtttttttgtttgtatagaattgattgatgaccatggccatggatatatcttccctcatcttcatgaagggaagatttggggaaggagtggtggtggtggtgtgcgcggggcgggaggggaggggagtcgtcactgcgccgccacaatgctcacagtaccaggagctgccctgcggcgggcaggagctcgatatcgacaccgcgctcaaggatagaatcctcgggggcgcgctggagcccgtgggtgcggcgacgggggacgatggcaagcagcccgtggagctgcgcaggatgatggacgagctggacgcggcggccaacacggacgaagacgaagacgaaggcggcgtcggcgcgggctcccgcggcaggaactcgcagtgcggcagcggcggcgcaggcccgcagagaccggcgttgctggcgaaggaggcgaggccgaacctggcgcgcatggcgtcgggcagccgaccggagagctggttgttggaggcgttgaagtccgcgaggcggggcagagcggcggccacgtcgggaacgaggcccgtgagcaggttgtcctggagcctgagcgtgacgagcgccgtgagtccggcgagcgcggttgcgggtgggacgggcccgctggtgctgcaacggattcggaacctgctgctgcgatggatccgggacctggttgctgtaacgcattcagctcctgctgctcttaatgaggtacttggaagactgagaggggaggaagggcatgggatagctggaccttacattggtcaaccacatcttctttctcacgtaaccgaactcgctgatgacaaagtgcactacatgtggcctgtccatgtcgacttgggggaacatgagaatgtcatccattttggattgtttggtagggatattggctacgagacctactatgaaagtctggataccaggaaaacgagcgaaattgctgactcgctcctaggaagcttgcgtgaagccaacaccagccttgagtgccccatagccaaccttgtcgttgtgggcgacattggtgaacaggagtgcacccccgtcacgggtggtcgacacggtgcggtacaaccagcatcagtccttgctgcgagtgttgttgtcaggaaacttgtccagagggaattggctgaagacaacagtaagacaatccacaaaacttccgaaatcaaatgtaggatttgagtttctctagaggatttgagtttccaaactagcatcaaacgagaatatcatcaaatgaaacaagtgcgaactttgaaacgcggtttcatattcttcaccggccgtcagtctgatctgacggaaacctgctgcgcgcaaatcaaatcaagacaggaaaaccagcaagagtgtgccagctcatacaacaactcgtcagcgataggaagaagtgcaattaactgttcagctagagtagttctgaagaaactatatatgactgctctctatgtaatgcctcacgcagggacacgcacgacacggagcactggagcagcgccacggcacgccgacaaaaaagcgtgtcgccttcgcctcgtttgcatgctgctgctgcccaactcaaccgcgtgtaatgctgccacttgttaactagcagagggagtgaaagtgggatgcaacaagctggagtagtagctagcaatccaggcttgcaaccactgtagctagcacctgttgtgactgcatgatgaggtcttcagggagagaacacaaacaaataagcgcagacaagtgggcgaccaatctggtgaagctgctggagcctgctgctgtgactgcatggaacggtgacggtgcccccctcctggtatccccagcagctggcgcgctgatggccactggtttggaaccgcccatgggcgatgctggtcagctggtgggaggccctgagcgttgggtgtgacctgtcg

SEQ ID NO: 39845 - DNA, 1499 bp, Zea Mays
ccgtccgcgcgccgttgtcttctcccgtctccttcccttctctctctcgccgccggcactggagacgctactatggttttctcctccccattctcctctcttccttccatccgagatctcttcttcgttctccatttgagcgccagacgcaagcttcttcagtctccatttgagatctcttcttctgggaactgctcaaagggcctcgtcgtccgtcgtggtagtggtggtggtggtgtgcgcggggcgggaggggaggggagtcgtcactgcgccgccacaatgctcacagtaccaggagctgccctgcggcgggcaggagctcgatatcgacaccgcgctcaaggatagaatcctcgggggcgcgctggagcccgtgggtgcggcgacgggggacgatggcaagcagcccgtggagctgcgcaggatgatggacgagctggacgcggcggccaacacggacgaagacgaagacgaaggcggcgtcggcgcgggctcccgcggcaggaactcgcagtgcggcagcggcggcgcaggcccgcagagaccggcgttgctggcgaaggaggcgaggccgaacctggcgcgcatggcgtcgggcagccgaccggagagctggttgttggaggcgttgaagtccgcgaggcggggcagagcggcggccacgtcgggaacgaggcccgtgagcaggttgtcctggagcctgagcgtgacgagcgccgtgagtccggcgagcgcggttgcgggtgggacgggcccgctggtgctgcaacggattcggaacctgctgctgcgatggatccgggacctggttgctgtaacgcattcagctcctgctgctcttaatgaggtacttggaagactgagaggggaggaagggcatgggatagctggaccttacattggtcaaccacatcttctttctcacgtaaccgaactcgctgatgacaaagtgcactacatgtggcctgtccatgtcgacttgggggaacatgagaatgtcatccattttggattgtttggtagggatattggctacgagacctactatgaaagtctggataccaggaaaacgagcgaaattgctgactcgctcctaggaagcttgcgtgaagccaacaccagccttgagtgccccatagccaaccttgtcgttgtgggcgacattggtgaacaggagtgcacccccgtcacgggtggtcgacacggtgcggtacaaccagcatcagtccttgctgcgagtgttgttgtcaggaaacttgtccagagggaattggctgaagacaacaggagagaacacaaacaaataagcgcagacaagtgggcgaccaatctggtgaagctgctggagcctgctgctgtgactgcatggaacggtgacggtgcccccctcctggtatccccagcagctggcgcgctgatggccactggtttggaaccgcccatgggcgatgctggtcagctggtgggaggccctgagcgttgggtgtgacctgtcg

SEQ ID NO: 39846 - DNA, 1751 bp, Zea Mays
gatggttattcgttctctcaacggctaatattgattgtcagtctattttagagtggagtctttctcctggtttttcatgttgtcgaaaccctcgccaacgcctccgtttcgtcgaagccacatccgtggcgtttcataatcccaaaagtctccgtgaagaatagagccgccactgaggaaccctagcgacggcggcgcgctaccggtgacatcgtccaactcggcccctccatccccgacgcggcggcgccagcatgcaattcaaagcctgaagccatgtcctggcggccgcgaagaacctgcgcagtgcgcacggaggccgcctcgggagcgcagagcgattaatcgggctgatcgtcgactaatcgtaattagtcggctgatcacccttctggcgatcagaggctaatcgccgatctgaaaactttgctctgctggtgctgcaacggattcggaacctgctgctgcgatggatccgggacctggttgctgtaacgcattcagctcctgctgctcttaatggtctgttcacaaattgcagctcagcatgcagccaattctaaccttgataaactatttattacaaaattcgtgaagaaattgtttcttgtgcctagcaaacgcttcaaatgcaaggaaatggtttggctactgacgagggcgaggaggatcatgatttggatgtctcgttggtgaaaaatcggagctgtctcgaggcttggcaacaaatgcgcatcgcggtcttcctcctatttgtagtcgtcgtcgagtttcctttgatcttgtgatgcccgtcttagagagttggagttgctcgtctgttgtgttgagctcggcaacgatgactcagcatgagtattgtgtgtggggttgctgttatctgagttggcaccctgtgtaggttttagaactggttttccttaaaactggatcaatttctttattcttaattaagagattgtcattacgtttttttaaaaaagaaccaccttcccgtccacgttgtggttgagatgatcagaacctggagccaacaatgtgtgtccaacacaagttcttgaggatggaaggtaattagtacatgaaatgtttgtttcgatcagttttgtgatttctatatttgaggtcaacatagtctgaatatagcagcaggtgatgcttcatatagcggctacgttatatagcgttggagtcatttgccgttattacaaattacgatgatgtgcatggcccctgttgcttaaatccctagatgagaatctaaaggtaggacatgcatgatgccagtcaaattccatgcgtctttggcttggtctatggctttatgctcacactataaatggtgataggtcaccatacacacctataactcttatatagataattaatttacagtccctaaaagcagacagaccacaaatggtagctaaactacagtaaaagtagtcactaactattttccttactcggattcagtaatacatcttaccacgccaaatatatagtgatattgaacattgaacttgttaacaccttaaactctcaattccaagtacatttttgcgcttgctcattacgcatatgaaagttttcaaatgtatcatttgcaggtattgtctaagtgaaagtttatgccgaaagaaaatagacgaaaagaatagcattcaagccattgactcactttcttttacgctgatttgtactgcagtttatatatgaaattaagatcgactgtttcaagggaaaaaaac

SEQ ID NO: 39847 - DNA, 203 bp, Zea Mays
ctcgggagcgcagagcgattaatcgggctgatcgtcgactaatcgtaattagtcggctgatcacccttctggcgatcagaggctaatcgccgatctgaaaactttgctctgctggtgctgcaacggattcggaacctgctgctgcgatggatccgggacctggttgctgtaacgcattcagctcctgctgctcttaatgggta

SEQ ID NO: 39848 - DNA, 1285 bp, Zea Mays
cgggctgatcgtcgactaatcgtaattagtcggctgatcacccttctggcgatcagaggctaatcgccgatctgaaaactttgctctgctggtgctgcaacggattcggaacctgctgctgcgatggatccgggacctggttgctgtaacgcattcagctcctgctgctcttaatggtttggctactgacgagggcgaggaggatcatgatttggatgtctcgttggtgaaaaatcggagctgtctcgaggcttggcaacaaatgcgcatcgcggtcttcctcctatttgtagtcgtcgtcgagtttcctttgatcttgtgatgcccgtcttagagagttggagttgctcgtctgttgtgttgagctcggcaacgatgactcagcatgagtattgtgtgtggggttgctgttatctgagttggcaccctgtgtaggttttagaactggttttccttaaaactggatcaatttctttattcttaattaagagattgtcattacgtttttttaaaaaagaaccaccttcccgtccacgttgtggttgagatgatcagaacctggagccaacaatgtgtgtccaacacaagttcttgaggatggaaggtaattagtacatgaaatgtttgtttcgatcagttttgtgatttctatatttgaggtcaacatagtctgaatatagcagcaggtgatgcttcatatagcggctacgttatatagcgttggagtcatttgccgttattacaaattacgatgatgtgcatggcccctgttgcttaaatccctagatgagaatctaaaggtaggacatgcatgatgccagtcaaattccatgcgtctttggcttggtctatggctttatgctcacactataaatggtgataggtcaccatacacacctataactcttatatagataattaatttacagtccctaaaagcagacagaccacaaatggtagctaaactacagtaaaagtagtcactaactattttccttactcggattcagtaatacatcttaccacgccaaatatatagtgatattgaacattgaacttgttaacaccttaaactctcaattccaagtacatttttgcgcttgctcattacgcatatgaaagttttcaaatgtatcatttgcaggtattgtctaagtgaaagtttatgccgaaagaaaatagacgaaaagaatagcattcaagccattgactcactttcttttacgctgatttgtactgcagtttatatatgaaattaagatcgactgtttcaagggaaaaaaac

SEQ ID NO: 39849 - DNA, 1600 bp, Zea Mays
ctcgtaatggctgtttccatttggcttttttttcaaagttcgtgaagaaattgtttcttgtgcctagcaaacgcttcaaatgcaaggaaatggttagatcttgatcacacactattttttgttactaagtgactacgattgtcaagaaaagctaaattcagccttttttagacatttcactctgattgtagtatgaaactcgttcctgtgatgtatatataagaagcagaaacaagtaatgctcctccattactgtaatttagactgcatgtgatgtatatataagaagcagaaacaagtaatgctcctccattactgtaatttagactgcatggcattctgcaaagaaaagcgttagatagaaggacacaattcacctccaattaccggaatcaatgtcagacatccacaatgtgttccatgtattccagctccaaaaacgcatataagtgctagaaacccatatcatagaatagccaatccagaagatctgcagtctcgagaaaaacgactgaaaatcttggacctagccgttcacaaaacccggaacttagaggtaagggtctataatgtttagtggggctaagaaggtgaagaagaagcaacctaggaaagtgaggactcaatgaggaaggaatactcttatcttttctcagacccatcctgaatctcgagggaaagattcttttaagtgggtaagtttgtaacatcccgattctcaaaaaagaggttagtagaagaaaccttaattgcataatcccaaaactctaacatcatcacatctatctttggaaaacctatattcatgcatggatgatgattgttagaaacattgcgcataactattttcacgttactagcaaatggtagggatttattttacacctaggaaaatatacacaagagagagagaagaaaggaaatagaaaaaaggaaatagaattctgctcggaggcccaatgccccctcctcgcgcccgtgtcctccccctggcccatctccgacccacccctcgccctctccctctccgccaacccggccccgcttgtcagcaccatcgtctccctcctcctcaggaactcaaagtgctcgcacccttgccatcgatcgccatcctcctcccccttgctgatagacacagttgagctgggcaccgttttttccctcgcccgctgtgcgcatgtacctacacgccaccatcgtccttcaccgtcatggcatcacatcgccacccatgtgcgccaccctttttcacttcctgccggcatccagctggcaaccaagctccctccccgaccgcctataaaaggaccgcccaaagcccctattcacctcgcaccactcaccatccctcctccctgagctcaatctgtgcccacgcggccaccctcccccaactttggtgagatctccatatcctcctccagccgtccagagctcaatcaagctagcgcacaagcttcactgcttcctcatgaccacaatgcacctctcctcacccccaatcaaccaccaccacctcgtcagcagcattaccatcacggtgaccctccaccccaccgtggctggccctccctagcttgcctccggccaaattgag

SEQ ID NO: 39850 - DNA, 839 bp, Zea Mays
ctttgccagagctagtaagattggaaaagctttcaattaattaacataaatgagagtgactggacaaccatatgatctctactttagcatagggactacaactacaacgaaaagaacaaaacctttcgcttcaaaggaagctggtaaagttactttgagtttgttaaaccgcaaatatatgtaacttctggaaacctgagtagggtcctgctagcttgggtctttttttttgccatgcaactctcaaaagtagtatagaggccatgctggagatgttctaacacaaataagttctgagtttgttactgtattctcatcttcgtttacttatcaaaatatgtttactcgcaagataacttgatctaaactttcattctttctttaaacatgtttatgtaccatttttatgtaagttttgttcacttttgtattcttttcctacatatgtagccatgaaaaagtaatgttaccatctagcatacaaaattttccccgttttctgtgcttttttctgtgaaatctgtaaaatccttatataattcctatgaaattcctgcattccataggggcctcaaaatgttatatgtagaataggaattggtacacctactatttgtgttgtacatcttaagtaactgttgttagcatagtcgagaatagttggtctaaaatacatttagtccatgtttgtttgggcttcccagagactttggaccttttaaaatccaaagaactccgacaaacaaaaaaaatcagaggctcactatactaagagacgtttagattttgaaaagtctaaaagctaatagtgggaaaaggcccaagcaaacaaggcacca

SEQ ID NO: 39851 - DNA, 208 bp, Zea Mays
cgccaattccatcttccattataataacccagagattatacatgtgtacacccttaccaccccccatgttacgagcggtttatcagtaacccctcaaatttcccccactccccacaataatacatacgcgaactaagtaaaaaataatgcaccacaaagatatataagggatacaatgaaactctcctactaatcaacttgcatgtcc

SEQ ID NO: 39852 - DNA, 1232 bp, Zea Mays
atcagaaccatcattaggcgcttgaaactagcgtcgccatgcatgcaaatatgattagctagctagtggcgactatggggtgtatgtgtgcggtgcgcgcccgcgcaagtaggcgcggtggctgcaggtgtagtggcggtaggagggagagagaggagaggagaggcgtgcagcagccagcagaagcagcattggcgattgatgagtggtgcgagtgcatgcgagtatggaggaaaagctacaaaaattgcgcgtgtgggtgcagcctttgcatgcgcgccctccggccggcctccctgcctgccgcttttgggggtgagcctgatgagctctgacacgagcgtgcgcgcttgtcttgcacggaccgctcgatctccaccccgcaggaacgcagcgggggaagcagggcgcgcgcggtctcccacgggaccaaagcctcctgcgtcatccttgctgcctgccatgccatgtcacctactgctacctatgaccatttttttttcacttggtcgtctaacctatctatgaccatctcatcttgtctttgttttgtccccttttgtagtttgtcctaacatatatagaggccctaccttgcaacatatattattggaaatgtgccttgaaacgaaattcctgtctcaaaatatatatgatcattgtaaatatgtatgacattactactcaccagggagatagttattggaagaaattaaagattaagttgaggcgattccatcagaaatgggattgcttgcagtgctcttgattatttcaaccatgtaattatatatgctatgggtgaaggtttatagagccagccagtgtcacactagcggtggtagcgcgggtgtccaaagaaactggctaagctgtctagttaggtagcaagctcggttacaccctgtgtgttaccctgagctgtttgttagctgtctgttcaatctgaattgaacagtccggtaatcaagctagtggccattttcttgtcgcctgctcgatctgaactgaacagtgggcgatcaacccaagctatgaactgatctcgcgatcgtgcatctctgcagggccaccaagctggcaggttctagctagggtttcgtcatagatggatggatggatctacacgcggttagcataacatgcacaggatgtgatgtgatgtcatgggtgtaccaagtaacctcatcaccttggaggtgttggggagcaggctgcggagcctggcgagg

SEQ ID NO: 39853 - DNA, 369 bp, Zea Mays
ggagcgcctcgtggctgccgtgaaagccgccgccttcccacatcccgatcggtcggtcggcggcgcccctctcgcaggagctgaggtagcgtaacggtagcttgctggtggattcttggggacggcgcggcggctgcttcgcctcgtgtggtgctctcgcttcttctctttgctttgccggtcaaaggaaagcgtgggacggccgggtggtgccttttaaactctcggttgtgtcgacctgcccacttcgttgcgcgacactcgtgtgtggctttaggccgtccgccatagctttttgctatgcgtcctgtcgccttttcgcaccgcggagggggtgagctggtcgcctaattgtcgatcgagacggct

SEQ ID NO: 39854 - DNA, 1302 bp, Zea Mays
gtcctagctcatgcctctgctggtgcagccagggctcaccgcagcacgtggagcaagtgtcttgtagcctttccttgtcctgcttattgtgatatctctcggcttggagccattcctctagcgtcagcagccgtgatacaaactagtcgtgtgtgctttcagctgtgtttacatcgcgcgattgatcgtggtcctgctcagtgcaaagtagaggtagttgtttgttatcttccccaccactggtgaccacgccggctgattctaaactccgccgtgaccaaggattcataagtggtcaggaacagggtctcgccgccgcaaaacgttgttgcagaccgcttcaccgtcgaccctttgaactgcatcatccccgaccaatctcgcgcgcgtacggtgaacttcgaaggtcagtgatactctctgcacacctaatttgaactctaccgcatggaagctatgggatcgagcttgccggacccgctgttccaccgtcgccgtcggtaactatgctccagtgtccccgcgaccgaattaaacacatatctgagttcaccttgggtctgaggttgtgtcgatgccctcgccgtcgttggtgatgcgccaccatggtcgatctggcgcagaccgccggagttctgcgcggcgtcgtcgtggctgaaactttataaaagagtggaattcgaggggcttaagtgaatctgtcattgagtaacatcaatagtgacaagggccgatgtggattagtttgagagcgaaggtcatttttgcaagatgtgtggtgcgggcgcggtctgtttgttgtgggccaactctgcctgttactgggtcggctgagctaggtttcgacccagtactgtactcagttttgccatttcttttatcagcaaacttgtgaattgagctaaaaatcatagaaaattgataaattaattggacaaattttgttggatatctaatttcatgagctatttggtaaagttggttttaggatttttgactagttagaaaattctaagtgaatttaaggtgctcttggaaggcctatattaattttataaataagagggtaacacaaaaaaaaattagaaatttttggagagacttgttatccaaatatgaacttttgggcaaagtttggatatgatttgcttagcaaaataattgttgcccaaaaaagaaaaggattgcacctatgaaatgaggacacctagtagttaagtgaagagatgaagttgcttaagaagttttaagcttttggatgagatataagttggattagttccctggtttacctaagtgaat

SEQ ID NO: 39855 - DNA, 989 bp, Zea Mays
cggcttggagccattcctctagcgtcagcagccgtgatacaaactagtcgtgtgtgctttcagctgtgtttacatcgcgcgattgatcgtggtcctgctcagtgcaaagtagaggtagttgtttgttatcttccccaccactggtgaccacgccggctgattctaaactccgccgtgaccaaggattcataagtggtcaggaacagggtctcgccgccgcagaacgttgttgcagaccgcttcaccgtcgaccctttgaactgcatcatcccgaccaatctcgcgcgcgtacggtgaacttcgaaggtcagtgatactctctgcacacctaatttgaactctaccgcatggaagctatgggatcgagcttgccggacccgctgttccaccgtcgccgtcggtaactatgctccagtgtccccgcgaccgaattaaacacatatctgagttcaccttgggtctgaggttgtgtcgatgccctcgccgtcgtcggtgatgcgccaccgtggtcgatctggcgcagaccgccggagttctgcgcggcgtcgtcgtggctgaaactttataaaagagtggaattcgaggggcttaagtgaatctgtcattgagtaacatcaacagtgacaagggccgatgtggattagtttgagagcgaaggtcatttttgcaagatgtgtggtgcgggcgcggtctgtttgttgtgggccaactatgcctgttactgggtcggctgagctaggtttcggcccagtactgtactcagttttgccatttcttttatcagcaaacttgtgaattgagctaaaaatcatagaaaattgataaattaatgggacaaattttgttggatatctaatttcatgagctatttggtaaagttggttttaggatttttgactagttagaaaattctaagtgaatttaaggtgctcttggaaggcctatattaattttataaataagagggtaacacaaaaaaaaattagaaa

SEQ ID NO: 39856 - DNA, 2193 bp, Zea Mays
agaacacctagaagaagtggtgtttgaaggagtctactccagtggctgctgatcaagtggaggagccatctaactctgtattggatagagggatctagagcctcttcactgcaacaaaggcagatcaaaaccaggcaatttcaatggtgtcctattatgcttcatcttcagaacctgctcaagttcgcggtaaaactgtctatatccaatattcaaacaggcaagaaattaccaacaataaaggcactggggattcttctggcaatgtcctacttgtaacttttgaaggcgttcagcctaatgatgttaccatagaagtcattcatttggtattttcggcatttggatttgttcacaagatagctacttttgagaaagcagctggtttccaggcacttatccagtatactgatgccccaactgctcttgaagctaaaaactcattggatggaagaagcatccccaaatatttacttccagaacatatcagtgcctgccacatgcgcataaccttctctgcacataaggatttgaatatcaaatttcagtcgcatcgcagcagggattacaccaatccttaccttcctgtgaaccaaacagcaattgaggggattgtgcagcccactgtaggccctgatgggaagataaaggagcctgagagcaatgtacttttagcatcaattgagaacatgcaatatgctgtgacggtggatgttctgcacactgtgttttctgcttttggtgctgttcaaaaaattgccatgtttgagaagaatggtggaatgcaggctctaattcaatatccaggtatatgctcaccagtacgcccaacaggatatgctcttgactttggtacactgtgatacactgaatttattgcattggcacgtcgctgtaacttgcttacacagttgagtgcactttatatgtcttgctccctctgtttgaaagtattgaagtttatagctcttttttagacttggttcagaatgtaccgtgtttatgttctattgttcctgatttttatatcctcccttctctcttcctaactccctctcccatcatttatgagtaaaccggtcatactgttattttcgccctttttgcatcataagtttctaagtttggaaactttagcagagaggtgtcggagttcgtgaaggcttaaaatggacatctgcaactttccagagctatagagttgcttttaatataacaactgcagccgttgctaaacaagctttggagggacactgcatatatgatggtggttactgctcatgatgatagaagcagagactacactctttcagaccctaatgcgcagctgcaagctgctgcacaggcgccagttataagttctccgggagtggcatggcagaaccctgcatcagcaccagctgctcctttctatggaagcacggcggcttcaactcctgttggacaaccgcctgcttggaaccctaacatgcaggcccctggttttgcatctgcatcgacagcgtaccccaacccaccattaatggccaactccacgccttactatcctgctattggatcaagttcaggtgccccgccggtatcgtttcaggcttcacagcagaggccacagtatggcatgccccctggtgctccaccgcacgcaccaccagctggccaaccaatgtacttccagaaataagtggtttcgattcaatgttatcaaagagcattcacgcatattacctgcaactattgttgtccgcaaatgccatctggaatttttttggaagtgcattgtaactcttgtaacttacgagcgccctacgcaagaataccccaggctggctggctattaaaccgtcaaaaatagttttaacctattagcctgcgtggtatattgttatctcaatgccgagttgttttgatgcctcaagtgtttggaaagaaagtatttcgaaaccgtggttttggaatacagttttaagatgtcacgacatgactgtagtactggaatacagttttaagatgtcatgacatgactgtagtactccctctatagaactgtattttttatatcgttcttaacaatacgtgtttgatgattatctcaaaccatgatatttagtatatatgtgtaagtgatgattatcttaaaccatgatatttagtatatatgtgtaagagtaattatagaaaaactttgggttggag

SEQ ID NO: 39857 - DNA, 2162 bp, Zea Mays
cgcgccctctcgaccgctcgccggatgcgcctcatgccctcaccaatcatcatcgtcaccttctggattggaaccacggtcacgaagcgcagcccaagccagccccatcccccaccccccatttccccaataggccaaccccgtctccctcctcagcaacgtgctcggtttcttcctccctcgaatcggctgcaccccgtgccgcgatacgaaaacccaccaaaccctaaccctagctgcagtgccactaccgcccgcttgcccggtctccggagaggaagccgacccaagcaacgatgccgtccgggtcagcgacgcaatttcggtacacgcagacgccgtccaaggtgctgcacctgcggaacatgccgtgggaatgcaccgaggaggagctcgtcgagctctgcaaacccttcggcagggtcgtaaacaccatgtgcaacgtcggcgccaaccgtaaccaggcattcgtcgagtttgcagatcaaaaccaggcaatttcaatggtgtcctattatgcttcatcttcagaacctgctcaagttcgcggtaaaactgtctatatccaatattcaaacaggcaagaaattaccaacaataaaggcactggggattcttctggcaatgtcctacttgtaacttttgaaggcgttcagcctaatgatgttaccatagaagtcattcatttggtattttcggcatttggatttgttcacaagatagctacttttgagaaagcagctggtttccaggcacttatccagtatactgatgccccaactgctcttgaagctaaaaactcattggatggaagaagcatccccaaatatttacttccagaacatatcagtgcctgccacatgcgcataaccttctctgcacataaggatttgaatatcaaatttcagtcgcatcgcagcagggattacaccaatccttaccttcctgtgaaccaaacagcaattgaggggattgtgcaggaaaatttgcagcccactgtaggccctgatgggaagataaaggagcctgagagcaatgtacttttagcatcaattgagaacatgcaatatgctgtgacggtggatgttctgcacactgtgttttctgcttttggtgctgttcaaaaaattgccatgtttgagaagaatggtggaatgcaggctctaattcaatatccagatataacaactgcagccgttgctaaacaagctttggagggacactgcatatatgatggtggttactgctcatgatgatagaagcagagactacactctttcagaccctaatgcgcagctgcaagctgctgcacaggcgccagttataagttctccgggagtggcatggcagaaccctgcatcagcaccagctgctcctttctatggaagcacggcggcttcaactcctgttggacaaccgcctgcttggaaccctaacatgcaggcccctggttttgcatctgcatcgacagcgtaccccaacccaccattaatggccaactccacgccttactatcctgctattggatcaagttcaggtgccccgccggtatcgtttcaggcttcacagcagaggccacagtatggcatgccccctggtgctccaccgcacgcaccaccagctggccaaccaatgtacttccagaaataagtggtttcgattcaatgttatcaaagagcattcacgcatattacctgcaactattgttgtccgcaaatgccatctggaatttttttggaagtgcattgtaactcttgtaacttacgagcgccctacgcaagaataccccaggctggctggctattaaaccgtcaaaaatagttttaacctattagcctgcgtggtatattgttatctcaatgccgagttgttttgatgcctcaagtgtttggaaagaaagtatttcgaaaccgtggttttggaatacagttttaagatgtcacgacatgactgtagtactggaatacagttttaagatgtcatgacatgactgtagtactccctctatagaactgtattttttatatcgttcttaacaatacgtgtttgatgattatctcaaaccatgatatttagtatatatgtgtaagtgatgattatcttaaaccatgatatttagtatatatgtgtaagagtaattatagaaaaactttgggttggag

SEQ ID NO: 39858 - DNA, 2253 bp, Zea Mays
cgccctctcgaccgctcgccggatgcgcctcatgccctcaccaatcatcatcgtcaccttctggattggaaccacggtcacgaagcgcagcccaagccagccccatcccccaccccccatttccccaataggccaaccccgtctccctcctcagcaacgtgctcggtttcttcctccctcgaatcggctgcaccccgtgccgcgatacgaaaacccaccaaaccctaaccctagctgcagtgccactaccgcccgcttgcccggtctccggagaggaagccgacccaagcaacgatgccgtccgggtcagcgacgcaatttcggtacacgcagacgccgtccaaggtgctgcacctgcggaacatgccgtgggaatgcaccgaggaggagctcgtcgagctctgcaaacccttcggcagggtcgtaaacaccatgtgcaacgtcggcgccaaccgtaaccaggcattcgtcgagtttgcagatcaaaaccaggcaatttcaatggtgtcctattatgcttcatcttcagaacctgctcaagttcgcggtaaaactgtctatatccaatattcaaacaggcaagaaattaccaacaataaaggcactggggattcttctggcaatgtcctacttgtaacttttgaaggcgttcagcctaatgatgttaccatagaagtcattcatttggtattttcggcatttggatttgttcacaagatagctacttttgagaaagcagctggtttccagtatactgatgccccaactgctcttgaagctaaaaactcattggatggaagaagcatccccaaatatttacttccagaacatatcagtgcctgccacatgcgcataaccttctctgcacataaggatttgaatatcaaatttcagtcgcatcgcagcagggattacaccaatccttaccttcctgtgaaccaaacagcaattgaggggattgtgcagcccactgtaggccctgatgggaagataaaggagcctgagagcaatgtacttttagcatcaattgagaacatgcaatatgctgtgacggtggatgttctgcacactgtgttttctgcttttggtgctgttcaaaaaattgccatgtttgagaagaatggtggaatgcaggctctaattcaatatccagagaggtgtcggagttcgtgaaggcttaaaatggacatctgcaactttccagagctatagagttgcttttaatataacaactgcagccgttgctaaacaagctttggagggacactgcatatatgatggtggttactgtaagcttcatctgtcatactctcgtcatactgatctcaatgtaaaggctcatgatgatagaagcagagactacactctttcagaccctaatgcgcagctgcaagctgctgcacaggcgccagttataagttctccgggagtggcatggcagaaccctgcatcagcaccagctgctcctttctatggaagcacggcggcttcaactcctgttggacaaccgcctgcttggaaccctaacatgcaggcccctggttttgcatctgcatcgacagcgtaccccaacccaccattaatggccaactccacgccttactatcctgctattggatcaagttcaggtgccccgccggtatcgtttcaggcttcacagcagaggccacagtatggcatgccccctggtgctccaccgcacgcaccaccagctggccaaccaatgtacttccagaaataagtggtttcgattcaatgttatcaaagagcattcacgcatattacctgcaactattgttgtccgcaaatgccatctggaatttttttggaagtgcattgtaactcttgtaacttacgagcgccctacgcaagaataccccaggctggctggctattaaaccgtcaaaaatagttttaacctattagcctgcgtggtatattgttatctcaatgccgagttgttttgatgcctcaagtgtttggaaagaaagtatttcgaaaccgtggttttggaatacagttttaagatgtcacgacatgactgtagtactggaatacagttttaagatgtcatgacatgactgtagtactccctctatagaactgtattttttatatcgttcttaacaatacgtgtttgatgattatctcaaaccatgatatttagtatatatgtgtaagtgatgattatcttaaaccatgatatttagtatatatgtgtaagagtaattatagaaaaactttgggttggag

SEQ ID NO: 39859 - DNA, 2207 bp, Zea Mays
cgccctctcgaccgctcgccggatgcgcctcatgccctcaccaatcatcatcgtcaccttctggattggaaccacggtcacgaagcgcagcccaagccagccccatcccccaccccccatttccccaataggccaaccccgtctccctcctcagcaacgtgctcggtttcttcctccctcgaatcggctgcaccccgtgccgcgatacgaaaacccaccaaaccctaaccctagctgcagtgccactaccgcccgcttgcccggtctccggagaggaagccgacccaagcaacgatgccgtccgggtcagcgacgcaatttcggtacacgcagacgccgtccaaggtgctgcacctgcggaacatgccgtgggaatgcaccgaggaggagctcgtcgagctctgcaaacccttcggcagggtcgtaaacaccatgtgcaacgtcggcgccaaccgtaaccaggcattcgtcgagtttgcagatcaaaaccaggcaatttcaatggtgtcctattatgcttcatcttcagaacctgctcaagttcgcggtaaaactgtctatatccaatattcaaacaggcaagaaattaccaacaataaaggcactggggattcttctggcaatgtcctacttgtaacttttgaaggcgttcagcctaatgatgttaccatagaagtcattcatttggtattttcggcatttggatttgttcacaagatagctacttttgagaaagcagctggtttccaggcacttatccagtatactgatgccccaactgctcttgaagctaaaaactcattggatggaagaagcatccccaaatatttacttccagaacatatcagtgcctgccacatgcgcataaccttctctgcacataaggatttgaatatcaaatttcagtcgcatcgcagcagggattacaccaatccttaccttcctgtgaaccaaacagcaattgaggggattgtgcaggaaaatttgcagcccactgtaggccctgatgggaagataaaggagcctgagagcaatgtacttttagcatcaattgagaacatgcaatatgctgtgacggtggatgttctgcacactgtgttttctgcttttggtgctgttcaaaaaattgccatgtttgagaagaatggtggaatgcaggctctaattcaatatccagatataacaactgcagccgttgctaaacaagctttggagggacactgcatatatgatggtggttactgtaagcttcatctgtcatactctcgtcatactgatctcaatgtaaaggctcatgatgatagaagcagagactacactctttcagaccctaatgcgcagctgcaagctgctgcacaggcgccagttataagttctccgggagtggcatggcagaaccctgcatcagcaccagctgctcctttctatggaagcacggcggcttcaactcctgttggacaaccgcctgcttggaaccctaacatgcaggcccctggttttgcatctgcatcgacagcgtaccccaacccaccattaatggccaactccacgccttactatcctgctattggatcaagttcaggtgccccgccggtatcgtttcaggcttcacagcagaggccacagtatggcatgccccctggtgctccaccgcacgcaccaccagctggccaaccaatgtacttccagaaataagtggtttcgattcaatgttatcaaagagcattcacgcatattacctgcaactattgttgtccgcaaatgccatctggaatttttttggaagtgcattgtaactcttgtaacttacgagcgccctacgcaagaataccccaggctggctggctattaaaccgtcaaaaatagttttaacctattagcctgcgtggtatattgttatctcaatgccgagttgttttgatgcctcaagtgtttggaaagaaagtatttcgaaaccgtggttttggaatacagttttaagatgtcacgacatgactgtagtactggaatacagttttaagatgtcatgacatgactgtagtactccctctatagaactgtattttttatatcgttcttaacaatacgtgtttgatgattatctcaaaccatgatatttagtatatatgtgtaagtgatgattatcttaaaccatgatatttagtatatatgtgtaagagtaattatagaaaaactttgggttggag

SEQ ID NO: 39860 - DNA, 2140 bp, Zea Mays
cgaccgctcgccggatgcgcctcatgccctcaccaatcatcatcgtcaccttctggattggaaccacggtcacgaagcgcagcccaagccagccccatcccccaccccccatttccccaataggccaaccccgtctccctcctcagcaacgtgctcggtttcttcctccctcgaatcggctgcaccccgtgccgcgatacgaaaacccaccaaaccctaaccctagctgcagtgccactaccgcccgcttgcccggtctccggagaggaagccgacccaagcaacgatgccgtccgggtcagcgacgcaatttcggtacacgcagacgccgtccaaggtgctgcacctgcggaacatgccgtgggaatgcaccgaggaggagctcgtcgagctctgcaaacccttcggcagggtcgtaaacaccatgtgcaacgtcggcgccaaccgtaaccaggcattcgtcgagtttgcagatcaaaaccaggcaatttcaatggtgtcctattatgcttcatcttcagaacctgctcaagttcgcggtaaaactgtctatatccaatattcaaacaggcaagaaattaccaacaataaaggcactggggattcttctggcaatgtcctacttgtaacttttgaaggcgttcagcctaatgatgttaccatagaagtcattcatttggtattttcggcatttggatttgttcacaagatagctacttttgagaaagcagctggtttccaggcacttatccagtatactgatgccccaactgctcttgaagctaaaaactcattggatggaagaagcatccccaaatatttacttccagaacatatcagtgcctgccacatgcgcataaccttctctgcacataaggatttgaatatcaaatttcagtcgcatcgcagcagggattacaccaatccttaccttcctgtgaaccaaacagcaattgaggggattgtgcagcccactgtaggccctgatgggaagataaaggagcctgagagcaatgtacttttagcatcaattgagaacatgcaatatgctgtgacggtggatgttctgcacactgtgttttctgcttttggtgctgttcaaaaaattgccatgtttgagaagaatggtggaatgcaggctctaattcaatatccagatataacaactgcagccgttgctaaacaagctttggagggacactgcatatatgatggtggttactgctcatgatgatagaagcagagactacactctttcagaccctaatgcgcagctgcaagctgctgcacaggcgccagttataagttctccgggagtggcatggcagaaccctgcatcagcaccagctgctcctttctatggaagcacggcggcttcaactcctgttggacaaccgcctgcttggaaccctaacatgcaggcccctggttttgcatctgcatcgacagcgtaccccaacccaccattaatggccaactccacgccttactatcctgctattggatcaagttcaggtgccccgccggtatcgtttcaggcttcacagcagaggccacagtatggcatgccccctggtgctccaccgcacgcaccaccagctggccaaccaatgtacttccagaaataagtggtttcgattcaatgttatcaaagagcattcacgcatattacctgcaactattgttgtccgcaaatgccatctggaatttttttggaagtgcattgtaactcttgtaacttacgagcgccctacgcaagaataccccaggctggctggctattaaaccgtcaaaaatagttttaacctattagcctgcgtggtatattgttatctcaatgccgagttgttttgatgcctcaagtgtttggaaagaaagtatttcgaaaccgtggttttggaatacagttttaagatgtcacgacatgactgtagtactggaatacagttttaagatgtcatgacatgactgtagtactccctctatagaactgtattttttatatcgttcttaacaatacgtgtttgatgattatctcaaaccatgatatttagtatatatgtgtaagtgatgattatcttaaaccatgatatttagtatatatgtgtaagagtaattatagaaaaactttgggttggag

SEQ ID NO: 39861 - DNA, 2218 bp, Zea Mays
ggattggaaccacggtcacgaagcgcagcccaagccagccccatcccccaccccccatttccccaataggccaaccccgtctccctcctcagcaacgtgctcggtttcttcctccctcgaatcggctgcaccccgtgccgcgatacgaaaacccaccaaaccctaaccctagctgcagtgccactaccgcccgcttgcccggtctccggagaggaagccgacccaagcaacgatgccgtccgggtcagcgacgcaatttcggtacacgcagacgccgtccaaggtgctgcacctgcggaacatgccgtgggaatgcaccgaggaggagctcgtcgagctctgcaaacccttcggcagggtcgtaaacaccatgtgcaacgtcggcgccaaccgtaaccaggcattcgtcgagtttgcagatcaaaaccaggcaatttcaatggtgtcctattatgcttcatcttcagaacctgctcaagttcgcggtaaaactgtctatatccaatattcaaacaggcaagaaattaccaacaataaaggcactggggattcttctggcaatgtcctacttgtaacttttgaaggcgttcagcctaatgatgttaccatagaagtcattcatttggtattttcggcatttggatttgttcacaagatagctacttttgagaaagcagctggtttccaggcacttatccagtatactgatgccccaactgctcttgaagctaaaaactcattggatggaagaagcatccccaaatatttacttccagaacatatcagtgcctgccacatgcgcataaccttctctgcacataaggatttgaatatcaaatttcagtcgcatcgcagcagggattacaccaatccttaccttcctgtgaaccaaacagcaattgaggggattgtgcaggaaaatttgcagcccactgtaggccctgatgggaagataaaggagcctgagagcaatgtacttttagcatcaattgagaacatgcaatatgctgtgacggtggatgttctgcacactgtgttttctgcttttggtgctgttcaaaaaattgccatgtttgagaagaatggtggaatgcaggctctaattcaatatccagcagagaggtgtcggagttcgtgaaggcttaaaatggacatctgcaactttccagagctatagagttgcttttaatataacaactgcagccgttgctaaacaagctttggagggacactgcatatatgatggtggttactgtaagcttcatctgtcatactctcgtcatactgatctcaatgtaaaggctcatgatgatagaagcagagactacactctttcagaccctaatgcgcagctgcaagctgctgcacaggcgccagttataagttctccgggagtggcatggcagaaccctgcatcagcaccagctgctcctttctatggaagcacggcggcttcaactcctgttggacaaccgcctgcttggaaccctaacatgcaggcccctggttttgcatctgcatcgacagcgtaccccaacccaccattaatggccaactccacgccttactatcctgctattggatcaagttcaggtgccccgccggtatcgtttcaggcttcacagcagaggccacagtatggcatgccccctggtgctccaccgcacgcaccaccagctggccaaccaatgtacttccagaaataagtggtttcgattcaatgttatcaaagagcattcacgcatattacctgcaactattgttgtccgcaaatgccatctggaatttttttggaagtgcattgtaactcttgtaacttacgagcgccctacgcaagaataccccaggctggctggctattaaaccgtcaaaaatagttttaacctattagcctgcgtggtatattgttatctcaatgccgagttgttttgatgcctcaagtgtttggaaagaaagtatttcgaaaccgtggttttggaatacagttttaagatgtcacgacatgactgtagtactggaatacagttttaagatgtcatgacatgactgtagtactccctctatagaactgtattttttatatcgttcttaacaatacgtgtttgatgattatctcaaaccatgatatttagtatatatgtgtaagtgatgattatcttaaaccatgatatttagtatatatgtgtaagagtaattatagaaaaactttgggttggag

SEQ ID NO: 39862 - DNA, 2489 bp, Zea Mays
ggattggaaccacggtcacgaagcgcagcccaagccagccccatcccccaccccccatttccccaataggccaaccccgtctccctcctcagcaacgtgctcggtttcttcctccctcgaatcggctgcaccccgtgccgcgatacgaaaacccaccaaaccctaaccctagctgcagtgccactaccgcccgcttgcccggtctccggagaggaagccgacccaagcaacgatgccgtccgggtcagcgacgcaatttcggtacacgcagacgccgtccaaggtgctgcacctgcggaacatgccgtgggaatgcaccgaggaggagctcgtcgagctctgcaaacccttcggcagggtcgtaaacaccatgtgcaacgtcggcgccaaccgtaaccaggcattcgtcgagtttgcagatcaaaaccaggcaatttcaatggtgtcctattatgcttcatcttcagaacctgctcaagttcgcggtaaaactgtctatatccaatattcaaacaggcaagaaattaccaacaataaaggcactggggattcttctggcaatgtcctacttgtaacttttgaaggcgttcagcctaatgatgttaccatagaagtcattcatttggtattttcggcatttggatttgttcacaagatagctacttttgagaaagcagctggtttccagtatactgatgccccaactgctcttgaagctaaaaactcattggatggaagaagcatccccaaatatttacttccagaacatatcagtgcctgccacatgcgcataaccttctctgcacataaggatttgaatatcaaatttcagtcgcatcgcagcagggattacaccaatccttaccttcctgtgaaccaaacagcaattgaggggattgtgcaggaaaatttgcagcccactgtaggccctgatgggaagataaaggagcctgagagcaatgtacttttagcatcaattgagaacatgcaatatgctgtgacggtggatgttctgcacactgtgttttctgcttttggtgctgttcaaaaaattgccatgtttgagaagaatggtggaatgcaggctctaattcaatatccaggtatatgctcaccagtacgcccaacaggatatgctcttgactttggtacactgtgatacactgaatttattgcattggcacgtcgctgtaacttgcttacacagttgagtgcactttatatgtcttgctccctctgtttgaaagtattgaagtttatagctcttttttagacttggttcagaatgtaccgtgtttatgttctattgttcctgatttttatatcctcccttctctcttcctaactccctctcccatcatttatgagtaaaccggtcatactgttattttcgccctttttgcatcataagtttctaagtttggaaactttagcagagaggtgtcggagttcgtgaaggcttaaaatggacatctgcaactttccagagctatagagttgcttttaatataacaactgcagccgttgctaaacaagctttggagggacactgcatatatgatggtggttactgctcatgatgatagaagcagagactacactctttcagaccctaatgcgcagctgcaagctgctgcacaggcgccagttataagttctccgggagtggcatggcagaaccctgcatcagcaccagctgctcctttctatggaagcacggcggcttcaactcctgttggacaaccgcctgcttggaaccctaacatgcaggcccctggttttgcatctgcatcgacagcgtaccccaacccaccattaatggccaactccacgccttactatcctgctattggatcaagttcaggtgccccgccggtatcgtttcaggcttcacagcagaggccacagtatggcatgccccctggtgctccaccgcacgcaccaccagctggccaaccaatgtacttccagaaataagtggtttcgattcaatgttatcaaagagcattcacgcatattacctgcaactattgttgtccgcaaatgccatctggaatttttttggaagtgcattgtaactcttgtaacttacgagcgccctacgcaagaataccccaggctggctggctattaaaccgtcaaaaatagttttaacctattagcctgcgtggtatattgttatctcaatgccgagttgttttgatgcctcaagtgtttggaaagaaagtatttcgaaaccgtggttttggaatacagttttaagatgtcacgacatgactgtagtactggaatacagttttaagatgtcatgacatgactgtagtactccctctatagaactgtattttttatatcgttcttaacaatacgtgtttgatgattatctcaaaccatgatatttagtatatatgtgtaagtgatgattatcttaaaccatgatatttagtatatatgtgtaagagtaattatagaaaaactttgggttggag

SEQ ID NO: 39863 - DNA, 2123 bp, Zea Mays
ggattggaaccacggtcacgaagcgcagcccaagccagccccatcccccaccccccatttccccaataggccaaccccgtctccctcctcagcaacgtgctcggtttcttcctccctcgaatcggctgcaccccgtgccgcgatacgaaaacccaccaaaccctaaccctagctgcagtgccactaccgcccgcttgcccggtctccggagaggaagccgacccaagcaacgatgccgtccgggtcagcgacgcaatttcggtacacgcagacgccgtccaaggtgctgcacctgcggaacatgccgtgggaatgcaccgaggaggagctcgtcgagctctgcaaacccttcggcagggtcgtaaacaccatgtgcaacgtcggcgccaaccgtaaccaggcattcgtcgagtttgcagatcaaaaccaggcaatttcaatggtgtcctattatgcttcatcttcagaacctgctcaagttcgcggtaaaactgtctatatccaatattcaaacaggcaagaaattaccaacaataaaggcactggggattcttctggcaatgtcctacttgtaacttttgaaggcgttcagcctaatgatgttaccatagaagtcattcatttggtattttcggcatttggatttgttcacaagatagctacttttgagaaagcagctggtttccaggcacttatccagtatactgatgccccaactgctcttgaagctaaaaactcattggatggaagaagcatccccaaatatttacttccagaacatatcagtgcctgccacatgcgcataaccttctctgcacataaggatttgaatatcaaatttcagtcgcatcgcagcagggattacaccaatccttaccttcctgtgaaccaaacagcaattgaggggattgtgcaggccctgatgggaagataaaggagcctgagagcaatgtacttttagcatcaattgagaacatgcaatatgctgtgacggtggatgttctgcacactgtgttttctgcttttggtgctgttcaaaaaattgccatgtttgagaagaatggtggaatgcaggctctaattcaatatccagatataacaactgcagccgttgctaaacaagctttggagggacactgcatatatgatggtggttactgtaagcttcatctgtcatactctcgtcatactgatctcaatgtaaaggctcatgatgatagaagcagagactacactctttcagaccctaatgcgcagctgcaagctgctgcacaggcgccagttataagttctccgggagtggcatggcagaaccctgcatcagcaccagctgctcctttctatggaagcacggcggcttcaactcctgttggacaaccgcctgcttggaaccctaacatgcaggcccctggttttgcatctgcatcgacagcgtaccccaacccaccattaatggccaactccacgccttactatcctgctattggatcaagttcaggtgccccgccggtatcgtttcaggcttcacagcagaggccacagtatggcatgccccctggtgctccaccgcacgcaccaccagctggccaaccaatgtacttccagaaataagtggtttcgattcaatgttatcaaagagcattcacgcatattacctgcaactattgttgtccgcaaatgccatctggaatttttttggaagtgcattgtaactcttgtaacttacgagcgccctacgcaagaataccccaggctggctggctattaaaccgtcaaaaatagttttaacctattagcctgcgtggtatattgttatctcaatgccgagttgttttgatgcctcaagtgtttggaaagaaagtatttcgaaaccgtggttttggaatacagttttaagatgtcacgacatgactgtagtactggaatacagttttaagatgtcatgacatgactgtagtactccctctatagaactgtattttttatatcgttcttaacaatacgtgtttgatgattatctcaaaccatgatatttagtatatatgtgtaagtgatgattatcttaaaccatgatatttagtatatatgtgtaagagtaattatagaaaaactttgggttggag

SEQ ID NO: 39864 - DNA, 2548 bp, Zea Mays
ggattggaaccacggtcacgaagcgcagcccaagccagccccatcccccaccccccatttccccaataggccaaccccgtctccctcctcagcaacgtgctcggtttcttcctccctcgaatcggctgcaccccgtgccgcgatacgaaaacccaccaaaccctaaccctagctgcagtgccactaccgcccgcttgcccggtctccggagaggaagccgacccaagcaacgatgccgtccgggtcagcgacgcaatttcggtacacgcagacgccgtccaaggtgctgcacctgcggaacatgccgtgggaatgcaccgaggaggagctcgtcgagctctgcaaacccttcggcagggtcgtaaacaccatgtgcaacgtcggcgccaaccgtaaccaggcattcgtcgagtttgcagatcaaaaccaggcaatttcaatggtgtcctattatgcttcatcttcagaacctgctcaagttcgcggtaaaactgtctatatccaatattcaaacaggcaagaaattaccaacaataaaggcactggggattcttctggcaatgtcctacttgtaacttttgaaggcgttcagcctaatgatgttaccatagaagtcattcatttggtattttcggcatttggatttgttcacaagatagctacttttgagaaagcagctggtttccaggcacttatccagtatactgatgccccaactgctcttgaagctaaaaactcattggatggaagaagcatccccaaatatttacttccagaacatatcagtgcctgccacatgcgcataaccttctctgcacataaggatttgaatatcaaatttcagtcgcatcgcagcagggattacaccaatccttaccttcctgtgaaccaaacagcaattgaggggattgtgcaggaaaatttgcagcccactgtaggccctgatgggaagataaaggagcctgagagcaatgtacttttagcatcaattgagaacatgcaatatgctgtgacggtggatgttctgcacactgtgttttctgcttttggtgctgttcaaaaaattgccatgtttgagaagaatggtggaatgcaggctctaattcaatatccaggtatatgctcaccagtacgcccaacaggatatgctcttgactttggtacactgtgatacactgaatttattgcattggcacgtcgctgtaacttgcttacacagttgagtgcactttatatgtcttgctccctctgtttgaaagtattgaagtttatagctcttttttagacttggttcagaatgtaccgtgtttatgttctattgttcctgatttttatatcctcccttctctcttcctaactccctctcccatcatttatgagtaaaccggtcatactgttattttcgccctttttgcatcataagtttctaagtttggaaactttagcagagaggtgtcggagttcgtgaaggcttaaaatggacatctgcaactttccagagctatagagttgcttttaatataacaactgcagccgttgctaaacaagctttggagggacactgcatatatgatggtggttactgtaagcttcatctgtcatactctcgtcatactgatctcaatgtaaaggctcatgatgatagaagcagagactacactctttcagaccctaatgcgcagctgcaagctgctgcacaggcgccagttataagttctccgggagtggcatggcagaaccctgcatcagcaccagctgctcctttctatggaagcacggcggcttcaactcctgttggacaaccgcctgcttggaaccctaacatgcaggcccctggttttgcatctgcatcgacagcgtaccccaacccaccattaatggccaactccacgccttactatcctgctattggatcaagttcaggtgccccgccggtatcgtttcaggcttcacagcagaggccacagtatggcatgccccctggtgctccaccgcacgcaccaccagctggccaaccaatgtacttccagaaataagtggtttcgattcaatgttatcaaagagcattcacgcatattacctgcaactattgttgtccgcaaatgccatctggaatttttttggaagtgcattgtaactcttgtaacttacgagcgccctacgcaagaataccccaggctggctggctattaaaccgtcaaaaatagttttaacctattagcctgcgtggtatattgttatctcaatgccgagttgttttgatgcctcaagtgtttggaaagaaagtatttcgaaaccgtggttttggaatacagttttaagatgtcacgacatgactgtagtactggaatacagttttaagatgtcatgacatgactgtagtactccctctatagaactgtattttttatatcgttcttaacaatacgtgtttgatgattatctcaaaccatgatatttagtatatatgtgtaagtgatgattatcttaaaccatgatatttagtatatatgtgtaagagtaattatagaaaaactttgggttggag

SEQ ID NO: 39865 - DNA, 3003 bp, Zea Mays
ggattggaaccacggtcacgaagcgcagcccaagccagccccatcccccaccccccatttccccaataggccaaccccgtctccctcctcagcaacgtgctcggtttcttcctccctcgaatcggctgcaccccgtgccgcgatacgaaaacccaccaaaccctaaccctagctgcagtgccactaccgcccgcttgcccggtctccggagaggaagccgacccaagcaacgatgccgtccgggtcagcgacgcaatttcggtacacgcagacgccgtccaaggtgctgcacctgcggaacatgccgtgggaatgcaccgaggaggagctcgtcgagctctgcaaacccttcggcagggtcgtaaacaccatgtgcaacgtcggcgccaaccgtaaccaggcattcgtcgagtttgcagatcaaaaccaggcaatttcaatggtgtcctattatgcttcatcttcagaacctgctcaagttcgcggtaaaactgtctatatccaatattcaaacaggcaagaaattaccaacaataaaggcactggggattcttctggcaatgtcctacttgtaacttttgaaggcgttcagcctaatgatgttaccatagaagtcattcatttggtattttcggcatttggatttgttcacaagatagctacttttgagaaagcagctggtttccaggcacttatccagtatactgatgccccaactgctcttgaagctaaaaactcattggatggaagaagcatccccaaatatttacttccagaacatatcagtgcctgccacatgcgcataaccttctctgcacataaggatttgaatatcaaatttcagtcgcatcgcagcagggattacaccaatccttaccttcctgtgaaccaaacagcaattgaggggattgtgcagcccactgtaggccctgatgggaagataaaggagcctgagagcaatgtacttttagcatcaattgagaacatgcaatatgctgtgacggtggatgttctgcacactgtgttttctgcttttggtgctgttcaaaaaattgccatgtttgagaagaatggtggaatgcaggctctaattcaatatccaggtatatgctcaccagtacgcccaacaggatatgctcttgactttggtacactgtgatacactgaatttattgcattggcacgtcgctgtaacttgcttacacagttgagtgcactttatatgtcttgctccctctgtttgaaagtattgaagtttatagctcttttttagacttggttcagaatgtaccgtgtttatgttctattgttcctgatttttatatcctcccttctctcttcctaactccctctcccatcatttatgagtaaaccggtcatactgttattttcgccctttttgcatcataagtttctaagtttggaaactttagcagagaggtgtcggagttcgtgaaggcttaaaatggacatctgcaactttccagagctatagagttgcttttagtaatactctctttcttactagaggcttgcttcaaacttttattttgtcatcactgcatttcccttgtgacatacgtcaaggtcctgattaagtatctttacctgtttaatgtgttgggcattagagcaatagtctgcacctttatatcattggttctgttgttgcaaaaccatctttacctttacatctaatttgtgggccttatctagcctattgaaataaatatctcaaaaagtatgataattcaaattgcattcatctcattggtgctcggtgctgtttgtactggttagtggtgtagctgtaattgtactgctttgatgaaacaagaagttctgaatactctttcacccacacttctgacattatgaccctggagtcaagagtatctcaatatttattctttatgggcaagtggtattgctaattctgtttcccccttggccatggtactatagcattaatattgatggacaaatacatagtcatctgactagcaaaatctttttttagatataacaactgcagccgttgctaaacaagctttggagggacactgcatatatgatggtggttactgctcatgatgatagaagcagagactacactctttcagaccctaatgcgcagctgcaagctgctgcacaggcgccagttataagttctccgggagtggcatggcagaaccctgcatcagcaccagctgctcctttctatggaagcacggcggcttcaactcctgttggacaaccgcctgcttggaaccctaacatgcaggcccctggttttgcatctgcatcgacagcgtaccccaacccaccattaatggccaactccacgccttactatcctgctattggatcaagttcaggtgccccgccggtatcgtttcaggcttcacagcagaggccacagtatggcatgccccctggtgctccaccgcacgcaccaccagctggccaaccaatgtacttccagaaataagtggtttcgattcaatgttatcaaagagcattcacgcatattacctgcaactattgttgtccgcaaatgccatctggaatttttttggaagtgcattgtaactcttgtaacttacgagcgccctacgcaagaataccccaggctggctggctattaaaccgtcaaaaatagttttaacctattagcctgcgtggtatattgttatctcaatgccgagttgttttgatgcctcaagtgtttggaaagaaagtatttcgaaaccgtggttttggaatacagttttaagatgtcacgacatgactgtagtactggaatacagttttaagatgtcatgacatgactgtagtactccctctatagaactgtattttttatatcgttcttaacaatacgtgtttgatgattatctcaaaccatgatatttagtatatatgtgtaagtgatgattatcttaaaccatgatatttagtatatatgtgtaagagtaattatagaaaaactttgggttggag

SEQ ID NO: 39866 - DNA, 3038 bp, Zea Mays
ggattggaaccacggtcacgaagcgcagcccaagccagccccatcccccaccccccatttccccaataggccaaccccgtctccctcctcagcaacgtgctcggtttcttcctccctcgaatcggctgcaccccgtgccgcgatacgaaaacccaccaaaccctaaccctagctgcagtgccactaccgcccgcttgcccggtctccggagaggaagccgacccaagcaacgatgccgtccgggtcagcgacgcaatttcggtacacgcagacgccgtccaaggtgctgcacctgcggaacatgccgtgggaatgcaccgaggaggagctcgtcgagctctgcaaacccttcggcagggtcgtaaacaccatgtgcaacgtcggcgccaaccgtaaccaggcattcgtcgagtttgcagatcaaaaccaggcaatttcaatggtgtcctattatgcttcatcttcagaacctgctcaagttcgcggtaaaactgtctatatccaatattcaaacaggcaagaaattaccaacaataaaggcactggggattcttctggcaatgtcctacttgtaacttttgaaggcgttcagcctaatgatgttaccatagaagtcattcatttggtattttcggcatttggatttgttcacaagatagctacttttgagaaagcagctggtttccagtatactgatgccccaactgctcttgaagctaaaaactcattggatggaagaagcatccccaaatatttacttccagaacatatcagtgcctgccacatgcgcataaccttctctgcacataaggatttgaatatcaaatttcagtcgcatcgcagcagggattacaccaatccttaccttcctgtgaaccaaacagcaattgaggggattgtgcagcccactgtaggccctgatgggaagataaaggagcctgagagcaatgtacttttagcatcaattgagaacatgcaatatgctgtgacggtggatgttctgcacactgtgttttctgcttttggtgctgttcaaaaaattgccatgtttgagaagaatggtggaatgcaggctctaattcaatatccaggtatatgctcaccagtacgcccaacaggatatgctcttgactttggtacactgtgatacactgaatttattgcattggcacgtcgctgtaacttgcttacacagttgagtgcactttatatgtcttgctccctctgtttgaaagtattgaagtttatagctcttttttagacttggttcagaatgtaccgtgtttatgttctattgttcctgatttttatatcctcccttctctcttcctaactccctctcccatcatttatgagtaaaccggtcatactgttattttcgccctttttgcatcataagtttctaagtttggaaactttagcagagaggtgtcggagttcgtgaaggcttaaaatggacatctgcaactttccagagctatagagttgcttttagtaatactctctttcttactagaggcttgcttcaaacttttattttgtcatcactgcatttcccttgtgacatacgtcaaggtcctgattaagtatctttacctgtttaatgtgttgggcattagagcaatagtctgcacctttatatcattggttctgttgttgcaaaaccatctttacctttacatctaatttgtgggccttatctagcctattgaaataaatatctcaaaaagtatgataattcaaattgcattcatctcattggtgctcggtgctgtttgtactggttagtggtgtagctgtaattgtactgctttgatgaaacaagaagttctgaatactctttcacccacacttctgacattatgaccctggagtcaagagtatctcaatatttattctttatgggcaagtggtattgctaattctgtttcccccttggccatggtactatagcattaatattgatggacaaatacatagtcatctgactagcaaaatctttttttagatataacaactgcagccgttgctaaacaagctttggagggacactgcatatatgatggtggttactgtaagcttcatctgtcatactctcgtcatactgatctcaatgtaaaggctcatgatgatagaagcagagactacactctttcagaccctaatgcgcagctgcaagctgctgcacaggcgccagttataagttctccgggagtggcatggcagaaccctgcatcagcaccagctgctcctttctatggaagcacggcggcttcaactcctgttggacaaccgcctgcttggaaccctaacatgcaggcccctggttttgcatctgcatcgacagcgtaccccaacccaccattaatggccaactccacgccttactatcctgctattggatcaagttcaggtgccccgccggtatcgtttcaggcttcacagcagaggccacagtatggcatgccccctggtgctccaccgcacgcaccaccagctggccaaccaatgtacttccagaaataagtggtttcgattcaatgttatcaaagagcattcacgcatattacctgcaactattgttgtccgcaaatgccatctggaatttttttggaagtgcattgtaactcttgtaacttacgagcgccctacgcaagaataccccaggctggctggctattaaaccgtcaaaaatagttttaacctattagcctgcgtggtatattgttatctcaatgccgagttgttttgatgcctcaagtgtttggaaagaaagtatttcgaaaccgtggttttggaatacagttttaagatgtcacgacatgactgtagtactggaatacagttttaagatgtcatgacatgactgtagtactccctctatagaactgtattttttatatcgttcttaacaatacgtgtttgatgattatctcaaaccatgatatttagtatatatgtgtaagtgatgattatcttaaaccatgatatttagtatatatgtgtaagagtaattatagaaaaactttgggttggag

SEQ ID NO: 39867 - DNA, 3050 bp, Zea Mays
ggattggaaccacggtcacgaagcgcagcccaagccagccccatcccccaccccccatttccccaataggccaaccccgtctccctcctcagcaacgtgctcggtttcttcctccctcgaatcggctgcaccccgtgccgcgatacgaaaacccaccaaaccctaaccctagctgcagtgccactaccgcccgcttgcccggtctccggagaggaagccgacccaagcaacgatgccgtccgggtcagcgacgcaatttcggtacacgcagacgccgtccaaggtgctgcacctgcggaacatgccgtgggaatgcaccgaggaggagctcgtcgagctctgcaaacccttcggcagggtcgtaaacaccatgtgcaacgtcggcgccaaccgtaaccaggcattcgtcgagtttgcagatcaaaaccaggcaatttcaatggtgtcctattatgcttcatcttcagaacctgctcaagttcgcggtaaaactgtctatatccaatattcaaacaggcaagaaattaccaacaataaaggcactggggattcttctggcaatgtcctacttgtaacttttgaaggcgttcagcctaatgatgttaccatagaagtcattcatttggtattttcggcatttggatttgttcacaagatagctacttttgagaaagcagctggtttccagtatactgatgccccaactgctcttgaagctaaaaactcattggatggaagaagcatccccaaatatttacttccagaacatatcagtgcctgccacatgcgcataaccttctctgcacataaggatttgaatatcaaatttcagtcgcatcgcagcagggattacaccaatccttaccttcctgtgaaccaaacagcaattgaggggattgtgcaggaaaatttgcagcccactgtaggccctgatgggaagataaaggagcctgagagcaatgtacttttagcatcaattgagaacatgcaatatgctgtgacggtggatgttctgcacactgtgttttctgcttttggtgctgttcaaaaaattgccatgtttgagaagaatggtggaatgcaggctctaattcaatatccaggtatatgctcaccagtacgcccaacaggatatgctcttgactttggtacactgtgatacactgaatttattgcattggcacgtcgctgtaacttgcttacacagttgagtgcactttatatgtcttgctccctctgtttgaaagtattgaagtttatagctcttttttagacttggttcagaatgtaccgtgtttatgttctattgttcctgatttttatatcctcccttctctcttcctaactccctctcccatcatttatgagtaaaccggtcatactgttattttcgccctttttgcatcataagtttctaagtttggaaactttagcagagaggtgtcggagttcgtgaaggcttaaaatggacatctgcaactttccagagctatagagttgcttttagtaatactctctttcttactagaggcttgcttcaaacttttattttgtcatcactgcatttcccttgtgacatacgtcaaggtcctgattaagtatctttacctgtttaatgtgttgggcattagagcaatagtctgcacctttatatcattggttctgttgttgcaaaaccatctttacctttacatctaatttgtgggccttatctagcctattgaaataaatatctcaaaaagtatgataattcaaattgcattcatctcattggtgctcggtgctgtttgtactggttagtggtgtagctgtaattgtactgctttgatgaaacaagaagttctgaatactctttcacccacacttctgacattatgaccctggagtcaagagtatctcaatatttattctttatgggcaagtggtattgctaattctgtttcccccttggccatggtactatagcattaatattgatggacaaatacatagtcatctgactagcaaaatctttttttagatataacaactgcagccgttgctaaacaagctttggagggacactgcatatatgatggtggttactgtaagcttcatctgtcatactctcgtcatactgatctcaatgtaaaggctcatgatgatagaagcagagactacactctttcagaccctaatgcgcagctgcaagctgctgcacaggcgccagttataagttctccgggagtggcatggcagaaccctgcatcagcaccagctgctcctttctatggaagcacggcggcttcaactcctgttggacaaccgcctgcttggaaccctaacatgcaggcccctggttttgcatctgcatcgacagcgtaccccaacccaccattaatggccaactccacgccttactatcctgctattggatcaagttcaggtgccccgccggtatcgtttcaggcttcacagcagaggccacagtatggcatgccccctggtgctccaccgcacgcaccaccagctggccaaccaatgtacttccagaaataagtggtttcgattcaatgttatcaaagagcattcacgcatattacctgcaactattgttgtccgcaaatgccatctggaatttttttggaagtgcattgtaactcttgtaacttacgagcgccctacgcaagaataccccaggctggctggctattaaaccgtcaaaaatagttttaacctattagcctgcgtggtatattgttatctcaatgccgagttgttttgatgcctcaagtgtttggaaagaaagtatttcgaaaccgtggttttggaatacagttttaagatgtcacgacatgactgtagtactggaatacagttttaagatgtcatgacatgactgtagtactccctctatagaactgtattttttatatcgttcttaacaatacgtgtttgatgattatctcaaaccatgatatttagtatatatgtgtaagtgatgattatcttaaaccatgatatttagtatatatgtgtaagagtaattatagaaaaactttgggttggag

SEQ ID NO: 39868 - DNA, 3015 bp, Zea Mays
ggattggaaccacggtcacgaagcgcagcccaagccagccccatcccccaccccccatttccccaataggccaaccccgtctccctcctcagcaacgtgctcggtttcttcctccctcgaatcggctgcaccccgtgccgcgatacgaaaacccaccaaaccctaaccctagctgcagtgccactaccgcccgcttgcccggtctccggagaggaagccgacccaagcaacgatgccgtccgggtcagcgacgcaatttcggtacacgcagacgccgtccaaggtgctgcacctgcggaacatgccgtgggaatgcaccgaggaggagctcgtcgagctctgcaaacccttcggcagggtcgtaaacaccatgtgcaacgtcggcgccaaccgtaaccaggcattcgtcgagtttgcagatcaaaaccaggcaatttcaatggtgtcctattatgcttcatcttcagaacctgctcaagttcgcggtaaaactgtctatatccaatattcaaacaggcaagaaattaccaacaataaaggcactggggattcttctggcaatgtcctacttgtaacttttgaaggcgttcagcctaatgatgttaccatagaagtcattcatttggtattttcggcatttggatttgttcacaagatagctacttttgagaaagcagctggtttccaggcacttatccagtatactgatgccccaactgctcttgaagctaaaaactcattggatggaagaagcatccccaaatatttacttccagaacatatcagtgcctgccacatgcgcataaccttctctgcacataaggatttgaatatcaaatttcagtcgcatcgcagcagggattacaccaatccttaccttcctgtgaaccaaacagcaattgaggggattgtgcaggaaaatttgcagcccactgtaggccctgatgggaagataaaggagcctgagagcaatgtacttttagcatcaattgagaacatgcaatatgctgtgacggtggatgttctgcacactgtgttttctgcttttggtgctgttcaaaaaattgccatgtttgagaagaatggtggaatgcaggctctaattcaatatccaggtatatgctcaccagtacgcccaacaggatatgctcttgactttggtacactgtgatacactgaatttattgcattggcacgtcgctgtaacttgcttacacagttgagtgcactttatatgtcttgctccctctgtttgaaagtattgaagtttatagctcttttttagacttggttcagaatgtaccgtgtttatgttctattgttcctgatttttatatcctcccttctctcttcctaactccctctcccatcatttatgagtaaaccggtcatactgttattttcgccctttttgcatcataagtttctaagtttggaaactttagcagagaggtgtcggagttcgtgaaggcttaaaatggacatctgcaactttccagagctatagagttgcttttagtaatactctctttcttactagaggcttgcttcaaacttttattttgtcatcactgcatttcccttgtgacatacgtcaaggtcctgattaagtatctttacctgtttaatgtgttgggcattagagcaatagtctgcacctttatatcattggttctgttgttgcaaaaccatctttacctttacatctaatttgtgggccttatctagcctattgaaataaatatctcaaaaagtatgataattcaaattgcattcatctcattggtgctcggtgctgtttgtactggttagtggtgtagctgtaattgtactgctttgatgaaacaagaagttctgaatactctttcacccacacttctgacattatgaccctggagtcaagagtatctcaatatttattctttatgggcaagtggtattgctaattctgtttcccccttggccatggtactatagcattaatattgatggacaaatacatagtcatctgactagcaaaatctttttttagatataacaactgcagccgttgctaaacaagctttggagggacactgcatatatgatggtggttactgctcatgatgatagaagcagagactacactctttcagaccctaatgcgcagctgcaagctgctgcacaggcgccagttataagttctccgggagtggcatggcagaaccctgcatcagcaccagctgctcctttctatggaagcacggcggcttcaactcctgttggacaaccgcctgcttggaaccctaacatgcaggcccctggttttgcatctgcatcgacagcgtaccccaacccaccattaatggccaactccacgccttactatcctgctattggatcaagttcaggtgccccgccggtatcgtttcaggcttcacagcagaggccacagtatggcatgccccctggtgctccaccgcacgcaccaccagctggccaaccaatgtacttccagaaataagtggtttcgattcaatgttatcaaagagcattcacgcatattacctgcaactattgttgtccgcaaatgccatctggaatttttttggaagtgcattgtaactcttgtaacttacgagcgccctacgcaagaataccccaggctggctggctattaaaccgtcaaaaatagttttaacctattagcctgcgtggtatattgttatctcaatgccgagttgttttgatgcctcaagtgtttggaaagaaagtatttcgaaaccgtggttttggaatacagttttaagatgtcacgacatgactgtagtactggaatacagttttaagatgtcatgacatgactgtagtactccctctatagaactgtattttttatatcgttcttaacaatacgtgtttgatgattatctcaaaccatgatatttagtatatatgtgtaagtgatgattatcttaaaccatgatatttagtatatatgtgtaagagtaattatagaaaaactttgggttggag

SEQ ID NO: 39869 - DNA, 3050 bp, Zea Mays
ggattggaaccacggtcacgaagcgcagcccaagccagccccatcccccaccccccatttccccaataggccaaccccgtctccctcctcagcaacgtgctcggtttcttcctccctcgaatcggctgcaccccgtgccgcgatacgaaaacccaccaaaccctaaccctagctgcagtgccactaccgcccgcttgcccggtctccggagaggaagccgacccaagcaacgatgccgtccgggtcagcgacgcaatttcggtacacgcagacgccgtccaaggtgctgcacctgcggaacatgccgtgggaatgcaccgaggaggagctcgtcgagctctgcaaacccttcggcagggtcgtaaacaccatgtgcaacgtcggcgccaaccgtaaccaggcattcgtcgagtttgcagatcaaaaccaggcaatttcaatggtgtcctattatgcttcatcttcagaacctgctcaagttcgcggtaaaactgtctatatccaatattcaaacaggcaagaaattaccaacaataaaggcactggggattcttctggcaatgtcctacttgtaacttttgaaggcgttcagcctaatgatgttaccatagaagtcattcatttggtattttcggcatttggatttgttcacaagatagctacttttgagaaagcagctggtttccaggcacttatccagtatactgatgccccaactgctcttgaagctaaaaactcattggatggaagaagcatccccaaatatttacttccagaacatatcagtgcctgccacatgcgcataaccttctctgcacataaggatttgaatatcaaatttcagtcgcatcgcagcagggattacaccaatccttaccttcctgtgaaccaaacagcaattgaggggattgtgcagcccactgtaggccctgatgggaagataaaggagcctgagagcaatgtacttttagcatcaattgagaacatgcaatatgctgtgacggtggatgttctgcacactgtgttttctgcttttggtgctgttcaaaaaattgccatgtttgagaagaatggtggaatgcaggctctaattcaatatccaggtatatgctcaccagtacgcccaacaggatatgctcttgactttggtacactgtgatacactgaatttattgcattggcacgtcgctgtaacttgcttacacagttgagtgcactttatatgtcttgctccctctgtttgaaagtattgaagtttatagctcttttttagacttggttcagaatgtaccgtgtttatgttctattgttcctgatttttatatcctcccttctctcttcctaactccctctcccatcatttatgagtaaaccggtcatactgttattttcgccctttttgcatcataagtttctaagtttggaaactttagcagagaggtgtcggagttcgtgaaggcttaaaatggacatctgcaactttccagagctatagagttgcttttagtaatactctctttcttactagaggcttgcttcaaacttttattttgtcatcactgcatttcccttgtgacatacgtcaaggtcctgattaagtatctttacctgtttaatgtgttgggcattagagcaatagtctgcacctttatatcattggttctgttgttgcaaaaccatctttacctttacatctaatttgtgggccttatctagcctattgaaataaatatctcaaaaagtatgataattcaaattgcattcatctcattggtgctcggtgctgtttgtactggttagtggtgtagctgtaattgtactgctttgatgaaacaagaagttctgaatactctttcacccacacttctgacattatgaccctggagtcaagagtatctcaatatttattctttatgggcaagtggtattgctaattctgtttcccccttggccatggtactatagcattaatattgatggacaaatacatagtcatctgactagcaaaatctttttttagatataacaactgcagccgttgctaaacaagctttggagggacactgcatatatgatggtggttactgtaagcttcatctgtcatactctcgtcatactgatctcaatgtaaaggctcatgatgatagaagcagagactacactctttcagaccctaatgcgcagctgcaagctgctgcacaggcgccagttataagttctccgggagtggcatggcagaaccctgcatcagcaccagctgctcctttctatggaagcacggcggcttcaactcctgttggacaaccgcctgcttggaaccctaacatgcaggcccctggttttgcatctgcatcgacagcgtaccccaacccaccattaatggccaactccacgccttactatcctgctattggatcaagttcaggtgccccgccggtatcgtttcaggcttcacagcagaggccacagtatggcatgccccctggtgctccaccgcacgcaccaccagctggccaaccaatgtacttccagaaataagtggtttcgattcaatgttatcaaagagcattcacgcatattacctgcaactattgttgtccgcaaatgccatctggaatttttttggaagtgcattgtaactcttgtaacttacgagcgccctacgcaagaataccccaggctggctggctattaaaccgtcaaaaatagttttaacctattagcctgcgtggtatattgttatctcaatgccgagttgttttgatgcctcaagtgtttggaaagaaagtatttcgaaaccgtggttttggaatacagttttaagatgtcacgacatgactgtagtactggaatacagttttaagatgtcatgacatgactgtagtactccctctatagaactgtattttttatatcgttcttaacaatacgtgtttgatgattatctcaaaccatgatatttagtatatatgtgtaagtgatgattatcttaaaccatgatatttagtatatatgtgtaagagtaattatagaaaaactttgggttggag

SEQ ID NO: 39870 - DNA, 2168 bp, Zea Mays
ggattggaaccacggtcacgaagcgcagcccaagccagccccatcccccaccccccatttccccaataggccaaccccgtctccctcctcagcaacgtgctcggtttcttcctccctcgaatcggctgcaccccgtgccgcgatacgaaaacccaccaaaccctaaccctagctgcagtgccactaccgcccgcttgcccggtctccggagaggaagccgacccaagcaacgatgccgtccgggtcagcgacgcaatttcggtacacgcagacgccgtccaaggtgctgcacctgcggaacatgccgtgggaatgcaccgaggaggagctcgtcgagctctgcaaacccttcggcagggtcgtaaacaccatgtgcaacgtcggcgccaaccgtaaccaggcattcgtcgagtttgcagatcaaaaccaggcaatttcaatggtgtcctattatgcttcatcttcagaacctgctcaagttcgcggtaaaactgtctatatccaatattcaaacaggcaagaaattaccaacaataaaggcactggggattcttctggcaatgtcctacttgtaacttttgaaggcgttcagcctaatgatgttaccatagaagtcattcatttggtattttcggcatttggatttgttcacaagatagctacttttgagaaagcagctggtttccaggcacttatccagtatactgatgccccaactgctcttgaagctaaaaactcattggatggaagaagcatccccaaatatttacttccagaacatatcagtgcctgccacatgcgcataaccttctctgcacataaggatttgaatatcaaatttcagtcgcatcgcagcagggattacaccaatccttaccttcctgtgaaccaaacagcaattgaggggattgtgcaggaaaatttgcagcccactgtaggccctgatgggaagataaaggagcctgagagcaatgtacttttagcatcaattgagaacatgcaatatgctgtgacggtggatgttctgcacactgtgttttctgcttttggtgctgttcaaaaaattgccatgtttgagaagaatggtggaatgcaggctctaattcaatatccagagaggtgtcggagttcgtgaaggcttaaaatggacatctgcaactttccagagctatagagttgcttttaatataacaactgcagccgttgctaaacaagctttggagggacactgcatatatgatggtggttactgctcatgatgatagaagcagagactacactctttcagaccctaatgcgcagctgcaagctgctgcacaggcgccagttataagttctccgggagtggcatggcagaaccctgcatcagcaccagctgctcctttctatggaagcacggcggcttcaactcctgttggacaaccgcctgcttggaaccctaacatgcaggcccctggttttgcatctgcatcgacagcgtaccccaacccaccattaatggccaactccacgccttactatcctgctattggatcaagttcaggtgccccgccggtatcgtttcaggcttcacagcagaggccacagtatggcatgccccctggtgctccaccgcacgcaccaccagctggccaaccaatgtacttccagaaataagtggtttcgattcaatgttatcaaagagcattcacgcatattacctgcaactattgttgtccgcaaatgccatctggaatttttttggaagtgcattgtaactcttgtaacttacgagcgccctacgcaagaataccccaggctggctggctattaaaccgtcaaaaatagttttaacctattagcctgcgtggtatattgttatctcaatgccgagttgttttgatgcctcaagtgtttggaaagaaagtatttcgaaaccgtggttttggaatacagttttaagatgtcacgacatgactgtagtactggaatacagttttaagatgtcatgacatgactgtagtactccctctatagaactgtattttttatatcgttcttaacaatacgtgtttgatgattatctcaaaccatgatatttagtatatatgtgtaagtgatgattatcttaaaccatgatatttagtatatatgtgtaagagtaattatagaaaaactttgggttggag

SEQ ID NO: 39871 - DNA, 2991 bp, Zea Mays
ggattggaaccacggtcacgaagcgcagcccaagccagccccatcccccaccccccatttccccaataggccaaccccgtctccctcctcagcaacgtgctcggtttcttcctccctcgaatcggctgcaccccgtgccgcgatacgaaaacccaccaaaccctaaccctagctgcagtgccactaccgcccgcttgcccggtctccggagaggaagccgacccaagcaacgatgccgtccgggtcagcgacgcaatttcggtacacgcagacgccgtccaaggtgctgcacctgcggaacatgccgtgggaatgcaccgaggaggagctcgtcgagctctgcaaacccttcggcagggtcgtaaacaccatgtgcaacgtcggcgccaaccgtaaccaggcattcgtcgagtttgcagatcaaaaccaggcaatttcaatggtgtcctattatgcttcatcttcagaacctgctcaagttcgcggtaaaactgtctatatccaatattcaaacaggcaagaaattaccaacaataaaggcactggggattcttctggcaatgtcctacttgtaacttttgaaggcgttcagcctaatgatgttaccatagaagtcattcatttggtattttcggcatttggatttgttcacaagatagctacttttgagaaagcagctggtttccagtatactgatgccccaactgctcttgaagctaaaaactcattggatggaagaagcatccccaaatatttacttccagaacatatcagtgcctgccacatgcgcataaccttctctgcacataaggatttgaatatcaaatttcagtcgcatcgcagcagggattacaccaatccttaccttcctgtgaaccaaacagcaattgaggggattgtgcagcccactgtaggccctgatgggaagataaaggagcctgagagcaatgtacttttagcatcaattgagaacatgcaatatgctgtgacggtggatgttctgcacactgtgttttctgcttttggtgctgttcaaaaaattgccatgtttgagaagaatggtggaatgcaggctctaattcaatatccaggtatatgctcaccagtacgcccaacaggatatgctcttgactttggtacactgtgatacactgaatttattgcattggcacgtcgctgtaacttgcttacacagttgagtgcactttatatgtcttgctccctctgtttgaaagtattgaagtttatagctcttttttagacttggttcagaatgtaccgtgtttatgttctattgttcctgatttttatatcctcccttctctcttcctaactccctctcccatcatttatgagtaaaccggtcatactgttattttcgccctttttgcatcataagtttctaagtttggaaactttagcagagaggtgtcggagttcgtgaaggcttaaaatggacatctgcaactttccagagctatagagttgcttttagtaatactctctttcttactagaggcttgcttcaaacttttattttgtcatcactgcatttcccttgtgacatacgtcaaggtcctgattaagtatctttacctgtttaatgtgttgggcattagagcaatagtctgcacctttatatcattggttctgttgttgcaaaaccatctttacctttacatctaatttgtgggccttatctagcctattgaaataaatatctcaaaaagtatgataattcaaattgcattcatctcattggtgctcggtgctgtttgtactggttagtggtgtagctgtaattgtactgctttgatgaaacaagaagttctgaatactctttcacccacacttctgacattatgaccctggagtcaagagtatctcaatatttattctttatgggcaagtggtattgctaattctgtttcccccttggccatggtactatagcattaatattgatggacaaatacatagtcatctgactagcaaaatctttttttagatataacaactgcagccgttgctaaacaagctttggagggacactgcatatatgatggtggttactgctcatgatgatagaagcagagactacactctttcagaccctaatgcgcagctgcaagctgctgcacaggcgccagttataagttctccgggagtggcatggcagaaccctgcatcagcaccagctgctcctttctatggaagcacggcggcttcaactcctgttggacaaccgcctgcttggaaccctaacatgcaggcccctggttttgcatctgcatcgacagcgtaccccaacccaccattaatggccaactccacgccttactatcctgctattggatcaagttcaggtgccccgccggtatcgtttcaggcttcacagcagaggccacagtatggcatgccccctggtgctccaccgcacgcaccaccagctggccaaccaatgtacttccagaaataagtggtttcgattcaatgttatcaaagagcattcacgcatattacctgcaactattgttgtccgcaaatgccatctggaatttttttggaagtgcattgtaactcttgtaacttacgagcgccctacgcaagaataccccaggctggctggctattaaaccgtcaaaaatagttttaacctattagcctgcgtggtatattgttatctcaatgccgagttgttttgatgcctcaagtgtttggaaagaaagtatttcgaaaccgtggttttggaatacagttttaagatgtcacgacatgactgtagtactggaatacagttttaagatgtcatgacatgactgtagtactccctctatagaactgtattttttatatcgttcttaacaatacgtgtttgatgattatctcaaaccatgatatttagtatatatgtgtaagtgatgattatcttaaaccatgatatttagtatatatgtgtaagagtaattatagaaaaactttgggttggag

SEQ ID NO: 39872 - DNA, 1796 bp, Zea Mays
tgcatttggaatatgctgttctagcttgatattctaaggcagatcaaaaccaggcaatttcaatggtgtcctattatgcttcatcttcagaacctgctcaagttcgcggtaaaactgtctatatccaatattcaaacaggcaagaaattaccaacaataaaggcactggggattcttctggcaatgtcctacttgtaacttttgaaggcgttcagcctaatgatgttaccatagaagtcattcatttggtattttcggcatttggatttgttcacaagatagctacttttgagaaagcagctggtttccaggtaatgtgttcttctgccaatttgcttacacactattctattctacattgagcttaacggtcagacttttgacaggcacttatccagtatactgatgccccaactgctcttgaagctaaaaactcattggatggaagaagcatccccaaatatttacttccagaacatatcagtgcctgccacatgcgcataaccttctctgcacataaggatttgaatatcaaatttcagtcgcatcgcagcagggattacaccaatccttaccttcctgtgaaccaaacagcaattgaggggattgtgcaggaaaatttgcagcccactgtaggccctgatgggaagataaaggagcctgagagcaatgtacttttagcatcaattgagaacatgcaatatgctgtgacggtggatgttctgcacactgtgttttctgcttttggtgctgttcaaaaaattgccatgtttgagaagaatggtggaatgcaggctctaattcaatatccagatataacaactgcagccgttgctaaacaagctttggagggacactgcatatatgatggtggttactgctcatgatgatagaagcagagactacactctttcagaccctaatgcgcagctgcaagctgctgcacaggcgccagttataagttctccgggagtggcatggcagaaccctgcatcagcaccagctgctcctttctatggaagcacggcggcttcaactcctgttggacaaccgcctgcttggaaccctaacatgcaggcccctggttttgcatctgcatcgacagcgtaccccaacccaccattaatggccaactccacgccttactatcctgctattggatcaagttcaggtgccccgccggtatcgtttcaggcttcacagcagaggccacagtatggcatgccccctggtgctccaccgcacgcaccaccagctggccaaccaatgtacttccagaaataagtggtttcgattcaatgttatcaaagagcattcacgcatattacctgcaactattgttgtccgcaaatgccatctggaatttttttggaagtgcattgtaactcttgtaacttacgagcgccctacgcaagaataccccaggctggctggctattaaaccgtcaaaaatagttttaacctattagcctgcgtggtatattgttatctcaatgccgagttgttttgatgcctcaagtgtttggaaagaaagtatttcgaaaccgtggttttggaatacagttttaagatgtcacgacatgactgtagtactggaatacagttttaagatgtcatgacatgactgtagtactccctctatagaactgtattttttatatcgttcttaacaatacgtgtttgatgattatctcaaaccatgatatttagtatatatgtgtaagtgatgattatcttaaaccatgatatttagtatatatgtgtaagagtaattatagaaaaactttgggttggag

SEQ ID NO: 39873 - DNA, 369 bp, Zea Mays
ggtagccaaagcaagaacaacctcctccattcgcttccaaaaatctgtagtgagagtgcaaaaagcatcgttccaatcatgatgcattcatttcttgttactggacccatgttctttagcttctcaacagctaatgttgggctacaggagtaaattaaataaggagtcactaaaatcccaaaaagtgctggcacgctagcaacctcgaaccaagtaatcatgggtttccgatactaacaccaatctcctttcctaacttcaaacacaataggttatgtgcagccgctatcaagaagagagcattggagttggtagatgcctgcacaagaagagtggttggcacataaactgagctaagaaacaagttcc

SEQ ID NO: 39874 - DNA, 808 bp, Zea Mays
ccgtccgatccgacagcacggcgtatctacgccgtcggccgcagccggcgcctgctggccacacccgccggaccggcccggcaggtggcagtttaatagtacaaaccaggctgatcctggcggcaaggaccaacgtgctcgatctccatctcgaccgtcgctcaccgggaagctacgctacgacgaagcatggcgatgctgggcgtggccgggatgctgatcccggaggtgctgaccaaggccgggctgatcaacgcgccgcagtggtacgacgccggcaagtcggagtacttcgcgtcgtcgtcgacgctgttcgtgatcgagttcatcctgtttcactacgtggagatccggcggtggcaggacatcaagaaccccggcagcgtcaaccaggaccccatcttcaagagctacagcctgccgccgcacgagtgcggctaccccggcagcgtcttcaacccgctcaacttcgcgcccacgctcgaggccaaggagaaggagctcgccaacgcacaacgtcaccggcaaggggcccttcgacaacctgctgcagcacctgtccgacccatggcacaacaccatcatccagaccctgtcgggttgagtcgacggtccatcaggtcatgtggtccgagctgaaaggccgagactcgaagacagttcgtgtgatgcgttcttaatcgactgagggctaaggaatgtgacgtactggtatatgtacattagttgaagcggaggctataaagggtgtagagattgtttcatcagtgaaatagtgtaatattacaaagagaaacaacccctcacg

SEQ ID NO: 39875 - DNA, 1993 bp, Zea Mays
gcaaaagcagcaaacgattgaggcggtgccggtggtgacatggagggagggggcgcgggcgccaaaagaagatgctgccatggcccggccaggccccagctgctgccctcacgcgcggcgccatattcccccttgtgttgtgttgtgccttgccgccgattcgcggccccgggcgtatccatacatataccgccggaggcggagacagggacggaatatctctgggccgggcggggcggtggtggagtcccaggaaagcaaagcaaccgaccgacgcagccagccggccggccggcctataagagcccccgcgcggctcgcggtggcatcgaccgtcggtcgatcacccgctgagcttgcttgttttcctgccgcggtcgctgcttggccaggaccagctgcttgctgccgtcgtctcgtctgcggctactccggcctctcatgctggccacgccaccgacgctgcgatacgaagcgccgcggtgggcacgtcggaaatggcatcgtcgctgggagtgggtggtcagcagcaggggcacgggcacgggcacggcgaggccagggcgcggctcaggtggacgcgccagctgcacgaccgcttcgtgctcgccgtggcccagctcggcggcgcagacaaggcgacacccaagtccgtgctgagggcgatggccgtgccggggctcacgctgtaccacctcaagaggcacctgcaggtccgtccggccaccgccgaattatttctctcttgaagtaccggctggtggcggtgagccgaggcgtcgcttccccgctgggcgacagcggagatggcaccgacgagcgttcgtcctcgtcctcggagaaccagccggcggacgagtgcgacgacggtaccgtcgccgagccgcatggcgattcttccaggagcgtggcgcggatgcagaggaagctgcaggagcagatcgaggtttcaggctttcagccgattgtgtgccgccggttcgtgcttggctgctgatcaagccgagctcggccattcatgaccacacacatccatacatggtggcaggtgcagcggcacctacagctgaggatcgaggcgcaggggaggtacctgcagtccgtgctgcgccgggcgcaggaggtcctcgccgaccacggcctgggctcggcagccggcgcggaggcggagctggcctccgcggtggacaccgggtccctgtcctcctcctgctgctgctccccgacgcgccgccgctccgccgacagctgcgtgacgtcctcctcttcggaggccgagagccaggcccccgtcggcggcgccacgtggctccacacgtgcgccggtacgcgcgactgctccgttgagcaacagccggtgcagggggagaagagtacattcctgcagaggcacggggcagcagaggacggcacttcgtctgagatcgatcccaacggcaacaggtaggggacggagtcggagatcgtgatcggaagcatctctctgctctgcatgtgcccagcgtcggagaacagggaatgaatgattggcggggtggccttcaaggttgggacttggggaggggggccaggcttttgagcaatgtctgctgctgaaacagctacctgctctgctcttcgttccagaatatgatgtgcatgtttattttcgtttatgcgaatggttcttgtgtttcatgtaaaaaaattatgactgcaactcgaggaagggccagctgcaaatgatgcatgcagtgtgcttgaggtagcagtacaatgcaaggatgattgcatggtacagaactgtagtagctactatattattagtaagattgtatgccatcagtgagattgatgccttaagagggtaatggcatgagaactggaaaaggtttagaatgtatattaaggcctcatttgaaatagaggattagtaaaaatatatggatgagaaaaatgtaggaataaagttgcatgccaccttcaatttcataggaaaatttttaagaggttg

SEQ ID NO: 39876 - DNA, 1980 bp, Zea Mays
cacgcgcccacgggcacgggcggggatctcctccgttgtttcctaggccgcacgccgcccacgccgcctccgtctccgtccgttcgtcgggcgcaatagagacaccacggcacgcgccgccgctcctgccctgcacttttctaccaccgaaggcgagggcgagggggccaaagacgagcgctttttcgtgcccgcctgcctgcctgctggtcattgccgctgctcacgagcctcccgccccgtgccgccctgccctctacggctctgccccaacgagccccaggggagccaggaaaaggagccgtcaaaagccgccgccgaggagagcgcgcagggtaacgaagcaccatctcctctccttgcccttcttcgattaggttggatcccagccgccgtcgctgcagtcaggcatggcatcaaccgttaccttcaacccagtgagcgcccaagctgcgctgatccaaaagccaaggaaccttggagccataagctatgctggcttaaagatgccggcatctgttagctctggctcagagtcgtcattcctgggctggaatgcatcccttcgggcagctgttactccaaggattgtgcccaagacaaagtctggatctcagatatctccacaggcatcttacaaggtggcagtgctgggtgctgccggtggcatcggtcaacccttgggcctgttggttaagatgtctcctctggtgtccgagctgcatctgtatgatattgctaatgtcaagggagttgctgcagatctcagccactgcaacacgcctgctcaggttcttgacttcactggaccctcagagttagccaactgcttgaaaggtgtggatgtcgttgtcatccctgccggggtcccaaggaagcctgggatgactcgcgatgacctttttaacatcaacgcaagcatcgtcaagacacttgttgaggctgttgcagacagttgcccagaggcgttcatccatatcatcagcaacccggtgaattccacggtgccaattgcagctgaggttctgaagcagaagggtgtctacaatcccaagaagcttttcggggttaccaccctggatgttgtcagggccaacacatttgtggcgcagaagaagaaccttaagctcatcgatgttgatgtcccagttgttggtggccatgctggaatcacaattctgccactgttatcgaagaccaggccatctgtcaccttcacagatgaggaaactgaggagctgacaaagaggatacagaatgccgggacagaggtggtggatgccaaggctggtgctgggtctgctaccctgtccatggcctatgccgctgccagattcgttgagtcttctctccgtgcgctggctggcgatccggatgtttatgagtgcacatttgttcagtctgagataactgacctgccattcttcgcatcaagagtcaagttgggcaagaatggtgttgagtccgtcatttctgccgacctccagggaatgactgagtatgaggccaaggcacttgaggcgctgaaggccgagttgaaggcaagcattgagaagggtattgctttcgtgaacaaacagcgggaagctgctgcatctgtttgaggcgaagcaagtgaaacagaaggaacaatcgtcttgaatggcttttaagttttgcagcctagagttttttgttgtcggcatgtaggaagatgttccagatggttgctgtttgtttctaattgctacatgggggctgaacatccatcccccaagttatcgccggtttctgaaccaggccttatttacacataaattttgccccttctgtatcgtggttctgtttgtagcttgttggagtctacaaactacaaagaggctaataaaccacttttattggaagtgatccttgtcatgtttgcattgtcgtatttcctgctgttcggcaggaaagccctggcttcattgcctactaaagttattatcttttttttttcat

SEQ ID NO: 39877 - DNA, 1976 bp, Zea Mays
cacgcgcccacgggcacgggcggggatctcctccgttgtttcctaggccgcacgccgcccacgccgcctccgtctccgtccgttcgtcgggcgcaatagagacaccacggcacgcgccgccgctcctgccctgcacttttctaccaccgaaggcgagggcgagggggccaaagacgagcgctttttcgtgcccgcctgcctgcctgctggtcattgccgctgctcacgagcctcccgccccgtgccgccctgccctctacggctctgccccaacgagccccaggggagccaggaaaaggagccgtcaaaagccgccgccgaggagagcgcgcagggtaacgaagcaccatctcctctccttgcccttcttcgattaggttggatcccagccgccgtcgctgcaggcatggcatcaaccgttaccttcaacccagtgagcgcccaagctgcgctgatccaaaagccaaggaaccttggagccataagctatgctggcttaaagatgccggcatctgttagctctggctcagagtcgtcattcctgggctggaatgcatcccttcgggcagctgttactccaaggattgtgcccaagacaaagtctggatctcagatatctccacaggcatcttacaaggtggcagtgctgggtgctgccggtggcatcggtcaacccttgggcctgttggttaagatgtctcctctggtgtccgagctgcatctgtatgatattgctaatgtcaagggagttgctgcagatctcagccactgcaacacgcctgctcaggttcttgacttcactggaccctcagagttagccaactgcttgaaaggtgtggatgtcgttgtcatccctgccggggtcccaaggaagcctgggatgactcgcgatgacctttttaacatcaacgcaagcatcgtcaagacacttgttgaggctgttgcagacagttgcccagaggcgttcatccatatcatcagcaacccggtgaattccacggtgccaattgcagctgaggttctgaagcagaagggtgtctacaatcccaagaagcttttcggggttaccaccctggatgttgtcagggccaacacatttgtggcgcagaagaagaaccttaagctcatcgatgttgatgtcccagttgttggtggccatgctggaatcacaattctgccactgttatcgaagaccaggccatctgtcaccttcacagatgaggaaactgaggagctgacaaagaggatacagaatgccgggacagaggtggtggatgccaaggctggtgctgggtctgctaccctgtccatggcctatgccgctgccagattcgttgagtcttctctccgtgcgctggctggcgatccggatgtttatgagtgcacatttgttcagtctgagataactgacctgccattcttcgcatcaagagtcaagttgggcaagaatggtgttgagtccgtcatttctgccgacctccagggaatgactgagtatgaggccaaggcacttgaggcgctgaaggccgagttgaaggcaagcattgagaagggtattgctttcgtgaacaaacagcgggaagctgctgcatctgtttgaggcgaagcaagtgaaacagaaggaacaatcgtcttgaatggcttttaagttttgcagcctagagttttttgttgtcggcatgtaggaagatgttccagatggttgctgtttgtttctaattgctacatgggggctgaacatccatcccccaagttatcgccggtttctgaaccaggccttatttacacataaattttgccccttctgtatcgtggttctgtttgtagcttgttggagtctacaaactacaaagaggctaataaaccacttttattggaagtgatccttgtcatgtttgcattgtcgtatttcctgctgttcggcaggaaagccctggcttcattgcctactaaagttattatcttttttttttcat

SEQ ID NO: 39878 - DNA, 292 bp, Zea Mays
aagcccaactgaagaaccaaagcaaaacactctaacaggaatgacttcagctgctagtgacctcagaaacggcatccttggccggcttggctatctccttgacaaggcactcggcgatgggggccttgtgctccttgaggatcgcggccgccttgtggaggagctccgcacgcttccacagcggcgtccgggcccatgccttctgcgcgaccttggccgcgtccatcgccttgttcacctcctcctgcgtgcatgctggacacacaggggatccggaccgtcagaaaagtaa

SEQ ID NO: 39879 - DNA, 1213 bp, Zea Mays
atcaagttgctggagcgcatgcagattcgacaagaggtatacgaaatcttgagtgagctgtacgtccatttggaagtagcaaagaagcaactcctgatgatgcaactgtaaggacaatctttcttatagctctaagttcgaatatattggttcctgattattgtgtctcgtcatggatttattgcgttcattgaaccagaaaattgcatcgcagtgtctacatttgtattctagtttaccaaggtatgatctgtcagtgtatgattctttcagttgctggatatactcggatgggaaatcaaccattccattatgggagttcaaaaatctttgtatgcagatctttttgttggagggttcacagtttttagacatcttcctctttctaatcctttcaccgcgtcttattttactctcttctccaaaaaagttactgctctaagagaggtgttttgaaatagaagagagggtacatatttgagcatatgtagagcccaggtacctcgctctacaacatcaaggattatcttgtcattcataagagttaaaggccctttcttcagtctttcactattaagacacaatttcatgttgcaaagatcttcaatggatgatattgatgacgatatataagggatatcactcttgagccacataagcttgatgaagagattgttgaatctaatcttgagcttgaagcagactttgtacaatttaaatatgatgatcgatcacaaaaggtacttcattctgttgccacaaacatgtttagcgacaaggagatgtgctgctaagtctgtttttacatggaagatgggaaatggacataaacagtgaacatgaagaagggtgtgctagatggaaaggaaaccggtcaagctgattgaataagaagaagtctcttaactactataaatccatccatgaaatggagaagattaatgctaagccacttcaagaaaaaaggttgggtctagtcgttgttgtctctatactggcaaagggaatgcggagatacatttcgagaagaaaaaggcaatgatatggaggtgttttgtctttcattgataaaaaattagaaatgagcaggtgatgaatgtcacatgaatatatttagctatttcaaatggaaaccaactttgttattgtactggcttttgttcataataaaaacacagaaggcaatggaaaatctacatgcaaatgttttgct

SEQ ID NO: 39880 - DNA, 1554 bp, Zea Mays
aagttgctggagcgcatgcagattcgacaagaggtatacgaaatcttgagtgagctgtacgtccatttggaagtagcaaagaagcaactcctgatgatgcaactgtaaggacaatctttcttatagctctaagcagttcgaatatattggttcctgattattgtgtctcgtcatggatttattgcgttcattgaaccagaaaattgcatcgcagtgtctacatttgtattctagtttaccaagatctttttgttggagggttcacagtttttagacatcttcctctttctaatcctttcaccgcgtcttattttactctcttctccaaaaaagttactgctctgtaagacttgctcacttctttttcttttcgtagggtggtcaatatcaatgccttgtttatgacttcttattattttccccatgtctatatcctatgtgatggatgcatgggtccaaaaagataaaatgaaaatatactgttagtaaccaatgaattgtacaaaaaatattatatgcaatgactatacattgaaatgcacacaactaaattaaagctatagttacatgcatagtacaattgaatgttacaaatactgcttttattagccagtgttatgtctttatttatactaatgctattcacatactatggagatttagaccattggaaatgcactttgtaatacttaacttggtgttctaaaacataagataggtgttctgaaacataagatatgaaattgcacttggtaatacttagtgtggtgttctaaaacagaagagaggtgttttgaaatagaagagagggtacatatttgagcatatgtagagcccaggtacctcgctctacaacatcaaggattatcttgtcattcataagagttaaaggccctttcttcagtctttcactattaagacacaatttcatgttgcaaagatcttcaatggatgatattgatgacgatatataagggatatcactcttgagccacataagcttgatgaagagattgttgaatctaatcttgagcttgaagcagactttgtacaatttaaatatgatgatcgatcacaaaaggtacttcattctgttgccacaaacatgtttagcgacaaggagatgtgctgctaagtctgtttttacatggaagatgggaaatggacataaacagtgaacatgaagaagggtgtgctagatggaaaggaaaccggtcaagctgattgaataagaagaagtctcttaactactataaatccatccatgaaatggagaagattaatgctaagccacttcaagaaaaaaggttgggtctagtcgttgttgtctctatactggcaaagggaatgcggagatacatttcgagaagaaaaaggcaatgatatggaggtgttttgtctttcattgataaaaaattagaaatgagcaggtgatgaatgtcacatgaatatatttagctatttcaaatggaaaccaactttgttattgtactggcttttgttcataataaaaacacagaaggcaatggaaaatctacatgcaaatgttttgct

SEQ ID NO: 39881 - DNA, 4312 bp, Zea Mays
tgctggagcgcatgcagattcgacaagaggtatacgaaatcttgagtgagctgtacgtccatttggaagtagcaaagaagcaactcctgatgatgcaactgtaaggacaatctttcttatagctctaaggtatgatacaatggcattccatagaaatgttttcccagttcctccatgtcctgagacaaaatagaagtttggattgttgctaagcacagaactaactatggtatgaaaagcattcttttgatctttgtttagttgtatatataatttgtttgcttcttcttctaagtaatttatatcataactcatttcttcttggattagtctgtttatgttatcaatatgttttgtgtgttgtcgcctgggtaaattgtagttatttatttcctgcccattcttagagaatagctcttctagttcttcaagtaaataatgttgtagttctaattcagagggtgtatatttgatagggtggtatttttggataagatgtttgtgaatgtcatcgaccattgtgtgccatgtggtgttgaaaaattctttttcatcttttatttggcaatatgttagcattatgacaaatagattgcgtagttcaaatgatgttgcccaattagttgcttcttgatatgtgcgataccactcattgtcatcgtctagtaatcctctagctgcgcaagcctctttaaaggtttggtataaaacaccattatacgttcgtatatcttcatagtttttagcacctttaacaatcattagaagcattcttaaatagaatctttcaccttcagcagggtttacataatagagccttccaaatttgaaaccatgttgtcttttcttccattgtcttttttctccatcccaacgccattgtttgggaaactcatagtatgttaattcttttgcatcttcatattgcttatttgcattaaaccattcagttagcattgtctttctatactttagatctttagctatgtctatcaatttatcatttgatttcatcttaattatattcatcaatggtagatgaactggcagtctttctataggtggccaatggtaatgtatctcgtatcctaataatctccaaagagcatcttgctcgcatatatatctgcagtctagatattcttgtatctcatctatagtttctgcttctttgtttacatgtgattcttctcctttttggatttttttgaatataacctttgctctatcaggtcctttgtttacatatttgcataaatatttcaagactgtactcttgtttacatattcaacatttatatgagcttggtatctttttaatagttttaaattatgtggcacaacccatttgttgtctaagttgtgttgttctcttctgatgaaaatcccattgttcctccttcgatatattgtaaagccattttcagagaatgtagtgttttcttcaaaatctttggggtaaattttggagcatttgccttttttcatgcatggacaattccaatttttatctccgcacggtccatgcatcatatgttcagcaacaagagcatatcccaaaggatctaactcgggatctggtatttcagcagatatccacgaatctattgtttctgtagttatttcacaacctttcttgtctaaccaaattaatgtgtgcacatgtggtagacctcgtttttggaattctatagaatatagtagtgctagtacaaggccaaatacctttcctgattgtaagtcatccaaaagttgttgtagtttcatatgaaaaacacggacaataatatcaggtctatcatttggatgctcacctggtaataaacatgttgttattttaggccatttagggttacaagtgcatgtaataaaaagatctggtggcccataggcacaacaaatagcaatgccatcatggtaattttgtatcatataccgttttgatccaacatggctagatggtaataacaccttttttcctattcgactggcgtcatatattcctttttctactgcatcaaaaataccttgtacatattcagctcgtaattttgattgatttctaacaatataatcaagcctgtcttcatcctccattgctcgaccgtctactactacttgttttgataatcggccataacataaccagggattaggctgattaggtctatagtgcacatgatatttcaaaaattcatgcaaagttactctatctcttttggagtcatctctgttttgactaatgtgttgtccatggtatttaatacctagttgaaagcctcgttcgccatatggaaataggagcgggtattgtagaggcatatatgctggatggaaaatagatatcctttgaaggctattttggtgtgtgctaacaatgatgtcccgtttgtagttctcaagtgataaatcacctacaatcagcatagctaattcttcctgatgtggcatctcatattgaattctatcagtttcgtcagcgcctactattctaatgcttacatctatgcctttgtgttcttcgagaaaatcacgagcttggcggaatatttttactaatggattatattcgtcgagcatttttttagccctctcactatttctggatctatgtcttgctcacctggttcttcatttgttagagccctaattctattttcaatttcattctttgtatcaaaaatatatagttctgcaaatttggggcaattgtctggtaagggtagtaatgatcctattcgatgatgtatttggccattgacacgaaacacatatggtccctcaccatcatttatttttttatcaatatttccccccatggaagtaaatgcaaacatgctattatattgtcttattttttgtagaaaatgtttacatcttgtgtccatttttcgttgtattaattcattaagaaaagttgggggttctttatattttggtattctgattttgccatttttgcagcagttcgaatatattggttcctgattattgtgtctcgtcatggatttattgcgttcattgaaccagaaaattgcatcgcagtgtctacatttgtattctagtttaccaagatctttttgttggagggttcacagtttttagacatcttcctctttctaatcctttcaccgcgtcttattttactctcttctccaaaaaagttactgctctgtaagacttgctcacttctttttcttttcgtagggtggtcaatatcaatgccttgtttatgacttcttattattttccccatgtctatatcctatgtgatggatgcatgggtccaaaaagataaaatgaaaatatactgttagtaaccaatgaattgtacaaaaaatattatatgcaatgactatacattgaaatgcacacaactaaattaaagctatagttacatgcatagtacaattgaatgttacaaatactgcttttattagccagtgttatgtctttatttatactaatgctattcacatactatggagatttagaccattggaaatgcactttgtaatacttaacttggtgttctaaaacataagataggtgttctgaaacataagatatgaaattgcacttggtaatacttagtgtggtgttctaaaacagaagagaggtgttttgaaatagaagagagggtacatatttgagcatatgtagagcccaggtacctcgctctacaacatcaaggattatcttgtcattcataagagttaaaggccctttcttcagtctttcactattaagacacaatttcatgttgcaaagatcttcaatggatgatattgatgacgatatataagggatatcactcttgagccacataagcttgatgaagagattgttgaatctaatcttgagcttgaagcagactttgtacaatttaaatatgatgatcgatcacaaaagatgggaaatggacataaacagtgaacatgaagaagggtgtgctagatggaaaggaaaccggtcaagctgattgaataagaagaagtctcttaactactataaatccatccatgaaatggagaagattaatgctaagccacttcaagaaaaaaggttgggtctagtcgttgttgtctctatactggcaaagggaatgcggagatacatttcgagaagaaaaaggcaatgatatggaggtgttttgtctttcattgataaaaaattagaaatgagcaggtgatgaatgtcacatgaatatatttagctatttcaaatggaaaccaactttgttattgtactggcttttgttcataataaaaacacagaaggcaatggaaaatctacatgcaaatgttttgct

SEQ ID NO: 39882 - DNA, 1182 bp, Zea Mays
gtcgtagctcagatctgtgcggtcgtgcaccgccgccgacttcatagttcgcacacaccactggcgatcgactgtcctcgtgcatctccattctccgccagctactcgcgacctctccacgtcaagcactgcgcatgaggatcggtcttctccacgtgaccatgttgagcactacgttagacattgccagctcgcccaacaggtatacgaaatcttgagtgagctgtacgtccatttggaagtagcaaagaagcaactcctgatgatgcaactgtaaggacaatctttcttatagctctaagttcgaatatattggttcctgattattgtgtctcgtcatggatttattgcgttcattgaaccagaaaattgcatcgcagtgtctacatttgtattctagtttaccaagaagagaggtgttttgaaatagaagagagggtacatatttgagcatatgtagagcccaggtacctcgctctacaacatcaaggattatcttgtcattcataagagttaaaggccctttcttcagtctttcactattaagacacaatttcatgttgcaaagatcttcaatggatgatattgatgacgatatataagggatatcactcttgagccacataagcttgatgaagagattgttgaatctaatcttgagcttgaagcagactttgtacaatttaaatatgatgatcgatcacaaaaggtacttcattctgttgccacaaacatgtttagcgacaaggagatgtgctgctaagtctgtttttacatggaagatgggaaatggacataaacagtgaacatgaagaagggtgtgctagatggaaaggaaaccggtcaagctgattgaataagaagaagtctcttaactactataaatccatccatgaaatggagaagattaatgctaagccacttcaagaaaaaaggttgggtctagtcgttgttgtctctatactggcaaagggaatgcggagatacatttcgagaagaaaaaggcaatgatatggaggtgttttgtctttcattgataaaaaattagaaatgagcaggtgatgaatgtcacatgaatatatttagctatttcaaatggaaaccaactttgttattgtactggcttttgttcataataaaaacacagaaggcaatggaaaatctacatgcaaatgttttgct

SEQ ID NO: 39883 - DNA, 1716 bp, Zea Mays
ctcagatctgtgcggtcgtgcaccgccgccgacttcatagttcgcacacaccactggcgatcgactgtcctcgtgcatctccattctccgccagctactcgcgacctctccacgtcaagcactgcgcatgaggatcggtcttctccacgtgaccatgttgagcactacgttagacattgccagctcgcccaacaggtatacgaaatcttgagtgagctgtacgtccatttggaagtagcaaagaagcaactcctgatgatgcaactgtaaggacaatctttcttatagctctaagcagttcgaatatattggttcctgattattgtgtctcgtcatggatttattgcgttcattgaaccagaaaattgcatcgcagtgtctacatttgtattctagtttaccaagatctttttgttggagggttcacagtttttagacatcttcctctttctaatcctttcaccgcgtcttattttactctcttctccaaaaaagttactgctctgtaagacttgctcacttctttttcttttcgtagggtggtcaatatcaatgccttgtttatgacttcttattattttccccatgtctatatcctatgtgatggatgcatgggtccaaaaagataaaatgaaaatatactgttagtaaccaatgaattgtacaaaaaatattatatgcaatgactatacattgaaatgcacacaactaaattaaagctatagttacatgcatagtacaattgaatgttacaaatactgcttttattagccagtgttatgtctttatttatactaatgctattcacatactatggagatttagaccattggaaatgcactttgtaatacttaacttggtgttctaaaacataagataggtgttctgaaacataagatatgaaattgcacttggtaatacttagtgtggtgttctaaaacagaagagaggtgttttgaaatagaagagagggtacatatttgagcatatgtagagcccaggtacctcgctctacaacatcaaggattatcttgtcattcataagagttaaaggccctttcttcagtctttcactattaagacacaatttcatgttgcaaagatcttcaatggatgatattgatgacgatatataagggatatcactcttgagccacataagcttgatgaagagattgttgaatctaatcttgagcttgaagcagactttgtacaatttaaatatgatgatcgatcacaaaaggtacttcattctgttgccacaaacatgtttagcgacaaggagatgtgctgctaagtctgtttttacatggaagatgggaaatggacataaacagtgaacatgaagaagggtgtgctagatggaaaggaaaccggtcaagctgattgaataagaagaagtctcttaactactataaatccatccatgaaatggagaagattaatgctaagccacttcaagaaaaaaggttgggtctagtcgttgttgtctctatactggcaaagggaatgcggagatacatttcgagaagaaaaaggcaatgatatggaggtgttttgtctttcattgataaaaaattagaaatgagcaggtgatgaatgtcacatgaatatatttagctatttcaaatggaaaccaactttgttattgtactggcttttgttcataataaaaacacagaaggcaatggaaaatctacatgcaaatgttttgct

SEQ ID NO: 39884 - DNA, 203 bp, Zea Mays
ccactggcgatcgactgtcctcgtgcatctccattctccgccagctactcgcgacctctccacgtcaagcactgcgcatgaggatcggtcttctccacgtgaccatgttgagcactacgttagacattgccagctcgcccaacaggaaaacggattgaaactaacagtaccgatgaaatactcattgtttccttcaagttggg

SEQ ID NO: 39885 - DNA, 3100 bp, Zea Mays
gttgaagtgtatatatagcttcttgaggaacttcagcgtacatcgcagtcccctataaagttaaattgttatagatttaagttgtgctaaacgataagacatttttatgcatatattagggctgttagacaagttaaatggggctgaatagaatgcttcattagatgaagaagggagtacaatgtatagccagaagggtgcaacactagggaaggtgtggcatcctggctattagatcctgaataccgtaggtagcagcccctgataactatactaaagtagctgatcctagatgctatataggactgcactacctgctatgcttgacagaatttcgatacatatcctcttgtaggaggatggaaagaagcctacagatagtaattacaaattatagtaataatttgacaaggaccaagaagaatacatatacctgttgatcaataatcacaagatccaaatgtttgattggatcatcatcatttttgccatgaaattcccaaactcttgatatccgaacacaaatgatatagtggtagacccctggtcgaacttgtgatagtggtgtaatgtccatctgcaaatacaatttgttaaaaatagtatcaatttatgttgccatggctctcaatagattgtagtacttctttatacacaatattttctgttattgttccacatgaaccgtcgtcattttctatcaatattttgagccctttcttttctgtaactcgtgacacagctaaatatagttgaccgtgtgtaaacacctttttctttaaatataaccctacatttgatagtgtttgtccttgacttttatttatagtcatagagtagcaaaccttgattggaaattggcgttgacataatgtaaaaggccatttattgcccttagttgtcagattaatgcggggtatatgtattttttcgccaacgtgtgtacctgttattattgttccttctataattgtgtctcctagttgagttataataattctggttccattgcatagtcctaaactttgatttaaatttcgtagaagcattacaggagtgccaattttaagttttagtctatgagaagggaaattgtttgcgtttaaagtgtttagatactcaatagggtataaaatattggcatcatttggagcatctgtgcatttagatatgctatctgcactatagtattctctctctactgttggcaaaagagagataatataatcatttatttcatctacaacatcattagttgttgctaatatagctctttttttgatataatctggatcattatattttgtttgtaggtcaggataagtaaattgaactaatgcttgaattttatcctctgttgtttcaattaaaaattcttttggtatttcaatgagtgttgagtccgaggaaaaattatcgttgttgttatataccccatttccaatggcaaggatccaattattgaatgataacaagtcttcatactcttcatttgatatattactttgtcgtagtcgcatgttttcagaaaggaatataatgttgacatggttccaaaggtatgaagcaatgatacaagcatttattatttgttcttttgttccattttctataacaggtaatatttgttttggatcgccacctagcacaaccactttaccaccaaaaggaatgtcaagagctttttcatatgtttctcctactatatctctaagggatctatcaaatgcttcaaagcattgtttatttgtcattagagcttcatcccatataataagatctgtgtcaataagaagttttgcaagatttgttcctctttttatatcacacattgacaattgatccaaatctataggtatacgaaatcttgagtgagctgtacgtccatttggaagtagcaaagaagcaactcctgatgatgcaactgtaaggacaatctttcttatagctctaagcagttcgaatatattggttcctgattattgtgtctcgtcatggatttattgcgttcattgaaccagaaaattgcatcgcagtgtctacatttgtattctagtttaccaagatctttttgttggagggttcacagtttttagacatcttcctctttctaatcctttcaccgcgtcttattttactctcttctccaaaaaagttactgctctaagagaggtgttttgaaatagaagagagggtacatatttgagcatatgtagagcccaggtacctcgctctacaacatcaaggattatcttgtcattcataaggtacgccgctctacaacatcaaggcttatctcgtcatttagattatgtaggctatatgcaaatattcgttatacattggttggattgcacccaatattctacttcttgtttaaatttttgatgctttcgttccaacctttatttttatactttctcatagtctgtcattgttgattgaaggtcacttttaagagctattgtcatattgattttcctcattatttatcttttttagagttaaaggccctttcttcagtctttcactattaagacacaatttcatgttgcaaagatcttcaatggatgatattgatgacgatatataagggatatcactcttgagccacataagcttgatgaagagattgttgaatctaatcttgagcttgaagcagactttgtacaatttaaatatgatgatcgatcacaaaagatgggaaatggacataaacagtgaacatgaagaagggtgtgctagatggaaaggaaaccggtcaagctgattgaataagaagaagtctcttaactactataaatccatccatgaaatggagaagattaatgctaagccacttcaagaaaaaaggttgggtctagtcgttgttgtctctatactggcaaagggaatgcggagatacatttcgagaagaaaaaggcaatgatatggaggtgttttgtctttcattgataaaaaattagaaatgagcaggtgatgaatgtcacatgaatatatttagctatttcaaatggaaaccaactttgttattgtactggcttttgttcataataaaaacacagaaggcaatggaaaatctacatgcaaatgttttgct

SEQ ID NO: 39886 - DNA, 3529 bp, Zea Mays
gtgtatatatagcttcttgaggaacttcagcgtacatcgcagtcccctataaagttaaattgttatagatttaagttgtgctaaacgataagacatttttatgcatatattagggctgttagacaagttaaatggggctgaatagaatgcttcattagatgaagaagggagtacaatgtatagccagaagggtgcaacactagggaaggtgtggcatcctggctattagatcctgaataccgtaggtagcagcccctgataactatactaaagtagctgatcctagatgctatataggactgcactacctgctatgcttgacagaatttcgatacatatcctcttgtaggaggatggaaagaagcctacagatagtaattacaaattatagtaataatttgacaaggaccaagaagaatacatatacctgttgatcaataatcacaagatccaaatgtttgattggatcatcatcatttttgccatgaaattcccaaactcttgatatccgaacacaaatgatatagtggtagacccctggtcgaacttgtgatagtggtgtaatgtccatctgcaaatacaatttgttaaaaatagtatcaatttatgttgccatggctctcaatagattgtagtacttctttatacacaatattttctgttattgttccacatgaaccgtcgtcattttctatcaatattttgagccctttcttttctgtaactcgtgacacagctaaatatagttgaccgtgtgtaaacacctttttctttaaatataaccctacatttgatagtgtttgtccttgacttttatttatagtcatagagtagcaaaccttgattggaaattggcgttgacataatgtaaaaggccatttattgcccttagttgtcagattaatgcggggtatatgtattttttcgccaacgtgtgtacctgttattattgttccttctataattgtgtctcctagttgagttataataattctggttccattgcatagtcctaaactttgatttaaatttcgtagaagcattacaggagtgccaattttaagttttagtctatgagaagggaaattgtttgcgtttaaagtgtttagatactcaatagggtataaaatattggcatcatttggagcatctgtgcatttagatatgctatctgcactatagtattctctctctactgttggcaaaagagagataatataatcatttatttcatctacaacatcattagttgttgctaatatagctctttttttgatataatctggatcattatattttgtttgtaggtcaggataagtaaattgaactaatgcttgaattttatcctctgttgtttcaattaaaaattcttttggtatttcaatgagtgttgagtccgaggaaaaattatcgttgttgttatataccccatttccaatggcaaggatccaattattgaatgataacaagtcttcatactcttcatttgatatattactttgtcgtagtcgcatgttttcagaaaggaatataatgttgacatggttccaaaggtatgaagcaatgatacaagcatttattatttgttcttttgttccattttctataacaggtaatatttgttttggatcgccacctagcacaaccactttaccaccaaaaggaatgtcaagagctttttcatatgtttctcctactatatctctaagggatctatcaaatgcttcaaagcattgtttatttgtcattagagcttcatcccatataataagatctgtgtcaataagaagttttgcaagatttgttcctctttttatatcacacattgacaattgatccaaatctataggtatacgaaatcttgagtgagctgtacgtccatttggaagtagcaaagaagcaactcctgatgatgcaactgtaaggacaatctttcttatagctctaagttcgaatatattggttcctgattattgtgtctcgtcatggatttattgcgttcattgaaccagaaaattgcatcgcagtgtctacatttgtattctagtttaccaagatctttttgttggagggttcacagtttttagacatcttcctctttctaatcctttcaccgcgtcttattttactctcttctccaaaaaagttactgctctgtaagacttgctcacttctttttcttttcgtagggtggtcaatatcaatgccttgtttatgacttcttattattttccccatgtctatatcctatgtgatggatgcatgggtccaaaaagataaaatgaaaatatactgttagtaaccaatgaattgtacaaaaaatattatatgcaatgactatacattgaaatgcacacaactaaattaaagctatagttacatgcatagtacaattgaatgttacaaatactgcttttattagccagtgttatgtctttatttatactaatgctattcacatactatggagatttagaccattggaaatgcactttgtaatacttaacttggtgttctaaaacataagataggtgttctgaaacataagatatgaaattgcacttggtaatacttagtgtggtgttctaaaacagaagagaggtgttttgaaatagaagagagggtacatatttgagcatatgtagagcccaggtacctcgctctacaacatcaaggattatcttgtcattcataaggtacgccgctctacaacatcaaggcttatctcgtcatttagattatgtaggctatatgcaaatattcgttatacattggttggattgcacccaatattctacttcttgtttaaatttttgatgctttcgttccaacctttatttttatactttctcatagtctgtcattgttgattgaaggtcacttttaagagctattgtcatattgattttcctcattatttatcttttttagagttaaaggccctttcttcagtctttcactattaagacacaatttcatgttgcaaagatcttcaatggatgatattgatgacgatatataagggatatcactcttgagccacataagcttgatgaagagattgttgaatctaatcttgagcttgaagcagactttgtacaatttaaatatgatgatcgatcacaaaagatgggaaatggacataaacagtgaacatgaagaagggtgtgctagatggaaaggaaaccggtcaagctgattgaataagaagaagtctcttaactactataaatccatccatgaaatggagaagattaatgctaagccacttcaagaaaaaaggttgggtctagtcgttgttgtctctatactggcaaagggaatgcggagatacatttcgagaagaaaaaggcaatgatatggaggtgttttgtctttcattgataaaaaattagaaatgagcaggtgatgaatgtcacatgaatatatttagctatttcaaatggaaaccaactttgttattgtactggcttttgttcataataaaaacacagaaggcaatggaaaatctacatgcaaatgttttgct

SEQ ID NO: 39887 - DNA, 2854 bp, Zea Mays
gtatatatagcttcttgaggaacttcagcgtacatcgcagtcccctataaagttaaattgttatagatttaagttgtgctaaacgataagacatttttatgcatatattagggctgttagacaagttaaatggggctgaatagaatgcttcattagatgaagaagggagtacaatgtatagccagaagggtgcaacactagggaaggtgtggcatcctggctattagatcctgaataccgtaggtagcagcccctgataactatactaaagtagctgatcctagatgctatataggactgcactacctgctatgcttgacagaatttcgatacatatcctcttgtaggaggatggaaagaagcctacagatagtaattacaaattatagtaataatttgacaaggaccaagaagaatacatatacctgttgatcaataatcacaagatccaaatgtttgattggatcatcatcatttttgccatgaaattcccaaactcttgatatccgaacacaaatgatatagtggtagacccctggtcgaacttgtgatagtggtgtaatgtccatctgcaaatacaatttgttaaaaatagtatcaatttatgttgccatggctctcaatagattgtagtacttctttatacacaatattttctgttattgttccacatgaaccgtcgtcattttctatcaatattttgagccctttcttttctgtaactcgtgacacagctaaatatagttgaccgtgtgtaaacacctttttctttaaatataaccctacatttgatagtgtttgtccttgacttttatttatagtcatagagtagcaaaccttgattggaaattggcgttgacataatgtaaaaggccatttattgcccttagttgtcagattaatgcggggtatatgtattttttcgccaacgtgtgtacctgttattattgttccttctataattgtgtctcctagttgagttataataattctggttccattgcatagtcctaaactttgatttaaatttcgtagaagcattacaggagtgccaattttaagttttagtctatgagaagggaaattgtttgcgtttaaagtgtttagatactcaatagggtataaaatattggcatcatttggagcatctgtgcatttagatatgctatctgcactatagtattctctctctactgttggcaaaagagagataatataatcatttatttcatctacaacatcattagttgttgctaatatagctctttttttgatataatctggatcattatattttgtttgtaggtcaggataagtaaattgaactaatgcttgaattttatcctctgttgtttcaattaaaaattcttttggtatttcaatgagtgttgagtccgaggaaaaattatcgttgttgttatataccccatttccaatggcaaggatccaattattgaatgataacaagtcttcatactcttcatttgatatattactttgtcgtagtcgcatgttttcagaaaggaatataatgttgacatggttccaaaggtatgaagcaatgatacaagcatttattatttgttcttttgttccattttctataacaggtaatatttgttttggatcgccacctagcacaaccactttaccaccaaaaggaatgtcaagagctttttcatatgtttctcctactatatctctaagggatctatcaaatgcttcaaagcattgtttatttgtcattagagcttcatcccatataataagatctgtgtcaataagaagttttgcaagatttgttcctctttttatatcacacattgacaattgatccaaatctataggtatacgaaatcttgagtgagctgtacgtccatttggaagtagcaaagaagcaactcctgatgatgcaactgtaaggacaatctttcttatagctctaagttcgaatatattggttcctgattattgtgtctcgtcatggatttattgcgttcattgaaccagaaaattgcatcgcagtgtctacatttgtattctagtttaccaagatctttttgttggagggttcacagtttttagacatcttcctctttctaatcctttcaccgcgtcttattttactctcttctccaaaaaagttactgctctaagagaggtgttttgaaatagaagagagggtacatatttgagcatatgtagagcccaggtacctcgctctacaacatcaaggattatcttgtcattcataagagttaaaggccctttcttcagtctttcactattaagacacaatttcatgttgcaaagatcttcaatggatgatattgatgacgatatataagggatatcactcttgagccacataagcttgatgaagagattgttgaatctaatcttgagcttgaagcagactttgtacaatttaaatatgatgatcgatcacaaaagatgggaaatggacataaacagtgaacatgaagaagggtgtgctagatggaaaggaaaccggtcaagctgattgaataagaagaagtctcttaactactataaatccatccatgaaatggagaagattaatgctaagccacttcaagaaaaaaggttgggtctagtcgttgttgtctctatactggcaaagggaatgcggagatacatttcgagaagaaaaaggcaatgatatggaggtgttttgtctttcattgataaaaaattagaaatgagcaggtgatgaatgtcacatgaatatatttagctatttcaaatggaaaccaactttgttattgtactggcttttgttcataataaaaacacagaaggcaatggaaaatctacatgcaaatgttttgct

SEQ ID NO: 39888 - DNA, 3266 bp, Zea Mays
agcgtacatcgcagtcccctataaagttaaattgttatagatttaagttgtgctaaacgataagacatttttatgcatatattagggctgttagacaagttaaatggggctgaatagaatgcttcattagatgaagaagggagtacaatgtatagccagaagggtgcaacactagggaaggtgtggcatcctggctattagatcctgaataccgtaggtagcagcccctgataactatactaaagtagctgatcctagatgctatataggactgcactacctgctatgcttgacagaatttcgatacatatcctcttgtaggaggatggaaagaagcctacagatagtaattacaaattatagtaataatttgacaaggaccaagaagaatacatatacctgttgatcaataatcacaagatccaaatgtttgattggatcatcatcatttttgccatgaaattcccaaactcttgatatccgaacacaaatgatatagtggtagacccctggtcgaacttgtgatagtggtgtaatgtccatctgcaaatacaatttgttaaaaatagtatcaatttatgttgccatggctctcaatagattgtagtacttctttatacacaatattttctgttattgttccacatgaaccgtcgtcattttctatcaatattttgagccctttcttttctgtaactcgtgacacagctaaatatagttgaccgtgtgtaaacacctttttctttaaatataaccctacatttgatagtgtttgtccttgacttttatttatagtcatagagtagcaaaccttgattggaaattggcgttgacataatgtaaaaggccatttattgcccttagttgtcagattaatgcggggtatatgtattttttcgccaacgtgtgtacctgttattattgttccttctataattgtgtctcctagttgagttataataattctggttccattgcatagtcctaaactttgatttaaatttcgtagaagcattacaggagtgccaattttaagttttagtctatgagaagggaaattgtttgcgtttaaagtgtttagatactcaatagggtataaaatattggcatcatttggagcatctgtgcatttagatatgctatctgcactatagtattctctctctactgttggcaaaagagagataatataatcatttatttcatctacaacatcattagttgttgctaatatagctctttttttgatataatctggatcattatattttgtttgtaggtcaggataagtaaattgaactaatgcttgaattttatcctctgttgtttcaattaaaaattcttttggtatttcaatgagtgttgagtccgaggaaaaattatcgttgttgttatataccccatttccaatggcaaggatccaattattgaatgataacaagtcttcatactcttcatttgatatattactttgtcgtagtcgcatgttttcagaaaggaatataatgttgacatggttccaaaggtatgaagcaatgatacaagcatttattatttgttcttttgttccattttctataacaggtaatatttgttttggatcgccacctagcacaaccactttaccaccaaaaggaatgtcaagagctttttcatatgtttctcctactatatctctaagggatctatcaaatgcttcaaagcattgtttatttgtcattagagcttcatcccatataataagatctgtgtcaataagaagttttgcaagatttgttcctctttttatatcacacattgacaattgatccaaatctataggtatacgaaatcttgagtgagctgtacgtccatttggaagtagcaaagaagcaactcctgatgatgcaactgtaaggacaatctttcttatagctctaagttcgaatatattggttcctgattattgtgtctcgtcatggatttattgcgttcattgaaccagaaaattgcatcgcagtgtctacatttgtattctagtttaccaagatctttttgttggagggttcacagtttttagacatcttcctctttctaatcctttcaccgcgtcttattttactctcttctccaaaaaagttactgctctgtaagacttgctcacttctttttcttttcgtagggtggtcaatatcaatgccttgtttatgacttcttattattttccccatgtctatatcctatgtgatggatgcatgggtccaaaaagataaaatgaaaatatactgttagtaaccaatgaattgtacaaaaaatattatatgcaatgactatacattgaaatgcacacaactaaattaaagctatagttacatgcatagtacaattgaatgttacaaatactgcttttattagccagtgttatgtctttatttatactaatgctattcacatactatggagatttagaccattggaaatgcactttgtaatacttaacttggtgttctaaaacataagataggtgttctgaaacataagatatgaaattgcacttggtaatacttagtgtggtgttctaaaacagaagagaggtgttttgaaatagaagagagggtacatatttgagcatatgtagagcccaggtacctcgctctacaacatcaaggattatcttgtcattcataagagttaaaggccctttcttcagtctttcactattaagacacaatttcatgttgcaaagatcttcaatggatgatattgatgacgatatataagggatatcactcttgagccacataagcttgatgaagagattgttgaatctaatcttgagcttgaagcagactttgtacaatttaaatatgatgatcgatcacaaaagatgggaaatggacataaacagtgaacatgaagaagggtgtgctagatggaaaggaaaccggtcaagctgattgaataagaagaagtctcttaactactataaatccatccatgaaatggagaagattaatgctaagccacttcaagaaaaaaggttgggtctagtcgttgttgtctctatactggcaaagggaatgcggagatacatttcgagaagaaaaaggcaatgatatggaggtgttttgtctttcattgataaaaaattagaaatgagcaggtgatgaatgtcacatgaatatatttagctatttcaaatggaaaccaactttgttattgtactggcttttgttcataataaaaacacagaaggcaatggaaaatctacatgcaaatgttttgct

SEQ ID NO: 39889 - DNA, 3095 bp, Zea Mays
catttttatgcatatattagggctgttagacaagttaaatggggctgaatagaatgcttcattagatgaagaagggagtacaatgtatagccagaagggtgcaacactagggaaggtgtggcatcctggctattagatcctgaataccgtaggtagcagcccctgataactatactaaagtagctgatcctagatgctatataggactgcactacctgctatgcttgacagaatttcgatacatatcctcttgtaggaggatggaaagaagcctacagatagtaattacaaattatagtaataatttgacaaggaccaagaagaatacatatacctgttgatcaataatcacaagatccaaatgtttgattggatcatcatcatttttgccatgaaattcccaaactcttgatatccgaacacaaatgatatagtggtagacccctggtcgaacttgtgatagtggtgtaatgtccatctgcaaatacaatttgttaaaaatagtatcaatttatgttgccatggctctcaatagattgtagtacttctttatacacaatattttctgttattgttccacatgaaccgtcgtcattttctatcaatattttgagccctttcttttctgtaactcgtgacacagctaaatatagttgaccgtgtgtaaacacctttttctttaaatataaccctacatttgatagtgtttgtccttgacttttatttatagtcatagagtagcaaaccttgattggaaattggcgttgacataatgtaaaaggccatttattgcccttagttgtcagattaatgcggggtatatgtattttttcgccaacgtgtgtacctgttattattgttccttctataattgtgtctcctagttgagttataataattctggttccattgcatagtcctaaactttgatttaaatttcgtagaagcattacaggagtgccaattttaagttttagtctatgagaagggaaattgtttgcgtttaaagtgtttagatactcaatagggtataaaatattggcatcatttggagcatctgtgcatttagatatgctatctgcactatagtattctctctctactgttggcaaaagagagataatataatcatttatttcatctacaacatcattagttgttgctaatatagctctttttttgatataatctggatcattatattttgtttgtaggtcaggataagtaaattgaactaatgcttgaattttatcctctgttgtttcaattaaaaattcttttggtatttcaatgagtgttgagtccgaggaaaaattatcgttgttgttatataccccatttccaatggcaaggatccaattattgaatgataacaagtcttcatactcttcatttgatatattactttgtcgtagtcgcatgttttcagaaaggaatataatgttgacatggttccaaaggtatgaagcaatgatacaagcatttattatttgttcttttgttccattttctataacaggtaatatttgttttggatcgccacctagcacaaccactttaccaccaaaaggaatgtcaagagctttttcatatgtttctcctactatatctctaagggatctatcaaatgcttcaaagcattgtttatttgtcattagagcttcatcccatataataagatctgtgtcaataagaagttttgcaagatttgttcctctttttatatcacacattgacaattgatccaaatctataggtatacgaaatcttgagtgagctgtacgtccatttggaagtagcaaagaagcaactcctgatgatgcaactgtaaggacaatctttcttatagctctaagttcgaatatattggttcctgattattgtgtctcgtcatggatttattgcgttcattgaaccagaaaattgcatcgcagtgtctacatttgtattctagtttaccaaggtatgatctgtcagtgtatgattctttcagttgctggatatactcggatgggaaatcaaccattccattatgggagttcaaaaatctttgtatgcagatctttttgttggagggttcacagtttttagacatcttcctctttctaatcctttcaccgcgtcttattttactctcttctccaaaaaagttactgctctaagagaggtgttttgaaatagaagagagggtacatatttgagcatatgtagagcccaggtacctcgctctacaacatcaaggattatcttgtcattcataaggtacgccgctctacaacatcaaggcttatctcgtcatttagattatgtaggctatatgcaaatattcgttatacattggttggattgcacccaatattctacttcttgtttaaatttttgatgctttcgttccaacctttatttttatactttctcatagtctgtcattgttgattgaaggtcacttttaagagctattgtcatattgattttcctcattatttatcttttttagagttaaaggccctttcttcagtctttcactattaagacacaatttcatgttgcaaagatcttcaatggatgatattgatgacgatatataagggatatcactcttgagccacataagcttgatgaagagattgttgaatctaatcttgagcttgaagcagactttgtacaatttaaatatgatgatcgatcacaaaagatgggaaatggacataaacagtgaacatgaagaagggtgtgctagatggaaaggaaaccggtcaagctgattgaataagaagaagtctcttaactactataaatccatccatgaaatggagaagattaatgctaagccacttcaagaaaaaaggttgggtctagtcgttgttgtctctatactggcaaagggaatgcggagatacatttcgagaagaaaaaggcaatgatatggaggtgttttgtctttcattgataaaaaattagaaatgagcaggtgatgaatgtcacatgaatatatttagctatttcaaatggaaaccaactttgttattgtactggcttttgttcataataaaaacacagaaggcaatggaaaatctacatgcaaatgttttgct

SEQ ID NO: 39890 - DNA, 2836 bp, Zea Mays
gaatgcttcattagatgaagaagggagtacaatgtatagccagaagggtgcaacactagggaaggtgtggcatcctggctattagatcctgaataccgtaggtagcagcccctgataactatactaaagtagctgatcctagatgctatataggactgcactacctgctatgcttgacagaatttcgatacatatcctcttgtaggaggatggaaagaagcctacagatagtaattacaaattatagtaataatttgacaaggaccaagaagaatacatatacctgttgatcaataatcacaagatccaaatgtttgattggatcatcatcatttttgccatgaaattcccaaactcttgatatccgaacacaaatgatatagtggtagacccctggtcgaacttgtgatagtggtgtaatgtccatctgcaaatacaatttgttaaaaatagtatcaatttatgttgccatggctctcaatagattgtagtacttctttatacacaatattttctgttattgttccacatgaaccgtcgtcattttctatcaatattttgagccctttcttttctgtaactcgtgacacagctaaatatagttgaccgtgtgtaaacacctttttctttaaatataaccctacatttgatagtgtttgtccttgacttttatttatagtcatagagtagcaaaccttgattggaaattggcgttgacataatgtaaaaggccatttattgcccttagttgtcagattaatgcggggtatatgtattttttcgccaacgtgtgtacctgttattattgttccttctataattgtgtctcctagttgagttataataattctggttccattgcatagtcctaaactttgatttaaatttcgtagaagcattacaggagtgccaattttaagttttagtctatgagaagggaaattgtttgcgtttaaagtgtttagatactcaatagggtataaaatattggcatcatttggagcatctgtgcatttagatatgctatctgcactatagtattctctctctactgttggcaaaagagagataatataatcatttatttcatctacaacatcattagttgttgctaatatagctctttttttgatataatctggatcattatattttgtttgtaggtcaggataagtaaattgaactaatgcttgaattttatcctctgttgtttcaattaaaaattcttttggtatttcaatgagtgttgagtccgaggaaaaattatcgttgttgttatataccccatttccaatggcaaggatccaattattgaatgataacaagtcttcatactcttcatttgatatattactttgtcgtagtcgcatgttttcagaaaggaatataatgttgacatggttccaaaggtatacgaaatcttgagtgagctgtacgtccatttggaagtagcaaagaagcaactcctgatgatgcaactgtaaggacaatctttcttatagctctaagcagttcgaatatattggttcctgattattgtgtctcgtcatggatttattgcgttcattgaaccagaaaattgcatcgcagtgtctacatttgtattctagtttaccaagatctttttgttggagggttcacagtttttagacatcttcctctttctaatcctttcaccgcgtcttattttactctcttctccaaaaaagttactgctctgtaagacttgctcacttctttttcttttcgtagggtggtcaatatcaatgccttgtttatgacttcttattattttccccatgtctatatcctatgtgatggatgcatgggtccaaaaagataaaatgaaaatatactgttagtaaccaatgaattgtacaaaaaatattatatgcaatgactatacattgaaatgcacacaactaaattaaagctatagttacatgcatagtacaattgaatgttacaaatactgcttttattagccagtgttatgtctttatttatactaatgctattcacatactatggagatttagaccattggaaatgcactttgtaatacttaacttggtgttctaaaacataagataggtgttctgaaacataagatatgaaattgcacttggtaatacttagtgtggtgttctaaaacagaagagaggtgttttgaaatagaagagagggtacatatttgagcatatgtagagcccaggtacctcgctctacaacatcaaggattatcttgtcattcataagagttaaaggccctttcttcagtctttcactattaagacacaatttcatgttgcaaagatcttcaatggatgatattgatgacgatatataagggatatcactcttgagccacataagcttgatgaagagattgttgaatctaatcttgagcttgaagcagactttgtacaatttaaatatgatgatcgatcacaaaagtgaacatgaagaagggtgtgctagatggaaaggaaaccggtcaagctgattgaataagaagaagtctcttaactactataaatccatccatgaaatggagaagattaatgctaagccacttcaagaaaaaaggttgggtctagtcgttgttgtctctatactggcaaagggaatgcggagatacatttcgagaagaaaaaggcaatgatatggaggtgttttgtctttcattgataaaaaattagaaatgagcaggtgatgaatgtcacatgaatatatttagctatttcaaatggaaaccaactttgttattgtactggcttttgttcataataaaaacacagaaggcaatggaaaatctacatgcaaatgttttgct

SEQ ID NO: 39891 - DNA, 2685 bp, Zea Mays
gaatgcttcattagatgaagaagggagtacaatgtatagccagaagggtgcaacactagggaaggtgtggcatcctggctattagatcctgaataccgtaggtagcagcccctgataactatactaaagtagctgatcctagatgctatataggactgcactacctgctatgcttgacagaatttcgatacatatcctcttgtaggaggatggaaagaagcctacagatagtaattacaaattatagtaataatttgacaaggaccaagaagaatacatatacctgttgatcaataatcacaagatccaaatgtttgattggatcatcatcatttttgccatgaaattcccaaactcttgatatccgaacacaaatgatatagtggtagacccctggtcgaacttgtgatagtggtgtaatgtccatctgcaaatacaatttgttaaaaatagtatcaatttatgttgccatggctctcaatagattgtagtacttctttatacacaatattttctgttattgttccacatgaaccgtcgtcattttctatcaatattttgagccctttcttttctgtaactcgtgacacagctaaatatagttgaccgtgtgtaaacacctttttctttaaatataaccctacatttgatagtgtttgtccttgacttttatttatagtcatagagtagcaaaccttgattggaaattggcgttgacataatgtaaaaggccatttattgcccttagttgtcagattaatgcggggtatatgtattttttcgccaacgtgtgtacctgttattattgttccttctataattgtgtctcctagttgagttataataattctggttccattgcatagtcctaaactttgatttaaatttcgtagaagcattacaggagtgccaattttaagttttagtctatgagaagggaaattgtttgcgtttaaagtgtttagatactcaatagggtataaaatattggcatcatttggagcatctgtgcatttagatatgctatctgcactatagtattctctctctactgttggcaaaagagagataatataatcatttatttcatctacaacatcattagttgttgctaatatagctctttttttgatataatctggatcattatattttgtttgtaggtcaggataagtaaattgaactaatgcttgaattttatcctctgttgtttcaattaaaaattcttttggtatttcaatgagtgttgagtccgaggaaaaattatcgttgttgttatataccccatttccaatggcaaggatccaattattgaatgataacaagtcttcatactcttcatttgatatattactttgtcgtagtcgcatgttttcagaaaggaatataatgttgacatggttccaaaggtatgaagcaatgatacaagcatttattatttgttcttttgttccattttctataacaggtaatatttgttttggatcgccacctagcacaaccactttaccaccaaaaggaatgtcaagagctttttcatatgtttctcctactatatctctaagggatctatcaaatgcttcaaagcattgtttatttgtcattagagcttcatcccatataataagatctgtgtcaataagaagttttgcaagatttgttcctctttttatatcacacattgacaattgatccaaatctataggtatacgaaatcttgagtgagctgtacgtccatttggaagtagcaaagaagcaactcctgatgatgcaactgtaaggacaatctttcttatagctctaagttcgaatatattggttcctgattattgtgtctcgtcatggatttattgcgttcattgaaccagaaaattgcatcgcagtgtctacatttgtattctagtttaccaagaagagaggtgttttgaaatagaagagagggtacatatttgagcatatgtagagcccaggtacctcgctctacaacatcaaggattatcttgtcattcataagagttaaaggccctttcttcagtctttcactattaagacacaatttcatgttgcaaagatcttcaatggatgatattgatgacgatatataagggatatcactcttgagccacataagcttgatgaagagattgttgaatctaatcttgagcttgaagcagactttgtacaatttaaatatgatgatcgatcacaaaaggtacttcattctgttgccacaaacatgtttagcgacaaggagatgtgctgctaagtctgtttttacatggaagatgggaaatggacataaacagtgaacatgaagaagggtgtgctagatggaaaggaaaccggtcaagctgattgaataagaagaagtctcttaactactataaatccatccatgaaatggagaagattaatgctaagccacttcaagaaaaaaggttgggtctagtcgttgttgtctctatactggcaaagggaatgcggagatacatttcgagaagaaaaaggcaatgatatggaggtgttttgtctttcattgataaaaaattagaaatgagcaggtgatgaatgtcacatgaatatatttagctatttcaaatggaaaccaactttgttattgtactggcttttgttcataataaaaacacagaaggcaatggaaaatctacatgcaaatgttttgct

SEQ ID NO: 39892 - DNA, 2920 bp, Zea Mays
gaatgcttcattagatgaagaagggagtacaatgtatagccagaagggtgcaacactagggaaggtgtggcatcctggctattagatcctgaataccgtaggtagcagcccctgataactatactaaagtagctgatcctagatgctatataggactgcactacctgctatgcttgacagaatttcgatacatatcctcttgtaggaggatggaaagaagcctacagatagtaattacaaattatagtaataatttgacaaggaccaagaagaatacatatacctgttgatcaataatcacaagatccaaatgtttgattggatcatcatcatttttgccatgaaattcccaaactcttgatatccgaacacaaatgatatagtggtagacccctggtcgaacttgtgatagtggtgtaatgtccatctgcaaatacaatttgttaaaaatagtatcaatttatgttgccatggctctcaatagattgtagtacttctttatacacaatattttctgttattgttccacatgaaccgtcgtcattttctatcaatattttgagccctttcttttctgtaactcgtgacacagctaaatatagttgaccgtgtgtaaacacctttttctttaaatataaccctacatttgatagtgtttgtccttgacttttatttatagtcatagagtagcaaaccttgattggaaattggcgttgacataatgtaaaaggccatttattgcccttagttgtcagattaatgcggggtatatgtattttttcgccaacgtgtgtacctgttattattgttccttctataattgtgtctcctagttgagttataataattctggttccattgcatagtcctaaactttgatttaaatttcgtagaagcattacaggagtgccaattttaagttttagtctatgagaagggaaattgtttgcgtttaaagtgtttagatactcaatagggtataaaatattggcatcatttggagcatctgtgcatttagatatgctatctgcactatagtattctctctctactgttggcaaaagagagataatataatcatttatttcatctacaacatcattagttgttgctaatatagctctttttttgatataatctggatcattatattttgtttgtaggtcaggataagtaaattgaactaatgcttgaattttatcctctgttgtttcaattaaaaattcttttggtatttcaatgagtgttgagtccgaggaaaaattatcgttgttgttatataccccatttccaatggcaaggatccaattattgaatgataacaagtcttcatactcttcatttgatatattactttgtcgtagtcgcatgttttcagaaaggaatataatgttgacatggttccaaaggtatgaagcaatgatacaagcatttattatttgttcttttgttccattttctataacaggtaatatttgttttggatcgccacctagcacaaccactttaccaccaaaaggaatgtcaagagctttttcatatgtttctcctactatatctctaagggatctatcaaatgcttcaaagcattgtttatttgtcattagagcttcatcccatataataagatctgtgtcaataagaagttttgcaagatttgttcctctttttatatcacacattgacaattgatccaaatctataggtatacgaaatcttgagtgagctgtacgtccatttggaagtagcaaagaagcaactcctgatgatgcaactgtaaggacaatctttcttatagctctaagttcgaatatattggttcctgattattgtgtctcgtcatggatttattgcgttcattgaaccagaaaattgcatcgcagtgtctacatttgtattctagtttaccaagaagagaggtgttttgaaatagaagagagggtacatatttgagcatatgtagagcccaggtacctcgctctacaacatcaaggattatcttgtcattcataaggtacgccgctctacaacatcaaggcttatctcgtcatttagattatgtaggctatatgcaaatattcgttatacattggttggattgcacccaatattctacttcttgtttaaatttttgatgctttcgttccaacctttatttttatactttctcatagtctgtcattgttgattgaaggtcacttttaagagctattgtcatattgattttcctcattatttatcttttttagagttaaaggccctttcttcagtctttcactattaagacacaatttcatgttgcaaagatcttcaatggatgatattgatgacgatatataagggatatcactcttgagccacataagcttgatgaagagattgttgaatctaatcttgagcttgaagcagactttgtacaatttaaatatgatgatcgatcacaaaaggtacttcattctgttgccacaaacatgtttagcgacaaggagatgtgctgctaagtctgtttttacatggaagatgggaaatggacataaacagtgaacatgaagaagggtgtgctagatggaaaggaaaccggtcaagctgattgaataagaagaagtctcttaactactataaatccatccatgaaatggagaagattaatgctaagccacttcaagaaaaaaggttgggtctagtcgttgttgtctctatactggcaaagggaatgcggagatacatttcgagaagaaaaaggcaatgatatggaggtgttttgtctttcattgataaaaaattagaaatgagcaggtgatgaatgtcacatgaatatatttagctatttcaaatggaaaccaactttgttattgtactggcttttgttcataataaaaacacagaaggcaatggaaaatctacatgcaaatgttttgct

SEQ ID NO: 39893 - DNA, 2688 bp, Zea Mays
gaatgcttcattagatgaagaagggagtacaatgtatagccagaagggtgcaacactagggaaggtgtggcatcctggctattagatcctgaataccgtaggtagcagcccctgataactatactaaagtagctgatcctagatgctatataggactgcactacctgctatgcttgacagaatttcgatacatatcctcttgtaggaggatggaaagaagcctacagatagtaattacaaattatagtaataatttgacaaggaccaagaagaatacatatacctgttgatcaataatcacaagatccaaatgtttgattggatcatcatcatttttgccatgaaattcccaaactcttgatatccgaacacaaatgatatagtggtagacccctggtcgaacttgtgatagtggtgtaatgtccatctgcaaatacaatttgttaaaaatagtatcaatttatgttgccatggctctcaatagattgtagtacttctttatacacaatattttctgttattgttccacatgaaccgtcgtcattttctatcaatattttgagccctttcttttctgtaactcgtgacacagctaaatatagttgaccgtgtgtaaacacctttttctttaaatataaccctacatttgatagtgtttgtccttgacttttatttatagtcatagagtagcaaaccttgattggaaattggcgttgacataatgtaaaaggccatttattgcccttagttgtcagattaatgcggggtatatgtattttttcgccaacgtgtgtacctgttattattgttccttctataattgtgtctcctagttgagttataataattctggttccattgcatagtcctaaactttgatttaaatttcgtagaagcattacaggagtgccaattttaagttttagtctatgagaagggaaattgtttgcgtttaaagtgtttagatactcaatagggtataaaatattggcatcatttggagcatctgtgcatttagatatgctatctgcactatagtattctctctctactgttggcaaaagagagataatataatcatttatttcatctacaacatcattagttgttgctaatatagctctttttttgatataatctggatcattatattttgtttgtaggtcaggataagtaaattgaactaatgcttgaattttatcctctgttgtttcaattaaaaattcttttggtatttcaatgagtgttgagtccgaggaaaaattatcgttgttgttatataccccatttccaatggcaaggatccaattattgaatgataacaagtcttcatactcttcatttgatatattactttgtcgtagtcgcatgttttcagaaaggaatataatgttgacatggttccaaaggtatgaagcaatgatacaagcatttattatttgttcttttgttccattttctataacaggtaatatttgttttggatcgccacctagcacaaccactttaccaccaaaaggaatgtcaagagctttttcatatgtttctcctactatatctctaagggatctatcaaatgcttcaaagcattgtttatttgtcattagagcttcatcccatataataagatctgtgtcaataagaagttttgcaagatttgttcctctttttatatcacacattgacaattgatccaaatctataggtatacgaaatcttgagtgagctgtacgtccatttggaagtagcaaagaagcaactcctgatgatgcaactgtaaggacaatctttcttatagctctaagcagttcgaatatattggttcctgattattgtgtctcgtcatggatttattgcgttcattgaaccagaaaattgcatcgcagtgtctacatttgtattctagtttaccaagaagagaggtgttttgaaatagaagagagggtacatatttgagcatatgtagagcccaggtacctcgctctacaacatcaaggattatcttgtcattcataagagttaaaggccctttcttcagtctttcactattaagacacaatttcatgttgcaaagatcttcaatggatgatattgatgacgatatataagggatatcactcttgagccacataagcttgatgaagagattgttgaatctaatcttgagcttgaagcagactttgtacaatttaaatatgatgatcgatcacaaaaggtacttcattctgttgccacaaacatgtttagcgacaaggagatgtgctgctaagtctgtttttacatggaagatgggaaatggacataaacagtgaacatgaagaagggtgtgctagatggaaaggaaaccggtcaagctgattgaataagaagaagtctcttaactactataaatccatccatgaaatggagaagattaatgctaagccacttcaagaaaaaaggttgggtctagtcgttgttgtctctatactggcaaagggaatgcggagatacatttcgagaagaaaaaggcaatgatatggaggtgttttgtctttcattgataaaaaattagaaatgagcaggtgatgaatgtcacatgaatatatttagctatttcaaatggaaaccaactttgttattgtactggcttttgttcataataaaaacacagaaggcaatggaaaatctacatgcaaatgttttgct

SEQ ID NO: 39894 - DNA, 2715 bp, Zea Mays
gaatgcttcattagatgaagaagggagtacaatgtatagccagaagggtgcaacactagggaaggtgtggcatcctggctattagatcctgaataccgtaggtagcagcccctgataactatactaaagtagctgatcctagatgctatataggactgcactacctgctatgcttgacagaatttcgatacatatcctcttgtaggaggatggaaagaagcctacagatagtaattacaaattatagtaataatttgacaaggaccaagaagaatacatatacctgttgatcaataatcacaagatccaaatgtttgattggatcatcatcatttttgccatgaaattcccaaactcttgatatccgaacacaaatgatatagtggtagacccctggtcgaacttgtgatagtggtgtaatgtccatctgcaaatacaatttgttaaaaatagtatcaatttatgttgccatggctctcaatagattgtagtacttctttatacacaatattttctgttattgttccacatgaaccgtcgtcattttctatcaatattttgagccctttcttttctgtaactcgtgacacagctaaatatagttgaccgtgtgtaaacacctttttctttaaatataaccctacatttgatagtgtttgtccttgacttttatttatagtcatagagtagcaaaccttgattggaaattggcgttgacataatgtaaaaggccatttattgcccttagttgtcagattaatgcggggtatatgtattttttcgccaacgtgtgtacctgttattattgttccttctataattgtgtctcctagttgagttataataattctggttccattgcatagtcctaaactttgatttaaatttcgtagaagcattacaggagtgccaattttaagttttagtctatgagaagggaaattgtttgcgtttaaagtgtttagatactcaatagggtataaaatattggcatcatttggagcatctgtgcatttagatatgctatctgcactatagtattctctctctactgttggcaaaagagagataatataatcatttatttcatctacaacatcattagttgttgctaatatagctctttttttgatataatctggatcattatattttgtttgtaggtcaggataagtaaattgaactaatgcttgaattttatcctctgttgtttcaattaaaaattcttttggtatttcaatgagtgttgagtccgaggaaaaattatcgttgttgttatataccccatttccaatggcaaggatccaattattgaatgataacaagtcttcatactcttcatttgatatattactttgtcgtagtcgcatgttttcagaaaggaatataatgttgacatggttccaaaggtatgaagcaatgatacaagcatttattatttgttcttttgttccattttctataacaggtaatatttgttttggatcgccacctagcacaaccactttaccaccaaaaggaatgtcaagagctttttcatatgtttctcctactatatctctaagggatctatcaaatgcttcaaagcattgtttatttgtcattagagcttcatcccatataataagatctgtgtcaataagaagttttgcaagatttgttcctctttttatatcacacattgacaattgatccaaatctataggtatacgaaatcttgagtgagctgtacgtccatttggaagtagcaaagaagcaactcctgatgatgcaactgtaaggacaatctttcttatagctctaagcagttcgaatatattggttcctgattattgtgtctcgtcatggatttattgcgttcattgaaccagaaaattgcatcgcagtgtctacatttgtattctagtttaccaagatctttttgttggagggttcacagtttttagacatcttcctctttctaatcctttcaccgcgtcttattttactctcttctccaaaaaagttactgctctaagagaggtgttttgaaatagaagagagggtacatatttgagcatatgtagagcccaggtacctcgctctacaacatcaaggattatcttgtcattcataagagttaaaggccctttcttcagtctttcactattaagacacaatttcatgttgcaaagatcttcaatggatgatattgatgacgatatataagggatatcactcttgagccacataagcttgatgaagagattgttgaatctaatcttgagcttgaagcagactttgtacaatttaaatatgatgatcgatcacaaaagatgggaaatggacataaacagtgaacatgaagaagggtgtgctagatggaaaggaaaccggtcaagctgattgaataagaagaagtctcttaactactataaatccatccatgaaatggagaagattaatgctaagccacttcaagaaaaaaggttgggtctagtcgttgttgtctctatactggcaaagggaatgcggagatacatttcgagaagaaaaaggcaatgatatggaggtgttttgtctttcattgataaaaaattagaaatgagcaggtgatgaatgtcacatgaatatatttagctatttcaaatggaaaccaactttgttattgtactggcttttgttcataataaaaacacagaaggcaatggaaaatctacatgcaaatgttttgct

SEQ ID NO: 39895 - DNA, 4260 bp, Zea Mays
cttctaagtaatttatatcataactcatttcttcttggattagtctgtttatgttatcaatatgttttgtgtgttgtcgcctgggtaaattgtagttatttatttcctgcccattcttagagaatagctcttctagttcttcaagtaaataatgttgtagttctaattcagagggtgtatatttgatagggtggtatttttggataagatgtttgtgaatgtcatcgaccattgtgtgccatgtggtgttgaaaaattctttttcatcttttatttggcaatatgttagcattatgacaaatagattgcgtagttcaaatgatgttgcccaattagttgcttcttgatatgtgcgataccactcattgtcatcgtctagtaatcctctagctgcgcaagcctctttaaaggtttggtataaaacaccattatacgttcgtatatcttcatagtttttagcacctttaacaatcattagaagcattcttaaatagaatctttcaccttcagcagggtttacataatagagccttccaaatttgaaaccatgttgtcttttcttccattgtcttttttctccatcccaacgccattgtttgggaaactcatagtatgttaattcttttgcatcttcatattgcttatttgcattaaaccattcagttagcattgtctttctatactttagatctttagctatgtctatcaatttatcatttgatttcatcttaattatattcatcaatggtagatgaactggcagtctttctataggtggccaatggtaatgtatctcgtatcctaataatctccaaagagcatcttgctcgcatatatatctgcagtctagatattcttgtatctcatctatagtttctgcttctttgtttacatgtgattcttctcctttttggatttttttgaatataacctttgctctatcaggtcctttgtttacatatttgcataaatatttcaagactgtactcttgtttacatattcaacatttatatgagcttggtatctttttaatagttttaaattatgtggcacaacccatttgttgtctaagttgtgttgttctcttctgatgaaaatcccattgttcctccttcgatatattgtaaagccattttcagagaatgtagtgttttcttcaaaatctttggggtaaattttggagcatttgccttttttcatgcatggacaattccaatttttatctccgcacggtccatgcatcatatgttcagcaacaagagcatatcccaaaggatctaactcgggatctggtatttcagcagatatccacgaatctattgtttctgtagttatttcacaacctttcttgtctaaccaaattaatgtgtgcacatgtggtagacctcgtttttggaattctatagaatatagtagtgctagtacaaggccaaatacctttcctgattgtaagtcatccaaaagttgttgtagtttcatatgaaaaacacggacaataatatcaggtctatcatttggatgctcacctggtaataaacatgttgttattttaggccatttagggttacaagtgcatgtaataaaaagatctggtggcccataggcacaacaaatagcaatgccatcatggtaattttgtatcatataccgttttgatccaacatggctagatggtaataacaccttttttcctattcgactggcgtcatatattcctttttctactgcatcaaaaataccttgtacatattcagctcgtaattttgattgatttctaacaatataatcaagcctgtcttcatcctccattgctcgaccgtctactactacttgttttgataatcggccataacataaccagggattaggctgattaggtctatagtgcacatgatatttcaaaaattcatgcaaagttactctatctcttttggagtcatctctgttttgactaatgtgttgtccatggtatttaatacctagttgaaagcctcgttcgccatatggaaataggagcgggtattgtagaggcatatatgctggatggaaaatagatatcctttgaaggctattttggtgtgtgctaacaatgatgtcccgtttgtagttctcaagtgataaatcacctacaatcagcatagctaattcttcctgatgtggcatctcatattgaattctatcagtttcgtcagcgcctactattctaatgcttacatctatgcctttgtgttcttcgagaaaatcacgagcttggcggaatatttttactaatggattatattcgtcgagcatttttttagccctctcactatttctggatctatgtcttgctcacctggttcttcatttgttagagccctaattctattttcaatttcattctttgtatcaaaaatatatagttctgcaaatttggggcaattgtctggtaagggtagtaatgatcctattcgatgatgtatttggccattgacacgaaacacatatggtccctcaccatcatttatttttttatcaatatttccccccatggaagtaaatgcaaacatgctattatattgtcttattttttgtagaaaatgtttacatcttgtgtccatttttcgttgtattaattcattaagaaaagttgggggttctttatattttggtattctgattttgccatttttgcagcagttcgaatatattggttcctgattattgtgtctcgtcatggatttattgcgttcattgaaccagaaaattgcatcgcagtgtctacatttgtattctagtttaccaagatctttttgttggagggttcacagtttttagacatcttcctctttctaatcctttcaccgcgtcttattttactctcttctccaaaaaagttactgctctgtaagacttgctcacttctttttcttttcgtagggtggtcaatatcaatgccttgtttatgacttcttattattttccccatgtctatatcctatgtgatggatgcatgggtccaaaaagataaaatgaaaatatactgttagtaaccaatgaattgtacaaaaaatattatatgcaatgactatacattgaaatgcacacaactaaattaaagctatagttacatgcatagtacaattgaatgttacaaatactgcttttattagccagtgttatgtctttatttatactaatgctattcacatactatggagatttagaccattggaaatgcactttgtaatacttaacttggtgttctaaaacataagataggtgttctgaaacataagatatgaaattgcacttggtaatacttagtgtggtgttctaaaacagaagagaggtgttttgaaatagaagagagggtacatatttgagcatatgtagagcccaggtacctcgctctacaacatcaaggattatcttgtcattcataaggtacgccgctctacaacatcaaggcttatctcgtcatttagattatgtaggctatatgcaaatattcgttatacattggttggattgcacccaatattctacttcttgtttaaatttttgatgctttcgttccaacctttatttttatactttctcatagtctgtcattgttgattgaaggtcacttttaagagctattgtcatattgattttcctcattatttatcttttttagagttaaaggccctttcttcagtctttcactattaagacacaatttcatgttgcaaagatcttcaatggatgatattgatgacgatatataagggatatcactcttgagccacataagcttgatgaagagattgttgaatctaatcttgagcttgaagcagactttgtacaatttaaatatgatgatcgatcacaaaagatgggaaatggacataaacagtgaacatgaagaagggtgtgctagatggaaaggaaaccggtcaagctgattgaataagaagaagtctcttaactactataaatccatccatgaaatggagaagattaatgctaagccacttcaagaaaaaaggttgggtctagtcgttgttgtctctatactggcaaagggaatgcggagatacatttcgagaagaaaaaggcaatgatatggaggtgttttgtctttcattgataaaaaattagaaatgagcaggtgatgaatgtcacatgaatatatttagctatttcaaatggaaaccaactttgttattgtactggcttttgttcataataaaaacacagaaggcaatggaaaatctacatgcaaatgttttgct

SEQ ID NO: 39896 - DNA, 3649 bp, Zea Mays
cttctaagtaatttatatcataactcatttcttcttggattagtctgtttatgttatcaatatgttttgtgtgttgtcgcctgggtaaattgtagttatttatttcctgcccattcttagagaatagctcttctagttcttcaagtaaataatgttgtagttctaattcagagggtgtatatttgatagggtggtatttttggataagatgtttgtgaatgtcatcgaccattgtgtgccatgtggtgttgaaaaattctttttcatcttttatttggcaatatgttagcattatgacaaatagattgcgtagttcaaatgatgttgcccaattagttgcttcttgatatgtgcgataccactcattgtcatcgtctagtaatcctctagctgcgcaagcctctttaaaggtttggtataaaacaccattatacgttcgtatatcttcatagtttttagcacctttaacaatcattagaagcattcttaaatagaatctttcaccttcagcagggtttacataatagagccttccaaatttgaaaccatgttgtcttttcttccattgtcttttttctccatcccaacgccattgtttgggaaactcatagtatgttaattcttttgcatcttcatattgcttatttgcattaaaccattcagttagcattgtctttctatactttagatctttagctatgtctatcaatttatcatttgatttcatcttaattatattcatcaatggtagatgaactggcagtctttctataggtggccaatggtaatgtatctcgtatcctaataatctccaaagagcatcttgctcgcatatatatctgcagtctagatattcttgtatctcatctatagtttctgcttctttgtttacatgtgattcttctcctttttggatttttttgaatataacctttgctctatcaggtcctttgtttacatatttgcataaatatttcaagactgtactcttgtttacatattcaacatttatatgagcttggtatctttttaatagttttaaattatgtggcacaacccatttgttgtctaagttgtgttgttctcttctgatgaaaatcccattgttcctccttcgatatattgtaaagccattttcagagaatgtagtgttttcttcaaaatctttggggtaaattttggagcatttgccttttttcatgcatggacaattccaatttttatctccgcacggtccatgcatcatatgttcagcaacaagagcatatcccaaaggatctaactcgggatctggtatttcagcagatatccacgaatctattgtttctgtagttatttcacaacctttcttgtctaaccaaattaatgtgtgcacatgtggtagacctcgtttttggaattctatagaatatagtagtgctagtacaaggccaaatacctttcctgattgtaagtcatccaaaagttgttgtagtttcatatgaaaaacacggacaataatatcaggtctatcatttggatgctcacctggtaataaacatgttgttattttaggccatttagggttacaagtgcatgtaataaaaagatctggtggcccataggcacaacaaatagcaatgccatcatggtaattttgtatcatataccgttttgatccaacatggctagatggtaataacaccttttttcctattcgactggcgtcatatattcctttttctactgcatcaaaaataccttgtacatattcagctcgtaattttgattgatttctaacaatataatcaagcctgtcttcatcctccattgctcgaccgtctactactacttgttttgataatcggccataacataaccagggattaggctgattaggtctatagtgcacatgatatttcaaaaattcatgcaaagttactctatctcttttggagtcatctctgttttgactaatgtgttgtccatggtatttaatacctagttgaaagcctcgttcgccatatggaaataggagcgggtattgtagaggcatatatgctggatggaaaatagatatcctttgaaggctattttggtgtgtgctaacaatgatgtcccgtttgtagttctcaagtgataaatcacctacaatcagcatagctaattcttcctgatgtggcatctcatattgaattctatcagtttcgtcagcgcctactattctaatgcttacatctatgcctttgtgttcttcgagaaaatcacgagcttggcggaatatttttactaatggattatattcgtcgagcatttttttagccctctcactatttctggatctatgtcttgctcacctggttcttcatttgttagagccctaattctattttcaatttcattctttgtatcaaaaatatatagttctgcaaatttggggcaattgtctggtaagggtagtaatgatcctattcgatgatgtatttggccattgacacgaaacacatatggtccctcaccatcatttatttttttatcaatatttccccccatggaagtaaatgcaaacatgctattatattgtcttattttttgtagaaaatgtttacatcttgtgtccatttttcgttgtattaattcattaagaaaagttgggggttctttatattttggtattctgattttgccatttttgcagcagttcgaatatattggttcctgattattgtgtctcgtcatggatttattgcgttcattgaaccagaaaattgcatcgcagtgtctacatttgtattctagtttaccaagatctttttgttggagggttcacagtttttagacatcttcctctttctaatcctttcaccgcgtcttattttactctcttctccaaaaaaaagagaggtgttttgaaatagaagagagggtacatatttgagcatatgtagagcccaggtacctcgctctacaacatcaaggattatcttgtcattcataagagttaaaggccctttcttcagtctttcactattaagacacaatttcatgttgcaaagatcttcaatggatgatattgatgacgatatataagggatatcactcttgagccacataagcttgatgaagagattgttgaatctaatcttgagcttgaagcagactttgtacaatttaaatatgatgatcgatcacaaaaggtacttcattctgttgccacaaacatgtttagcgacaaggagatgtgctgctaagtctgtttttacatggaagatgggaaatggacataaacagtgaacatgaagaagggtgtgctagatggaaaggaaaccggtcaagctgattgaataagaagaagtctcttaactactataaatccatccatgaaatggagaagattaatgctaagccacttcaagaaaaaaggttgggtctagtcgttgttgtctctatactggcaaagggaatgcggagatacatttcgagaagaaaaaggcaatgatatggaggtgttttgtctttcattgataaaaaattagaaatgagcaggtgatgaatgtcacatgaatatatttagctatttcaaatggaaaccaactttgttattgtactggcttttgttcataataaaaacacagaaggcaatggaaaatctacatgcaaatgttttgct

SEQ ID NO: 39897 - DNA, 3587 bp, Zea Mays
cttctaagtaatttatatcataactcatttcttcttggattagtctgtttatgttatcaatatgttttgtgtgttgtcgcctgggtaaattgtagttatttatttcctgcccattcttagagaatagctcttctagttcttcaagtaaataatgttgtagttctaattcagagggtgtatatttgatagggtggtatttttggataagatgtttgtgaatgtcatcgaccattgtgtgccatgtggtgttgaaaaattctttttcatcttttatttggcaatatgttagcattatgacaaatagattgcgtagttcaaatgatgttgcccaattagttgcttcttgatatgtgcgataccactcattgtcatcgtctagtaatcctctagctgcgcaagcctctttaaaggtttggtataaaacaccattatacgttcgtatatcttcatagtttttagcacctttaacaatcattagaagcattcttaaatagaatctttcaccttcagcagggtttacataatagagccttccaaatttgaaaccatgttgtcttttcttccattgtcttttttctccatcccaacgccattgtttgggaaactcatagtatgttaattcttttgcatcttcatattgcttatttgcattaaaccattcagttagcattgtctttctatactttagatctttagctatgtctatcaatttatcatttgatttcatcttaattatattcatcaatggtagatgaactggcagtctttctataggtggccaatggtaatgtatctcgtatcctaataatctccaaagagcatcttgctcgcatatatatctgcagtctagatattcttgtatctcatctatagtttctgcttctttgtttacatgtgattcttctcctttttggatttttttgaatataacctttgctctatcaggtcctttgtttacatatttgcataaatatttcaagactgtactcttgtttacatattcaacatttatatgagcttggtatctttttaatagttttaaattatgtggcacaacccatttgttgtctaagttgtgttgttctcttctgatgaaaatcccattgttcctccttcgatatattgtaaagccattttcagagaatgtagtgttttcttcaaaatctttggggtaaattttggagcatttgccttttttcatgcatggacaattccaatttttatctccgcacggtccatgcatcatatgttcagcaacaagagcatatcccaaaggatctaactcgggatctggtatttcagcagatatccacgaatctattgtttctgtagttatttcacaacctttcttgtctaaccaaattaatgtgtgcacatgtggtagacctcgtttttggaattctatagaatatagtagtgctagtacaaggccaaatacctttcctgattgtaagtcatccaaaagttgttgtagtttcatatgaaaaacacggacaataatatcaggtctatcatttggatgctcacctggtaataaacatgttgttattttaggccatttagggttacaagtgcatgtaataaaaagatctggtggcccataggcacaacaaatagcaatgccatcatggtaattttgtatcatataccgttttgatccaacatggctagatggtaataacaccttttttcctattcgactggcgtcatatattcctttttctactgcatcaaaaataccttgtacatattcagctcgtaattttgattgatttctaacaatataatcaagcctgtcttcatcctccattgctcgaccgtctactactacttgttttgataatcggccataacataaccagggattaggctgattaggtctatagtgcacatgatatttcaaaaattcatgcaaagttactctatctcttttggagtcatctctgttttgactaatgtgttgtccatggtatttaatacctagttgaaagcctcgttcgccatatggaaataggagcgggtattgtagaggcatatatgctggatggaaaatagatatcctttgaaggctattttggtgtgtgctaacaatgatgtcccgtttgtagttctcaagtgataaatcacctacaatcagcatagctaattcttcctgatgtggcatctcatattgaattctatcagtttcgtcagcgcctactattctaatgcttacatctatgcctttgtgttcttcgagaaaatcacgagcttggcggaatatttttactaatggattatattcgtcgagcatttttttagccctctcactatttctggatctatgtcttgctcacctggttcttcatttgttagagccctaattctattttcaatttcattctttgtatcaaaaatatatagttctgcaaatttggggcaattgtctggtaagggtagtaatgatcctattcgatgatgtatttggccattgacacgaaacacatatggtccctcaccatcatttatttttttatcaatatttccccccatggaagtaaatgcaaacatgctattatattgtcttattttttgtagaaaatgtttacatcttgtgtccatttttcgttgtattaattcattaagaaaagttgggggttctttatattttggtattctgattttgccatttttgcagcagttcgaatatattggttcctgattattgtgtctcgtcatggatttattgcgttcattgaaccagaaaattgcatcgcagtgtctacatttgtattctagtttaccaagatctttttgttggagggttcacagtttttagacatcttcctctttctaatcctttcaccgcgtcttattttactctcttctccaaaaaagttactgctctaagagaggtgttttgaaatagaagagagggtacatatttgagcatatgtagagcccaggtacctcgctctacaacatcaaggattatcttgtcattcataagagttaaaggccctttcttcagtctttcactattaagacacaatttcatgttgcaaagatcttcaatggatgatattgatgacgatatataagggatatcactcttgagccacataagcttgatgaagagattgttgaatctaatcttgagcttgaagcagactttgtacaatttaaatatgatgatcgatcacaaaagatgggaaatggacataaacagtgaacatgaagaagggtgtgctagatggaaaggaaaccggtcaagctgattgaataagaagaagtctcttaactactataaatccatccatgaaatggagaagattaatgctaagccacttcaagaaaaaaggttgggtctagtcgttgttgtctctatactggcaaagggaatgcggagatacatttcgagaagaaaaaggcaatgatatggaggtgttttgtctttcattgataaaaaattagaaatgagcaggtgatgaatgtcacatgaatatatttagctatttcaaatggaaaccaactttgttattgtactggcttttgttcataataaaaacacagaaggcaatggaaaatctacatgcaaatgttttgct

SEQ ID NO: 39898 - DNA, 3822 bp, Zea Mays
cttctaagtaatttatatcataactcatttcttcttggattagtctgtttatgttatcaatatgttttgtgtgttgtcgcctgggtaaattgtagttatttatttcctgcccattcttagagaatagctcttctagttcttcaagtaaataatgttgtagttctaattcagagggtgtatatttgatagggtggtatttttggataagatgtttgtgaatgtcatcgaccattgtgtgccatgtggtgttgaaaaattctttttcatcttttatttggcaatatgttagcattatgacaaatagattgcgtagttcaaatgatgttgcccaattagttgcttcttgatatgtgcgataccactcattgtcatcgtctagtaatcctctagctgcgcaagcctctttaaaggtttggtataaaacaccattatacgttcgtatatcttcatagtttttagcacctttaacaatcattagaagcattcttaaatagaatctttcaccttcagcagggtttacataatagagccttccaaatttgaaaccatgttgtcttttcttccattgtcttttttctccatcccaacgccattgtttgggaaactcatagtatgttaattcttttgcatcttcatattgcttatttgcattaaaccattcagttagcattgtctttctatactttagatctttagctatgtctatcaatttatcatttgatttcatcttaattatattcatcaatggtagatgaactggcagtctttctataggtggccaatggtaatgtatctcgtatcctaataatctccaaagagcatcttgctcgcatatatatctgcagtctagatattcttgtatctcatctatagtttctgcttctttgtttacatgtgattcttctcctttttggatttttttgaatataacctttgctctatcaggtcctttgtttacatatttgcataaatatttcaagactgtactcttgtttacatattcaacatttatatgagcttggtatctttttaatagttttaaattatgtggcacaacccatttgttgtctaagttgtgttgttctcttctgatgaaaatcccattgttcctccttcgatatattgtaaagccattttcagagaatgtagtgttttcttcaaaatctttggggtaaattttggagcatttgccttttttcatgcatggacaattccaatttttatctccgcacggtccatgcatcatatgttcagcaacaagagcatatcccaaaggatctaactcgggatctggtatttcagcagatatccacgaatctattgtttctgtagttatttcacaacctttcttgtctaaccaaattaatgtgtgcacatgtggtagacctcgtttttggaattctatagaatatagtagtgctagtacaaggccaaatacctttcctgattgtaagtcatccaaaagttgttgtagtttcatatgaaaaacacggacaataatatcaggtctatcatttggatgctcacctggtaataaacatgttgttattttaggccatttagggttacaagtgcatgtaataaaaagatctggtggcccataggcacaacaaatagcaatgccatcatggtaattttgtatcatataccgttttgatccaacatggctagatggtaataacaccttttttcctattcgactggcgtcatatattcctttttctactgcatcaaaaataccttgtacatattcagctcgtaattttgattgatttctaacaatataatcaagcctgtcttcatcctccattgctcgaccgtctactactacttgttttgataatcggccataacataaccagggattaggctgattaggtctatagtgcacatgatatttcaaaaattcatgcaaagttactctatctcttttggagtcatctctgttttgactaatgtgttgtccatggtatttaatacctagttgaaagcctcgttcgccatatggaaataggagcgggtattgtagaggcatatatgctggatggaaaatagatatcctttgaaggctattttggtgtgtgctaacaatgatgtcccgtttgtagttctcaagtgataaatcacctacaatcagcatagctaattcttcctgatgtggcatctcatattgaattctatcagtttcgtcagcgcctactattctaatgcttacatctatgcctttgtgttcttcgagaaaatcacgagcttggcggaatatttttactaatggattatattcgtcgagcatttttttagccctctcactatttctggatctatgtcttgctcacctggttcttcatttgttagagccctaattctattttcaatttcattctttgtatcaaaaatatatagttctgcaaatttggggcaattgtctggtaagggtagtaatgatcctattcgatgatgtatttggccattgacacgaaacacatatggtccctcaccatcatttatttttttatcaatatttccccccatggaagtaaatgcaaacatgctattatattgtcttattttttgtagaaaatgtttacatcttgtgtccatttttcgttgtattaattcattaagaaaagttgggggttctttatattttggtattctgattttgccatttttgcagcagttcgaatatattggttcctgattattgtgtctcgtcatggatttattgcgttcattgaaccagaaaattgcatcgcagtgtctacatttgtattctagtttaccaagatctttttgttggagggttcacagtttttagacatcttcctctttctaatcctttcaccgcgtcttattttactctcttctccaaaaaagttactgctctaagagaggtgttttgaaatagaagagagggtacatatttgagcatatgtagagcccaggtacctcgctctacaacatcaaggattatcttgtcattcataaggtacgccgctctacaacatcaaggcttatctcgtcatttagattatgtaggctatatgcaaatattcgttatacattggttggattgcacccaatattctacttcttgtttaaatttttgatgctttcgttccaacctttatttttatactttctcatagtctgtcattgttgattgaaggtcacttttaagagctattgtcatattgattttcctcattatttatcttttttagagttaaaggccctttcttcagtctttcactattaagacacaatttcatgttgcaaagatcttcaatggatgatattgatgacgatatataagggatatcactcttgagccacataagcttgatgaagagattgttgaatctaatcttgagcttgaagcagactttgtacaatttaaatatgatgatcgatcacaaaagatgggaaatggacataaacagtgaacatgaagaagggtgtgctagatggaaaggaaaccggtcaagctgattgaataagaagaagtctcttaactactataaatccatccatgaaatggagaagattaatgctaagccacttcaagaaaaaaggttgggtctagtcgttgttgtctctatactggcaaagggaatgcggagatacatttcgagaagaaaaaggcaatgatatggaggtgttttgtctttcattgataaaaaattagaaatgagcaggtgatgaatgtcacatgaatatatttagctatttcaaatggaaaccaactttgttattgtactggcttttgttcataataaaaacacagaaggcaatggaaaatctacatgcaaatgttttgct

SEQ ID NO: 39899 - DNA, 3762 bp, Zea Mays
cttctaagtaatttatatcataactcatttcttcttggattagtctgtttatgttatcaatatgttttgtgtgttgtcgcctgggtaaattgtagttatttatttcctgcccattcttagagaatagctcttctagttcttcaagtaaataatgttgtagttctaattcagagggtgtatatttgatagggtggtatttttggataagatgtttgtgaatgtcatcgaccattgtgtgccatgtggtgttgaaaaattctttttcatcttttatttggcaatatgttagcattatgacaaatagattgcgtagttcaaatgatgttgcccaattagttgcttcttgatatgtgcgataccactcattgtcatcgtctagtaatcctctagctgcgcaagcctctttaaaggtttggtataaaacaccattatacgttcgtatatcttcatagtttttagcacctttaacaatcattagaagcattcttaaatagaatctttcaccttcagcagggtttacataatagagccttccaaatttgaaaccatgttgtcttttcttccattgtcttttttctccatcccaacgccattgtttgggaaactcatagtatgttaattcttttgcatcttcatattgcttatttgcattaaaccattcagttagcattgtctttctatactttagatctttagctatgtctatcaatttatcatttgatttcatcttaattatattcatcaatggtagatgaactggcagtctttctataggtggccaatggtaatgtatctcgtatcctaataatctccaaagagcatcttgctcgcatatatatctgcagtctagatattcttgtatctcatctatagtttctgcttctttgtttacatgtgattcttctcctttttggatttttttgaatataacctttgctctatcaggtcctttgtttacatatttgcataaatatttcaagactgtactcttgtttacatattcaacatttatatgagcttggtatctttttaatagttttaaattatgtggcacaacccatttgttgtctaagttgtgttgttctcttctgatgaaaatcccattgttcctccttcgatatattgtaaagccattttcagagaatgtagtgttttcttcaaaatctttggggtaaattttggagcatttgccttttttcatgcatggacaattccaatttttatctccgcacggtccatgcatcatatgttcagcaacaagagcatatcccaaaggatctaactcgggatctggtatttcagcagatatccacgaatctattgtttctgtagttatttcacaacctttcttgtctaaccaaattaatgtgtgcacatgtggtagacctcgtttttggaattctatagaatatagtagtgctagtacaaggccaaatacctttcctgattgtaagtcatccaaaagttgttgtagtttcatatgaaaaacacggacaataatatcaggtctatcatttggatgctcacctggtaataaacatgttgttattttaggccatttagggttacaagtgcatgtaataaaaagatctggtggcccataggcacaacaaatagcaatgccatcatggtaattttgtatcatataccgttttgatccaacatggctagatggtaataacaccttttttcctattcgactggcgtcatatattcctttttctactgcatcaaaaataccttgtacatattcagctcgtaattttgattgatttctaacaatataatcaagcctgtcttcatcctccattgctcgaccgtctactactacttgttttgataatcggccataacataaccagggattaggctgattaggtctatagtgcacatgatatttcaaaaattcatgcaaagttactctatctcttttggagtcatctctgttttgactaatgtgttgtccatggtatttaatacctagttgaaagcctcgttcgccatatggaaataggagcgggtattgtagaggcatatatgctggatggaaaatagatatcctttgaaggctattttggtgtgtgctaacaatgatgtcccgtttgtagttctcaagtgataaatcacctacaatcagcatagctaattcttcctgatgtggcatctcatattgaattctatcagtttcgtcagcgcctactattctaatgcttacatctatgcctttgtgttcttcgagaaaatcacgagcttggcggaatatttttactaatggattatattcgtcgagcatttttttagccctctcactatttctggatctatgtcttgctcacctggttcttcatttgttagagccctaattctattttcaatttcattctttgtatcaaaaatatatagttctgcaaatttggggcaattgtctggtaagggtagtaatgatcctattcgatgatgtatttggccattgacacgaaacacatatggtccctcaccatcatttatttttttatcaatatttccccccatggaagtaaatgcaaacatgctattatattgtcttattttttgtagaaaatgtttacatcttgtgtccatttttcgttgtattaattcattaagaaaagttgggggttctttatattttggtattctgattttgccatttttgcagcagttcgaatatattggttcctgattattgtgtctcgtcatggatttattgcgttcattgaaccagaaaattgcatcgcagtgtctacatttgtattctagtttaccaaggtatgatctgtcagtgtatgattctttcagttgctggatatactcggatgggaaatcaaccattccattatgggagttcaaaaatctttgtatgcagatctttttgttggagggttcacagtttttagacatcttcctctttctaatcctttcaccgcgtcttattttactctcttctccaaaaaagttactgctctgtaagaagagaggtgttttgaaatagaagagagggtacatatttgagcatatgtagagcccaggtacctcgctctacaacatcaaggattatcttgtcattcataagagttaaaggccctttcttcagtctttcactattaagacacaatttcatgttgcaaagatcttcaatggatgatattgatgacgatatataagggatatcactcttgagccacataagcttgatgaagagattgttgaatctaatcttgagcttgaagcagactttgtacaatttaaatatgatgatcgatcacaaaaggtacttcattctgttgccacaaacatgtttagcgacaaggagatgtgctgctaagtctgtttttacatggaagatgggaaatggacataaacagtgaacatgaagaagggtgtgctagatggaaaggaaaccggtcaagctgattgaataagaagaagtctcttaactactataaatccatccatgaaatggagaagattaatgctaagccacttcaagaaaaaaggttgggtctagtcgttgttgtctctatactggcaaagggaatgcggagatacatttcgagaagaaaaaggcaatgatatggaggtgttttgtctttcattgataaaaaattagaaatgagcaggtgatgaatgtcacatgaatatatttagctatttcaaatggaaaccaactttgttattgtactggcttttgttcataataaaaacacagaaggcaatggaaaatctacatgcaaatgttttgct

SEQ ID NO: 39900 - DNA, 3560 bp, Zea Mays
cttctaagtaatttatatcataactcatttcttcttggattagtctgtttatgttatcaatatgttttgtgtgttgtcgcctgggtaaattgtagttatttatttcctgcccattcttagagaatagctcttctagttcttcaagtaaataatgttgtagttctaattcagagggtgtatatttgatagggtggtatttttggataagatgtttgtgaatgtcatcgaccattgtgtgccatgtggtgttgaaaaattctttttcatcttttatttggcaatatgttagcattatgacaaatagattgcgtagttcaaatgatgttgcccaattagttgcttcttgatatgtgcgataccactcattgtcatcgtctagtaatcctctagctgcgcaagcctctttaaaggtttggtataaaacaccattatacgttcgtatatcttcatagtttttagcacctttaacaatcattagaagcattcttaaatagaatctttcaccttcagcagggtttacataatagagccttccaaatttgaaaccatgttgtcttttcttccattgtcttttttctccatcccaacgccattgtttgggaaactcatagtatgttaattcttttgcatcttcatattgcttatttgcattaaaccattcagttagcattgtctttctatactttagatctttagctatgtctatcaatttatcatttgatttcatcttaattatattcatcaatggtagatgaactggcagtctttctataggtggccaatggtaatgtatctcgtatcctaataatctccaaagagcatcttgctcgcatatatatctgcagtctagatattcttgtatctcatctatagtttctgcttctttgtttacatgtgattcttctcctttttggatttttttgaatataacctttgctctatcaggtcctttgtttacatatttgcataaatatttcaagactgtactcttgtttacatattcaacatttatatgagcttggtatctttttaatagttttaaattatgtggcacaacccatttgttgtctaagttgtgttgttctcttctgatgaaaatcccattgttcctccttcgatatattgtaaagccattttcagagaatgtagtgttttcttcaaaatctttggggtaaattttggagcatttgccttttttcatgcatggacaattccaatttttatctccgcacggtccatgcatcatatgttcagcaacaagagcatatcccaaaggatctaactcgggatctggtatttcagcagatatccacgaatctattgtttctgtagttatttcacaacctttcttgtctaaccaaattaatgtgtgcacatgtggtagacctcgtttttggaattctatagaatatagtagtgctagtacaaggccaaatacctttcctgattgtaagtcatccaaaagttgttgtagtttcatatgaaaaacacggacaataatatcaggtctatcatttggatgctcacctggtaataaacatgttgttattttaggccatttagggttacaagtgcatgtaataaaaagatctggtggcccataggcacaacaaatagcaatgccatcatggtaattttgtatcatataccgttttgatccaacatggctagatggtaataacaccttttttcctattcgactggcgtcatatattcctttttctactgcatcaaaaataccttgtacatattcagctcgtaattttgattgatttctaacaatataatcaagcctgtcttcatcctccattgctcgaccgtctactactacttgttttgataatcggccataacataaccagggattaggctgattaggtctatagtgcacatgatatttcaaaaattcatgcaaagttactctatctcttttggagtcatctctgttttgactaatgtgttgtccatggtatttaatacctagttgaaagcctcgttcgccatatggaaataggagcgggtattgtagaggcatatatgctggatggaaaatagatatcctttgaaggctattttggtgtgtgctaacaatgatgtcccgtttgtagttctcaagtgataaatcacctacaatcagcatagctaattcttcctgatgtggcatctcatattgaattctatcagtttcgtcagcgcctactattctaatgcttacatctatgcctttgtgttcttcgagaaaatcacgagcttggcggaatatttttactaatggattatattcgtcgagcatttttttagccctctcactatttctggatctatgtcttgctcacctggttcttcatttgttagagccctaattctattttcaatttcattctttgtatcaaaaatatatagttctgcaaatttggggcaattgtctggtaagggtagtaatgatcctattcgatgatgtatttggccattgacacgaaacacatatggtccctcaccatcatttatttttttatcaatatttccccccatggaagtaaatgcaaacatgctattatattgtcttattttttgtagaaaatgtttacatcttgtgtccatttttcgttgtattaattcattaagaaaagttgggggttctttatattttggtattctgattttgccatttttgcagcagttcgaatatattggttcctgattattgtgtctcgtcatggatttattgcgttcattgaaccagaaaattgcatcgcagtgtctacatttgtattctagtttaccaagaagagaggtgttttgaaatagaagagagggtacatatttgagcatatgtagagcccaggtacctcgctctacaacatcaaggattatcttgtcattcataagagttaaaggccctttcttcagtctttcactattaagacacaatttcatgttgcaaagatcttcaatggatgatattgatgacgatatataagggatatcactcttgagccacataagcttgatgaagagattgttgaatctaatcttgagcttgaagcagactttgtacaatttaaatatgatgatcgatcacaaaaggtacttcattctgttgccacaaacatgtttagcgacaaggagatgtgctgctaagtctgtttttacatggaagatgggaaatggacataaacagtgaacatgaagaagggtgtgctagatggaaaggaaaccggtcaagctgattgaataagaagaagtctcttaactactataaatccatccatgaaatggagaagattaatgctaagccacttcaagaaaaaaggttgggtctagtcgttgttgtctctatactggcaaagggaatgcggagatacatttcgagaagaaaaaggcaatgatatggaggtgttttgtctttcattgataaaaaattagaaatgagcaggtgatgaatgtcacatgaatatatttagctatttcaaatggaaaccaactttgttattgtactggcttttgttcataataaaaacacagaaggcaatggaaaatctacatgcaaatgttttgct

SEQ ID NO: 39901 - DNA, 1579 bp, Zea Mays
gttgtgaaagatggagcgcactcatatggatgaacatgttcattcgtccagaagaggcggtcttcaaactgtcccgttcataatcattaacgaaggatgtgaacggattgtaaacgtagcggtcagtgcaaatattattatatacttgaccaaagagtatcatatgggatctgcggaaagtgcaatggttttgtttatctaccaagcagctacaaacttcttgcctatctttggggctattgtgtctgatgcactattgggacgctttctcacaatctcactcacacttttcgcatgcacgattggagctgttcttctctggttgaccacagtagttccaacattggtcgcagaagattgttcaaatgaagaccagagttgtcactcaccgacaacactacaattttttgtcttgctaacttctttattgttcttgtcaattggcgcaagtggtgttcgcccttgcagccttccttttggtgtggaccagtttacccactggagcggcgctccaaaggaccgtgcgctcaaagttctattcggctggtattacgtatcaatgggtggctcagcaatcatttctataactctcatcgtgtacttgcaagacaaattgggctggaagatcggttttgccatttctatggttatagcggcatttgctgcaattttaaacattgttacatcgcccctttacatcaaggtgaaaccacagaaaagcacgtggattagtttagtgcaagtggttttcatcgctataaggaatcgacacattcagcttcctaaagcagcaggtgagaatgatctgcattactgcaacgttggaggactggcaatggttccatcaagcaaaatgagttgagcaagtcgaggacatcaagcgtgtactaagtgtcatccctatgtggtcagctacgattacaagtttgttgatccaaacggcttcgttcagggtgctacaggcagaaacgatggaccgtcatgttggtagcacaaggttccaaatgcctgctggttcagtcgcaatatttgaaggcattacattcacattggtgtcaggatgcattacaggaagagaaaaaacgcttagtcacaagcagaaaatgggcatcggcgtgctcttttccattgcatgtgctctttcggcatcagtggtggaggccatccggaggaagcaagcaacaaggcagggcctagaaaataatactgatgatggtggggttgtaaatatgtcagtgctgtggctagcccctcaatgtgtttttgctggcctcattagtgcgtttggatccattggacagatcgaattctactatgaagtgctaccaaagtcaatgagtagcttagcactggccctcctccccctagcaataggtgtcgcaaacattgcaagtacagtggtcgtcaagctcgtcaaagtgattacatgtagtggtggaagagtaggatggcttcttgataacctgaaccaaggccattatgactacttctattttgtgctagcaatgctcggtattgcaggtgtagaacacaatgatggtcgatggtgaaggtaaaggtaaggtcggttcatgccaac

SEQ ID NO: 39902 - DNA, 1803 bp, Zea Mays
cgcactcatatggatgaacatgttcattcgtccagaagaggcggtcttcaaactgtcccgttcataatcattaacgaaggatgtgaacggattgtaaacgtagcggtcagtgcaaatattattatatacttgaccaaagagtatcatatgggatctgcggaaagtgcaatggttttgtttatctaccaagcagctacaaacttcttgcctatctttggggctattgtgtctgatgcactattgggacgctttctcacaatctcactcacacttttcgcatgcacgattggagctgttcttctctggttgaccacagtagttccaacattggtcgcagaagattgttcaaatgaagaccagagttgtcactcaccgacaacactacaattttttgtcttgctaacttctttattgttcttgtcaattggcgcaagtggtgttcgcccttgcagccttccttttggtgtggaccagtttacccactggagcggcgctccaaaggaccgtgcgctcaaagttctattcggctggtattacgtatcaatgggtggctcagcaatcatttctataactctcatcgtgtacttgcaagacaaattgggctggaagatcggttttgccatttctatggttatagcggcatttgctgcaattttaaacattgttacatcgcccctttacatcaaggtgaaaccacagaaaagcacgtggattagtttagtgcaagtggttttcatcgctataaggaatcgacacattcagcttcctaaagcagcaggtgagaatgatctgcattactgcaacgttggaggactggcaatggttccatcaagcaaaatgaggttccttaacagagcatgcgtattgagggcacatgtagaaagttctaacactgaagtgcttaattcatggagtgtatgcacagttgagcaagtcgaggacatcaagcgtgtactaagtgtcatccctatgtggtcagctacgattacaagtttgttgatccaaacggcttcgttcagggtgctacaggcagaaacgatggaccgtcatgttggtagcacaaggttccaaatgcctgctggttcagtcgcaatatttgaaggcattacattcacattggtgtcaggatgcattacaggaagagaaaaaacgcttagtcacaagcagaaaatgggcatcggcgtgctcttttccattgcatgtgctctttcggcatcagtggtggaggccatccggaggaagcaagcaacaaggcagggcctagaaaataatactgatgatggtggggttgtaaatatgtcagtgctgtggctagcccctcaatgtgtttttgctggcctcattagtgcgtttggatccattggacagatcgaattctactatgaagtgctaccaaagtcaatgagtagcttagcactggccctcctccccctagcaataggtgtcgcaaacattgcaagtacagtggtcgtcaagctcgtcaaagtgattacatgtagtggtggaagagtaggatggcttcttgataacctgaaccaaggccattatgactacttctattttgtgctagcaatgctcggtattgcaggttttatctattttgttgcttgttgctattggtttgaggaaccatcaccaaaccagcttgttcaatctaatgaagatgaaccaaatatgagatgaccatggttggcataaagctttctataatgtcattgggtcaaaccatgtttgtcgaggcatagttttcatatataagtgtaacatggctgtttattggacctaatgttcttttggttcttt

SEQ ID NO: 39903 - DNA, 1564 bp, Zea Mays
gttcattcgtccagaagaggcggtcttcaaactgtcccgttcataatcaggagctgttcttctctggttgaccacagtagttccaacattggtcgcagaagattgttcaaatgaagaccagagttgtcactcaccgacaacactacaattttttgtcttgctaacttctttattgttcttgtcaattggcgcaagtggtgttcgcccttgcagccttccttttggtgtggaccagtttacccactggagcggcgctccaaaggaccgtgcgctcaaagttctattcggctggtattacgtatcaatgggtggctcagcaatcatttctataactctcatcgtgtacttgcaagacaaattgggctggaagatcggttttgccatttctatggttatagcggcatttgctgcaattttaaacattgttacatcgcccctttacatcaaggtgaaaccacagaaaagcacgtggattagtttagtgcaagtggttttcatcgctataaggaatcgacacattcagcttcctaaagcagcaggtgagaatgatctgcattactgcaacgttggaggactggcaatggttccatcaagcaaaatgaggttccttaacagagcatgcgtattgagggcacatgtagaaagttctaacactgaagtgcttaattcatggagtgtatgcacagttgagcaagtcgaggacatcaagcgtgtactaagtgtcatccctatgtggtcagctacgattacaagtttgttgatccaaacggcttcgttcagggtgctacaggcagaaacgatggaccgtcatgttggtagcacaaggttccaaatgcctgctggttcagtcgcaatatttgaaggcattacattcacattggtgtcaggatgcattacaggaagagaaaaaacgcttagtcacaagcagaaaatgggcatcggcgtgctcttttccattgcatgtgctctttcggcatcagtggtggaggccatccggaggaagcaagcaacaaggcagggcctagaaaataatactgatgatggtggggttgtaaatatgtcagtgctgtggctagcccctcaatgtgtttttgctggcctcattagtgcgtttggatccattggacagatcgaattctactatgaagtgctaccaaagtcaatgagtagcttagcactggccctcctccccctagcaataggtgtcgcaaacattgcaagtacagtggtcgtcaagctcgtcaaagtgattacatgtagtggtggaagagtaggatggcttcttgataacctgaaccaaggccattatgactacttctattttgtgctagcaatgctcggtattgcaggttttatctattttgttgcttgttgctattggtttgaggaaccatcaccaaaccagcttgttcaatctaatgaagatgaaccaaatatgagatgaccatggttggcataaagctttctataatgtcattgggtcaaaccatgtttgtcgaggcatagttttcatatataagtgtaacatggctgtttattggacctaatgttcttttggttcttt

SEQ ID NO: 39904 - DNA, 2401 bp, Zea Mays
gttcgattttcgtagcctagctacccctagcaccactgtatctgggccactgccgcccaacgtgcatcacacactttattctactgcatcatcagcaacacgccatgatatatttgtccacgagctaataacaccagcgtcgcctagaaacgggctcacgcaggcgtcgtgcctccgccgtttggccatctctatatacagcggaggatcaggcaataatcgcaaatcccacaccaaccagagccaccctgccgtcgtaggcgcacgcgccgtagataggaagcttattaagctagcgcgtgtcgctgcgccatcctgccatggaggatcaggcgctggcgccgctgctgcagccgctcccgctcggcgaaacgggggccatcaaggggcgcgcgaggcgggcggcgctggagtggtgggtggagtcgaagaagctatggcacatcgtgggcccggccatcttccaacggatcgcgctgtacggggtcaacgtcgtcacgcagtccttcatcggccacctcggcgacctcgagctcgccgccttctccattgctgccaccgtcgtcgggggcttcaacttcggtttcctgctgggaatggcgagcgcgctggagacgctgtgcgggcaggcgttcggcgccaagaagcaccacatgctgggggtgtacctgcagcgctcctggatcgtgctcctcatcttcgccgccgcgctgacgccgacgtacatcttcatggaggacctgctgctgctgatcgggcagtccccggagctgtcgcggttggcggggcagatgagcgtgtggctgctcccgcagcacttcgccatggcgatgctgctcccgctcacgcggttcctgcagagccagctgaagaactgggtgaccgcgatcaccgcggccgtcgcgctcgccatccacgtcgtcgccacctacgtgctagtgcgtctcctcgacttcggcatcgtcggggccgtcgcctctgcggacatggcgtggtggttggtcgtgctgggccagtacgtctacgtcgtcggcggctggtgcccgctgtcgtggaaggggttcaccatggaggcgttcgccgacttctgggagttcatcaagctctcctcggcctccggagtgatgctctgcttggagaactggtactaccgagtgttggtgttgctgacagggtacctggacaacgctgaaatcgctgtggatgcactctccatatgtcagacgatcaacggatgggagatgatgatcccgttcggcttcttagcagcaaccggggtgcgagtcgcaaatgagctcggcgcagggagcggcaaaggtgcgcgcttcgccatcgtggtgtccatcacgacgtccgtggtgatcggcctcgtcttctggtgcctcatcctctacttcgacgacaagatcgcgcttctcttcacgtccagcgcggtcgtgctcgacgccgtgcaccacctgtccgtgctgctcgcattcaccatcctgctcaacagtgtgcagcccgtcctctcaggggtggccgttggttcaggatggcaagcactggtcgcctacgtcaacgtcggcagctactacctcatcggagttcccttgggtatcatactcggttggccgctgcacttgggagtagggggaatctggtccgggatgattggagggaccgccgttcaaacgctcatactggcatacctcactgccaaatgtgattggcacgaagaggcgaagttagctagtatgagaatgaagaagtgggccgacgagtcgaaataaacccactccactgctgcgctttgtttgttagccaggcacacaggggaacggaacccctgaagctaagataacttctgcgctatgcatattccggccttcagacgccgttccctgcagcttgctacagtaaaatgaagccccaggtttctgacgatggtgtacggaaagctcccatagtggaattgcgtaccgcgcgtgtcaaaatattgttccactatagctaatatgggacaggacattcatcgtttttttttcttctcatcatcgtattgttccactataggcatgcctggctctcactaggtcaacaaggctacacttgtcctaattgagtacatacgacacaaaatatttggttgtcgtaaggataattttaaagtacagtttcggtgtcaaaatattgttctactatagctaatatgtaacaggtcattcatcgccttttttcttgtcatcgtcgtaattgttaggcgtgtttggtttgcttcctaggcgtgtctggcttgctctagctcagccaggctacaactaacctgattgagtacatgcagcataagtgtttgtttgtccgtatgtgtctagcctcgttcacaagagttgttgattgattgcttacatgaatactattt

SEQ ID NO: 39905 - DNA, 2407 bp, Zea Mays
gttcgattttcgtagcctagctacccctagcaccactgtatctgggccactgccgcccaacgtgcatcacacactttattctactgcatcatcagcaacacgccatgatatatttgtccacgagctaataacaccagcgtcgcctagaaacgggctcacgcaggcgtcgtgcctccgccgtttggccatctctatatacagcggaggatcaggcaataatcgcaaatcccacaccaaccagagccaccctgccgtcgtaggcgcacgcgccgtagataggaagcttattaagctagcgcgtgtcgctgcgccatcctgccatggaggatcaggcgctggcgccgctgctgcagccgctcccgctcggcgaaacgggggccatcaaggggcgcgcgaggcgggcggcgctggagtggtgggtggagtcgaagaagctatggcacatcgtgggcccggccatcttccaacggatcgcgctgtacggggtcaacgtcgtcacgcagtccttcatcggccacctcggcgacctcgagctcgccgccttctccattgctgccaccgtcgtcgggggcttcaacttcggtttcctgctgggaatggcgagcgcgctggagacgctgtgcgggcaggcgttcggcgccaagaagcaccacatgctgggggtgtacctgcagcgctcctggatcgtgctcctcatcttcgccgccgcgctgacgccgacgtacatcttcatggaggacctgctgctgctgatcgggcagtccccggagctgtcgcggttggcggggcagatgagcgtgtggctgctcccgcagcacttcgccatggcgatgctgctcccgctcacgcggttcctgcagagccagctgaagaactgggtgaccgcgatcaccgcggccgtcgcgctcgccatccacgtcgtcgccacctacgtgctagtgcgtctcctcgacttcggcatcgtcggggccgtcgcctctgcggacatggcgtggtggttggtcgtgctgggccagtacgtctacgtcgtcggcggctggtgcccgctgtcgtggaaggggttcaccatggaggcgttcgccgacttctgggagttcatcaagctctcctcggcctccggagtgatgctctgcttggagaactggtactaccgagtgttggtgttgctgacagggtacctggacaacgctgaaatcgctgtggatgcactctccatatgtcagacgatcaacggatgggagatgatgatcccgttcggcttcttagcagcaaccggggtgcgagtcgcaaatgagctcggcgcagggagcggcaaaggtgcgcgcttcgccatcgtggtgtccatcacgacgtccgtggtgatcggcctcgtcttctggtgcctcatcctctacttcgacgacaagatcgcgcttctcttcacgtccagcgcggtcgtgctcgacgccgtgcaccacctgtccgtgctgctcgcattcaccatcctgctcaacagtgtgcagcccgtcctctcaggggtggccgttggttcaggatggcaagcactggtcgcctacgtcaacgtcggcagctactacctcatcggagttcccttgggtatcatactcggttggccgctgcacttgggagtagggggaatctggtccgggatgattggagggaccgccgttcaaacgctcatactggcatacctcactgccaaatgtgattggcacgaagaggcgaagttagctagtatgagaatgaagaagtgggccgacgagtcgaaataaacccactccactgctgcgctttgtttgttagccaggcacacaggggaacggaacccctgaagctaagataacttctgatacagcgctatgcatattccggccttcagacgccgttccctgcagcttgctacagtaaaatgaagccccaggtttctgacgatggtgtacggaaagctcccatagtggaattgcgtaccgcgcgtgtcaaaatattgttccactatagctaatatgggacaggacattcatcgtttttttttcttctcatcatcgtattgttccactataggcatgcctggctctcactaggtcaacaaggctacacttgtcctaattgagtacatacgacacaaaatatttggttgtcgtaaggataattttaaagtacagtttcggtgtcaaaatattgttctactatagctaatatgtaacaggtcattcatcgccttttttcttgtcatcgtcgtaattgttaggcgtgtttggtttgcttcctaggcgtgtctggcttgctctagctcagccaggctacaactaacctgattgagtacatgcagcataagtgtttgtttgtccgtatgtgtctagcctcgttcacaagagttgttgattgattgcttacatgaatactattt

SEQ ID NO: 39906 - DNA, 2329 bp, Zea Mays
tttattctactgcatcatcagcaacacgccatgatatatttgtccacgagctaataacaccagcgtcgcctagaaacgggctcacgcaggcgtcgtgcctccgccgtttggccatctctatatacagcggaggatcaggcaataatcgcaaatcccacaccaaccagagccaccctgccgtcgtaggcgcacgcgccgtagataggaagcttattaagctagcgcgtgtcgctgcgccatcctgccatggaggatcaggcgctggcgccgctgctgcagccgctcccgctcggcgaaacgggggccatcaaggggcgcgcgaggcgggcggcgctggagtggtgggtggagtcgaagaagctatggcacatcgtgggcccggccatcttccaacggatcgcgctgtacggggtcaacgtcgtcacgcagtccttcatcggccacctcggcgacctcgagctcgccgccttctccattgctgccaccgtcgtcgggggcttcaacttcggtttcctgctgggaatggcgagcgcgctggagacgctgtgcgggcaggcgttcggcgccaagaagcaccacatgctgggggtgtacctgcagcgctcctggatcgtgctcctcatcttcgccgccgcgctgacgccgacgtacatcttcatggaggacctgctgctgctgatcgggcagtccccggagctgtcgcggttggcggggcagatgagcgtgtggctgctcccgcagcacttcgccatggcgatgctgctcccgctcacgcggttcctgcagagccagctgaagaactgggtgaccgcgatcaccgcggccgtcgcgctcgccatccacgtcgtcgccacctacgtgctagtgcgtctcctcgacttcggcatcgtcggggccgtcgcctctgcggacatggcgtggtggttggtcgtgctgggccagtacgtctacgtcgtcggcggctggtgcccgctgtcgtggaaggggttcaccatggaggcgttcgccgacttctgggagttcatcaagctctcctcggcctccggagtgatgctctgcttggagaactggtactaccgagtgttggtgttgctgacagggtacctggacaacgctgaaatcgctgtggatgcactctccatatgacgatcaacggatgggagatgatgatcccgttcggcttcttagcagcaaccggggtgcgagtcgcaaatgagctcggcgcagggagcggcaaaggtgcgcgcttcgccatcgtggtgtccatcacgacgtccgtggtgatcggcctcgtcttctggtgcctcatcctctacttcgacgacaagatcgcgcttctcttcacgtccagcgcggtcgtgctcgacgccgtgcaccacctgtccgtgctgctcgcattcaccatcctgctcaacagtgtgcagcccgtcctctcaggggtggccgttggttcaggatggcaagcactggtcgcctacgtcaacgtcggcagctactacctcatcggagttcccttgggtatcatactcggttggccgctgcacttgggagtagggggaatctggtccgggatgattggagggaccgccgttcaaacgctcatactggcatacctcactgccaaatgtgattggcacgaagaggcgaagttagctagtatgagaatgaagaagtgggccgacgagtcgaaataaacccactccactgctgcgctttgtttgttagccaggcacacaggggaacggaacccctgaagctaagataacttctgatacagcgctatgcatattccggccttcagacgccgttccctgcagcttgctacagtaaaatgaagccccaggtttctgacgatggtgtacggaaagctcccatagtggaattgcgtaccgcgcgtgtcaaaatattgttccactatagctaatatgggacaggacattcatcgtttttttttcttctcatcatcgtattgttccactataggcatgcctggctctcactaggtcaacaaggctacacttgtcctaattgagtacatacgacacaaaatatttggttgtcgtaaggataattttaaagtacagtttcggtgtcaaaatattgttctactatagctaatatgtaacaggtcattcatcgccttttttcttgtcatcgtcgtaattgttaggcgtgtttggtttgcttcctaggcgtgtctggcttgctctagctcagccaggctacaactaacctgattgagtacatgcagcataagtgtttgtttgtccgtatgtgtctagcctcgttcacaagagttgttgattgattgcttacatgaatactattt

SEQ ID NO: 39907 - DNA, 2561 bp, Zea Mays
tttattctactgcatcatcagcaacacgccatgatatatttgtccacgagctaataacaccagcgtcgcctagaaacgggctcacgcaggcgtcgtgcctccgccgtttggccatctctatatacagcggaggatcaggcaataatcgcaaatcccacaccaaccagagccaccctgccgtcgtaggcgcacgcgccgtagataggaagcttattaagctagcgcgtgtcgctgcgccatcctgccatggaggatcaggcgctggcgccgctgctgcagccgctcccgctcggcgaaacgggggccatcaaggggcgcgcgaggcgggcggcgctggagtggtgggtggagtcgaagaagctatggcacatcgtgggcccggccatcttccaacggatcgcgctgtacggggtcaacgtcgtcacgcagtccttcatcggccacctcggcgacctcgagctcgccgccttctccattgctgccaccgtcgtcgggggcttcaacttcggtttcctggtaatcttgccgttgttaccttttgcatatcctatgctaactcatttctgtttgtggagctgtgggggcacatgaagcaacgcctgttacccctacactacaatctgtgaactagaaaatgatacggtcaaccatctggccatctactggatgcattttacgagatctgggaatggcgagcgcgctggagacgctgtgcgggcaggcgttcggcgccaagaagcaccacatgctgggggtgtacctgcagcgctcctggatcgtgctcctcatcttcgccgccgcgctgacgccgacgtacatcttcatggaggacctgctgctgctgatcgggcagtccccggagctgtcgcggttggcggggcagatgagcgtgtggctgctcccgcagcacttcgccatggcgatgctgctcccgctcacgcggttcctgcagagccagctgaagaactgggtgaccgcgatcaccgcggccgtcgcgctcgccatccacgtcgtcgccacctacgtgctagtgcgtctcctcgacttcggcatcgtcggggccgtcgcctctgcggacatggcgtggtggttggtcgtgctgggccagtacgtctacgtcgtcggcggctggtgcccgctgtcgtggaaggggttcaccatggaggcgttcgccgacttctgggagttcatcaagctctcctcggcctccggagtgatgctctgcttggagaactggtactaccgagtgttggtgttgctgacagggtacctggacaacgctgaaatcgctgtggatgcactctccatatgtcagacgatcaacggatgggagatgatgatcccgttcggcttcttagcagcaaccggggtgcgagtcgcaaatgagctcggcgcagggagcggcaaaggtgcgcgcttcgccatcgtggtgtccatcacgacgtccgtggtgatcggcctcgtcttctggtgcctcatcctctacttcgacgacaagatcgcgcttctcttcacgtccagcgcggtcgtgctcgacgccgtgcaccacctgtccgtgctgctcgcattcaccatcctgctcaacagtgtgcagcccgtcctctcaggggtggccgttggttcaggatggcaagcactggtcgcctacgtcaacgtcggcagctactacctcatcggagttcccttggggaatctggtccgggatgattggagggaccgccgttcaaacgctcatactggcatacctcactgccaaatgtgattggcacgaagaggcgaagttagctagtatgagaatgaagaagtgggccgacgagtcgaaataaacccactccactgctgcgctttgtttgttagccaggcacacaggggaacggaacccctgaagctaagataacttctggtaaaaataaaatacgcatcatgcttaggagttacttatctgtaaaaatgaatcaaaagcgcaacacgactaaggaaacaatgtcactatgtatgtgcagatacagcgctatgcatattccggccttcagacgccgttccctgcagcttgctacagtaaaatgaagccccaggtttctgacgatggtgtacggaaagctcccatagtggaattgcgtaccgcgcgtgtcaaaatattgttccactatagctaatatgggacaggacattcatcgtttttttttcttctcatcatcgtattgttccactataggcatgcctggctctcactaggtcaacaaggctacacttgtcctaattgagtacatacgacacaaaatatttggttgtcgtaaggataattttaaagtacagtttcggtgtcaaaatattgttctactatagctaatatgtaacaggtcattcatcgccttttttcttgtcatcgtcgtaattgttaggcgtgtttggtttgcttcctaggcgtgtctggcttgctctagctcagccaggctacaactaacctgattgagtacatgcagcataagtgtttgtttgtccgtatgtgtctagcctcgttcacaagagttgttgattgattgcttacatgaatactattt

SEQ ID NO: 39908 - DNA, 843 bp, Zea Mays
cggcgcgccgccgcgcgttcgcctaggccgccggtcacagcctgaccacgctcgcgtaggcccacgcgcgcacagcgcgagtgcagcaaccgccgcacgcctagctgccccgcgcggcactcgcccacgacgttgagaaaaccgacgtccgcgcccacgctctcctatccgagcgtctacacatcctctcctcttcctccttcatttccccaatcgccagcactcgatgcctccataatcgtcgcccagtcctcacatcgccatccttgacacgcgttcggagatcgacgtcgaaaccgccgcaccggagtccatcctcgccgtgttcgcctgcaccagagccgctcgccacctacctcttccatgccctattgagccgcgcgcccgtgccatctccgttgagatccaagatcgcgattcgtttccgagctttgaggaatcgacgatcaagcgttggcgaccaagtgatcaagttcttcgagttctacgagattaaataccctgagcatctgtttttggtgaaggcaaaatgtcctctgacccattatgtcctatctacttataattcattttcccgcgttacttaatggaaacctaaggattgactaactttgtgtttaccttgtccttattaccttttgggttattatggttagcttcatgctattgctttactttaatcaatgaacatgatgtaaatacttatgatacgatgatgttatcccgatgatgatattgtgatattttaggggactcaggccattttcctgagtacctctccgtaaggacctgttcgtggagtgaccacccaggataacagtgtagccatgagggtggaatgag

SEQ ID NO: 39909 - DNA, 235 bp, Zea Mays
ctcgacatgtcaaaatcccgtctttttgccgctaaggcacttcacacatcaccagcgtcgttgcacttcacacatcacggagacgagtggcgcggctaaaaaaaaaatcaaagtaagcagagtagtcaatttcctctgatcattgggcacacactttggcaggtcactgcaacccatcatcggctggtgagttttctccttttgctggtcaccggagaggagcttgaagagccag

SEQ ID NO: 39910 - DNA, 2308 bp, Zea Mays
agacgcaacagcaggtgcaggtctagataatgtcttcaagaaaatatccatctggtagtgagaaaagaaaaagaaaaaaacaggaagatgagttcatacaaatgactttattgattcgttgtgttaacttgtcttatggaaagataaacattgaggagtattttttggggttcctgaaggtggatgacacatctggtttaggcatttttaatatattgattgatgctatggagtcatttggatatttccttggtcaccgctgcctacagacttcggcttcttccctcacgtccctctcttcccaaccgctccttccagccctcacctcgccggtctggcggtctctagcacctcggcgttgtctctgtctcagccggccgctcgaccctagcatctgctcgcttgccttcactctgtccccagcttgccccgaggtctgtcctctatgtgtttcttcaagctcgccatggctggcttcggatcctgctcgcgagtttcctcagcgccgtcagcttgccggcctccagctcgcctgtatcatggtcgtcgcgccgtctttgctcgttgggtcttgcgttgccgcgcacacgtgccggacacccctgcttctctgttggctgcgcgcgccggactacgtccttcgcagctcgctggctttagctgcaggacaccaccagccgtgccttcctcgactcgtccacagcgtcgctcgtgaggtgctcgacgtaatggcggaattacgtaatggcggaaatgaaaatcgtagctgtgctcgtgacctttgagataaattaaattattggtgagctatcatcgctctcgctcttcgttttaatatttctcatcagtttggtatgtttgcgctgttaatgtgggccggtgacgtacgagtaaatcgtagtagtggattattgcgagaataaaatttgatcgtgtagaatagcgaagtctagtacttcgctcgtcacgtatttggtgatatgcgcgaaccgggaaaccgtcgtccttctcgcggattttagtcgtttggttatagtacgttgtgtgatatcgtcagatccctgctggttgcctgtgtatggctcgtggcggtgccttaaaaatagcatcatttggtaatcgtcaaatcataggtttcgtgttttgaatgttctggtggtaggcgtttcctatattgctcgtatcaaataatgatggtttgatgaagtcgatgctctgctttagtgatcgttatattataactagtgaccggttaaatgtcttgaataaatgttaattgttgctctgaatgtttaaaagagagtagcatcgtcgatttcgtgggttcaagtcggattttagtatggtgagctgattcgttattcctgttagccgaatcgttagatagattgaataaatatgagtggtgcgaaataaaattaaaataattctttgtgagtataattaataatgcgatgggtaagtttagcatttaattaattagtggataagttatgtctaggccaattgtgttaagtgtgtaatttaagttaattaagacgcatggtttaaagagttaattagattgttcctataactattttaagtcgttggcatttaataatagcgagtccaggttttattagacttctgaaatatattttactaaggatgatagtgtgggttaaataatttattcttgcttgatttcggaattagatccgatcaaaaagcaggaacatgagtgttgcacttagtgtgtatgctttgctgttttgggatgtttgcgttagattcggttaatctagagaagcataatcattgcgcttagtcgtatatcgatgttggggaccttcggcttccgaaggtcctcaaaaacgtgatttaacaatgttttctaagtatgcgagcaggtatcttcggaatcaggaatcaggttgcgggtatacagaagcatggtcaagacgaagcttgactaggatggtgatcacgacgaaggataagatgatcacgaagctatatgctgaagagcttcggtatcacggcgggaaggggaaaccgacttaaagatgaaaagccaaactagacctcgaagaattactatagagttattgataaatgtaaagggcattaatgtaatcttacatgggctgcgacccgtgcctataaataggtgaacagtattctcgtactgttcacgctgacttggcattcacttttgcctcacgcctgtattcctttccttcaagtcgaaggtacatttgtaatttatctttgtttgaacaagtaataaaaatagaaatagattaataataatgtttatagaaat

SEQ ID NO: 39911 - DNA, 5731 bp, Zea Mays
cttgaacacgcgcaaatctgcgttgtcctcgtgtattttagaactccaccttcgagtgataattagattgctcgcatctctttcttgtacgttcttcgattgcggacaggaaacgatcttcgtgatcaggctgatcttgcatcaacaaggttggtaaccacagggagttggttcagcgattgcattggtgcttcgggctcgctcgtcgtagtcggatcgtgagggtcatcttccaccaagtcgaaactttccccactcaccgaaagatcgggcactccggctctatcaagtggtataaggtttccaggttgttcggtgagtttatcgagtgttttcaaattcctatagtccataaaaccaaaacacaaatatatattccttgccccagaaactttttagcctttcaataattcgcattgttgaatttgtgtgcttacgcgttcaactgttgctggttattttgtgttcttttaccattttttttcttcgaaccttagtgcgccaccacatctctttcccttctgcatcacacgcgccccctggatcgcgtgccgatcacctccccctagattgcgcctcctgttttgcccctgccttgtgcgtcctttggaaagtcagcaaaaaaagaaaggaaagcaaaaaaaaatagtgtatcctgatttcctattcctgatcgacagcaaaaaaagaaaggaaaagatcttttaattaccggaatacccctacccttctagaaaaaagtgtgtgtggtaacttgcttttgtattcctttgccatataatcagtttgtgagtttcttagaaaaacaaaaaaaagaaaaaaaaagaaaaaggggacacaaaccggaggttaccttgtgtgggcgcgtcacgcaggatgcccaggggtgcgcacccgctactacttgttctcctctttttctgttttcctttgccccctacccttgctccacctttgcactttgtttctagcagctttgattacgtgtttggcactataattccaccttgcattattgtttgattgtgctaatccttgctttgagtgtagcctacccagaactccacatagttctacaacgagcagactttgtttctctaggcaatcgctcctccaatctttcgccgattctacctgttggttgcagctcacccctgtgtgcttggtaagaatggataagaatttgataacagcactactatgagcgcctaacccacacccttgttgtcgtaggctttgctttgtgttgcgctaactatgacaggaaacgacgacatgacagatgcacagctgcgggacgtgcggacacaagttgatggacttgccgtggacgtgaagatgatgcatgaacggcttgattcatcgatcacttcatcgaacaagcggttcgaccagctagatctcgctcagacagccactgcgaccacgctcgacgacatcgtgtcacgactcgatgtgttgactacgacactcatggagttgcagaaggattatggcggtgacacggagcgggaagatggagatcgccgctgacgtgcccgccgtatggacggagcccgacatccagctcagctcctgctcttcccgcgccatgcaccactagcactacaccgcgcgagaggacggccaaacctgcagcgcccccagctataggcgctgttccttccataggacatacacgagatattcagtgccatcgttgcaaaggatttgggcacgtaatttgggactgccccagcaagcgtaccttactcatacgtgacaatggtgagtactctttcgctagtgattccgaagaaactcgacatgctatttgccactgaccatgcagataatgaggaggtacatgtcgctcctggcgatgccgagaggtatgagagtcttgttgcacagcgtgttcttagtacacaggttgcccaacctgagaacaatcagcgacacactctattacatactaaaggcgttgtacaagaacgattgattcgcatcatcatccataatggcagctgcaacaatttggcgagtacaactttggtagagaagttatccttgcccactcgtaagcacccgaacccatatcacattcaatggcttaatgatggtggcaaaatcaaagttacacgttcggtacgtgtttccttttccttgggctcttattctgattatgctaattgcgatgttattcctatggaagcatgctctttgttacttggtagaccgtggcaatatgatactaatagtttacatcatggtcgttcgaatcattcttctttcatgtttaagggtcagaaaataattatccatcccatgacccctgactaaattataaaagatgatcttgctcgggcttcaaaaactacaaagcaacatgcacctacgccatccacccctgttaatgctgaaatcaagttgcatgctccggttttacttgctacacatgctgattttgatgacctacgtgatactcacttgccctgctatgcacttgtatgttctagtatgctcgtttcacttgatgatgccccgcctttggatattccccctgttgtttctaaccttttgcaggagtacgctaatgttttccccacggacttgccaccgggtcttcccccgcttcgcggcattaaacaccagatcgacctcatccccggcacccagctcccaaaccgcaccctgtaccgtacgaatccggatgagacgaaggagatccagcgccaggtgcaggtgttgcttgataaaaggttacattcgtgaatctcttagtccttgctcagttcctgttttacttgttccaaagaaagatgggtcatggcgtatgtgtgtcgactatcgcgctattaataacatcacaattcgttatcgatatcctataccacgccttgatgatatgctagatgagcttagtggtgccattattttcactaagattgatttgcgtagtggataccatcatattcgaatgaaactgggtgatgaatggaaaacggcttttaaaatgaagtttgggttatatgaatggttggttatgccgtttggattgactaatgctccaagcacctttatgcgtttgatgaacgaagttccaaggcccttcataggattgtttgtcattgtctattttgatgatatccttatttacatcaagactatggaagagcatttcgaacatttgagtgttgtttacttgtttttgatgcgttgcgtgctgccgcttatttggtaacgtggactaatgcatcttttgcacacaacgtgtctcgcttcttggttatgttgttactccacagggcatagaggtggatagtagcaagattgctgccattcgggactggcctacaccgacgacggtcacacagatttggagttttcttggacttgcagtcttctaccgtaggttcgtccatgattttagctccattgcagcccctctacatgagcttacaaataaaggtgtgccatttgcttggggcgacgcgcaggaggtagcgttcaacactttgaaagataagttaacacatgctcccctcttgcaattgcctgattttaataaagtgtttgagcttgaatgtgatgctagcggtattggactaggtgctgttttgttgcaagatggaaagtcggttgcttattttagtgaaaaattaagcggtgctagcctgagatattctacttatgataaggagctttatgctttagttcgcactttgcaaacatggcagcactatctttgcatcgtgagtttataattcattctgatcatgaggcttttgaaacatattcgtactcaaacaaatctgaaccgccgtcatgctaactaggtcgaattcatcgagtctttcccttacattattaaacacaagaacaggaaggaaaatgtcattgctgatgtgttgtctcgtagatataccatgctttcatagttagattttaaaaaatttggcttgcaaactatgaaggatcaatatgtcaatgatgctgattttaaagatgttttaatacattgcatgcatggcagaccatggggccatttccacgtgcaggatgggttcctgtttcgcgctaacaagttgtgtattccagcaagctcggttcctctgttgttgttacaggaagcacatggaggtggtctcatgggacactttggcgtctacaaaacgcacgaggtgctggctgcacacttcttttggacccagatgcgccgtgatgtcgagcgccttgttgcacgctgcactacttgtcagaaagctaagtcacgattgagcaaccatggtttgtatatgcctttgcatgtccctacgtttccttggcttgatatttctatggactttgttttgggtttgcctagaactaagaaggggagggatagcatttttgtggttgttgatagattctccaaaatggctcattttataccctgtcataaaactgatgatgctagcagtgttgctgaattgttctttcgagagattattcgtttgcatggtattctgaatacaatagtctctgatcgtgatgctaagtttcttagtcatttttggagatctctttggaataaattgggaactaaattgttgtttagtacaactttttcaccctcaaactgatgggcaaactgaggtggtgaatagaacttttatcaaccatgcttagggctgttttagacaaaaatttgagactttgggagcattgcttgcctcatattgaattttgcttataatcgtgcaacacattcttctaaaaagatgtgcccctttcagattgtttatggttacattcctcgggcacctattggtttgtttttgcttgatgctgagggacgcccttacatatcgaggttgttgcacatgttgaacaaatgattgacctccatgaaacaaacacaccaaaacattgctgctgctaatgctaagtatcaggttgctggtagtaaaggaagaaaacatgttacttttgcacctggtgatatggtttggttgcatttgcgcaaggatcgttttcctactttgcgtcgttctaaattgatgcctcgtgccgctggtccttttaaggtgctaaccaagattaatgataatgcttatatcctagacctacctgtagaatttggtgtttcccctagttttaatgttgcagatttgaaaccatatgtgggcgaggatgacgagttgccgtcgaggacgacttcggttctagaaggggaggatgatgaggacatcaaatacaacaccagtacgactaccccagcagcaccttttccagcaccaccagatgcacctactccttaggcgccaccttcttcctcatctgggccaatcacccgagcccatgcaagagatctaaacttcgtcatgctactgaagaacgaaggcccacaagaatagacgctggcccaactgaagaccttgtgtgggtgcctagggctggccaccactaggggctgcgccccctccctggctgcccttccctaggggctgtgccccccccccctctccctctatttagatggaggcttcttttcttttcagactcgagttttgttttacaattagctttagctactcttgaacacgcgcaaatctgcgttgtcctcgtgtattttataactccaccttcgagtgataattagattgctcgcatctctttcttgtacgttcttcgattgcggacaggaaacgatcttcgtgatcaggctgatcttgcatcaacaaggttggtaaccacagggagttggttc

SEQ ID NO: 39912 - DNA, 5609 bp, Zea Mays
cttgaacacgcgcaaatctgcgttgtcctcgtgtattttagaactccaccttcgagtgataattagattgctcgcatctctttcttgtacgttcttcgattgcggacaggaaacgatcttcgtgatcaggctgatcttgcatcaacaaggttggtaaccacagggagttggttcagcgattgcattggtgcttcgggctcgctcgtcgtagtcggatcgtgagggtcatcttccaccaagtcgaaactttccccactcaccgaaagatcgggcactccggctctatcaagtggtataaggtttccaggttgttcggtgagtttatcgagtgttttcaaattcctatagtccataaaaccaaaacacaaatatatattccttgccccagaaactttttagcctttcaataattcgcattgttgaatttgtgtgcttacgcgttcaactgttgctggttattttgtgttcttttaccattttttttcttcgaaccttagtgcgccaccacatctctttcccttctgcatcacacgcgccccctggatcgcgtgccgatcacctccccctagattgcgcctcctgttttgcccctgccttgtgcgtcctttggaaagtcagcaaaaaaagaaaggaaagcaaaaaaaaatagtgtatcctgatttcctattcctgatcgacagcaaaaaaagaaaggaaaagatcttttaattaccggaatacccctacccttctagaaaaaagtgtgtgtggtaacttgcttttgtattcctttgccatataatcagtttgtgagtttcttagaaaaacaaaaaaaagaaaaaaaaagaaaaaggggacacaaaccggaggttaccttgtgtgggcgcgtcacgcaggatgcccaggggtgcgcacccgctactacttgttctcctctttttctgttttcctttgccccctacccttgctccacctttgcactttgtttctagcagctttgattacgtgtttggcactataattccaccttgcattattgtttgattgtgctaatccttgctttgagtgtagcctacccagaactccacatagttctacaacgagcagactttgtttctctaggcaatcgctcctccaatctttcgccgattctacctgttggttgcagctcacccctgtgtgcttgatgcacagctgcgggacgtgcggacacaagttgatggacttgccgtggacgtgaagatgatgcatgaacggcttgattcatcgatcacttcatcgaacaagcggttcgaccagctagatctcgctcagacagccactgcgaccacgctcgacgacatcgtgtcacgactcgatgtgttgactacgacactcatggagttgcagaaggattatggcggtgacacggagcgggaagatggagatcgccgctgacgtgcccgccgacggagcccgacatccagctcagctcctgctcttcccgcgccatgcaccactagcactacaccgcgcgagaggacggccaaacctgcagcgcccccagctataggcgctgttccttccataggacatacacgagatattcagtgccatcgttgcaaaggatttgggcacgtaatttgggactgccccagcaagcgtaccttactcatacgtgacaatggtgagtactctttcgctagtgattccgaagaaactcgacatgctatttgccactgaccatgcagataatgaggaggtacatgtcgctcctggcgatgccgagaggtatgagagtcttgttgcacagcgtgttcttagtacacaggttgcccaacctgagaacaatcagcgacacactctattacatactaaaggcgttgtacaagaacgattgattcgcatcatcatccataatggcagctgcaacaatttggcgagtacaactttggtagagaagttatccttgcccactcgtaagcacccgaacccatatcacattcaatggcttaatgatggtggcaaaatcaaagttacacgttcggtacgtgtttccttttccttgggctcttattctgattatgctaattgcgatgttattcctatggaagcatgctctttgttacttggtagaccgtggcaatatgatactaatagtttacatcatggtcgttcgaatcattcttctttcatgtttaagggtcagaaaataattatccatcccatgacccctgactaaattataaaagatgatcttgctcgggcttcaaaaactacaaagcaacatgcacctacgccatccacccctgttaatgctgaaatcaagttgcatgctccggttttacttgctacacatgctgattttgatgacctacgtgatactcacttgccctgctatgcacttgtatgttctagtatgctcgtttcacttgatgatgccccgcctttggatattccccctgttgtttctaaccttttgcaggagtacgctaatgttttccccacggacttgccaccgggtcttcccccgcttcgcggcattaaacaccagatcgacctcatccccggcacccagctcccaaaccgcaccctgtaccgtacgaatccggatgagacgaaggagatccagcgccaggtgcaggtgttgcttgataaaaggttacattcgtgaatctcttagtccttgctcagttcctgttttacttgttccaaagaaagatgggtcatggcgtatgtgtgtcgactatcgcgctattaataacatcacaattcgttatcgatatcctataccacgccttgatgatatgctagatgagcttagtggtgccattattttcactaagattgatttgcgtagtggataccatcatattcgaatgaaactgggtgatgaatggaaaacggcttttaaaatgaagtttgggttatatgaatggttggttatgccgtttggattgactaatgctccaagcacctttatgcgtttgatgaacgaagttccaaggcccttcataggattgtttgtcattgtctattttgatgatatccttatttacatcaagactatggaagagcatttcgaacatttgagtgttgtttacttgtttttgatgcgttgcgtgctgccgcttatttggtaacgtggactaatgcatcttttgcacacaacgtgtctcgcttcttggttatgttgttactccacagggcatagaggtggatagtagcaagattgctgccattcgggactggcctacaccgacgacggtcacacagatttggagttttcttggacttgcagtcttctaccgtaggttcgtccatgattttagctccattgcagcccctctacatgagcttacaaataaaggtgtgccatttgcttggggcgacgcgcaggaggtagcgttcaacactttgaaagataagttaacacatgctcccctcttgcaattgcctgattttaataaagtgtttgagcttgaatgtgatgctagcggtattggactaggtgctgttttgttgcaagatggaaagtcggttgcttattttagtgaaaaattaagcggtgctagcctgagatattctacttatgataaggagctttatgctttagttcgcactttgcaaacatggcagcactatctttgcatcgtgagtttataattcattctgatcatgaggcttttgaaacatattcgtactcaaacaaatctgaaccgccgtcatgctaactaggtcgaattcatcgagtctttcccttacattattaaacacaagaacaggaaggaaaatgtcattgctgatgtgttgtctcgtagatataccatgctttcatagttagattttaaaaaatttggcttgcaaactatgaaggatcaatatgtcaatgatgctgattttaaagatgttttaatacattgcatgcatggcagaccatggggccatttccacgtgcaggatgggttcctgtttcgcgctaacaagttgtgtattccagcaagctcggttcctctgttgttgttacaggaagcacatggaggtggtctcatgggacactttggcgtctacaaaacgcacgaggtgctggctgcacacttcttttggacccagatgcgccgtgatgtcgagcgccttgttgcacgctgcactacttgtcagaaagctaagtcacgattgagcaaccatggtttgtatatgcctttgcatgtccctacgtttccttggcttgatatttctatggactttgttttgggtttgcctagaactaagaaggggagggatagcatttttgtggttgttgatagattctccaaaatggctcattttataccctgtcataaaactgatgatgctagcagtgttgctgaattgttctttcgagagattattcgtttgcatggtattctgaatacaatagtctctgatcgtgatgctaagtttcttagtcatttttggagatctctttggaataaattgggaactaaattgttgtttagtacaactttttcaccctcaaactgatgggcaaactgaggtggtgaatagaacttttatcaaccatgcttagggctgttttagacaaaaatttgagactttgggagcattgcttgcctcatattgaattttgcttataatcgtgcaacacattcttctaaaaagatgtgcccctttcagattgtttatggttacattcctcgggcacctattggtttgtttttgcttgatgctgagggacgcccttacatatcgaggttgttgcacatgttgaacaaatgattgacctccatgaaacaaacacaccaaaacattgctgctgctaatgctaagtatcaggttgctggtagtaaaggaagaaaacatgttacttttgcacctggtgatatggtttggttgcatttgcgcaaggatcgttttcctactttgcgtcgttctaaattgatgcctcgtgccgctggtccttttaaggtgctaaccaagattaatgataatgcttatatcctagacctacctgtagaatttggtgtttcccctagttttaatgttgcagatttgaaaccatatgtgggcgaggatgacgagttgccgtcgaggacgacttcggttctagaaggggaggatgatgaggacatcaaatacaacaccagtacgactaccccagcagcaccttttccagcaccaccagatgcacctactccttaggcgccaccttcttcctcatctgggccaatcacccgagcccatgcaagagatctaaacttcgtcatgctactgaagaacgaaggcccacaagaatagacgctggcccaactgaagaccttgtgtgggtgcctagggctggccaccactaggggctgcgccccctccctggctgcccttccctaggggctgtgccccccccccctctccctctatttagatggaggcttcttttcttttcagactcgagttttgttttacaattagctttagctactcttgaacacgcgcaaatctgcgttgtcctcgtgtattttataactccaccttcgagtgataattagattgctcgcatctctttcttgtacgttcttcgattgcggacaggaaacgatcttcgtgatcaggctgatcttgcatcaacaaggttggtaaccacagggagttggttc

SEQ ID NO: 39913 - DNA, 4629 bp, Zea Mays
caaaattaaatttaaaatccatcttttaaaggcaaatatgatcctgctgcatatcttgattgggaactagaggtcgaacagaaatttttatgccatgatatttctacttcttttcaagttaaagctgttattagtgaatttattgatcttgctttaatttggtggcgtgaatataaacaaaaacatcccactgccactcccaccacttggactcaattaaaagctgctatgcgacacaggtttgtgccttcctattatgcccgagatttgcttaataaaatgcagcgtttttagcaaggtcaacaatctgttgaggaatattaccaggaactacaaaagggtatgattcattgtggtttgtttgaacaggatgacgctgctatggcacatttttcgcggtggtttgcaccgagaaattcaggatatacttgattataaggaatattttgatatgaccacattgtttgaatatgcttgcaaagctgaacgtgaagtgcaggggcgctgatccaagacacatactggctcttttgcaggacggagcccgacatccagctcagctcctgctcttcccgcgccatgcaccactagcactacaccgcgcgagaggacggccaaacctgcagcgcccccagctataggcgctgttccttccataggacatacacgagatattcagtgccatcgttgcaaaggatttgggcacgtaatttgggactgccccagcaagcgtaccttactcatacgtgacaatggtgagtactctttcgctagtgattccgaagaaactcgacatgctatttgccactgaccatgcagataatgaggaggtacatgtcgctcctggcgatgccgagaggtatgagagtcttgttgcacagcgtgttcttagtacacaggttgcccaacctgagaacaatcagcgacacactctattacatactaaaggcgttgtacaagaacgattgattcgcatcatcatccataatggcagctgcaacaatttggcgagtacaactttggtagagaagttatccttgcccactcgtaagcacccgaacccatatcacattcaatggcttaatgatggtggcaaaatcaaagttacacgttcggtacgtgtttccttttccttgggctcttattctgattatgctaattgcgatgttattcctatggaagcatgctctttgttacttggtagaccgtggcaatatgatactaatagtttacatcatggtcgttcgaatcattcttctttcatgtttaagggtcagaaaataattatccatcccatgacccctgactaaattataaaagatgatcttgctcgggcttcaaaaactacaaagcaacatgcacctacgccatccacccctgttaatgctgaaatcaagttgcatgctccggttttacttgctacacatgctgattttgatgacctacgtgatactcacttgccctgctatgcacttgtatgttctagtatgctcgtttcacttgatgatgccccgcctttggatattccccctgttgtttctaaccttttgcaggagtacgctaatgttttccccacggacttgccaccgggtcttcccccgcttcgcggcattaaacaccagatcgacctcatccccggcacccagctcccaaaccgcaccctgtaccgtacgaatccggatgagacgaaggagatccagcgccaggtgcaggtgttgcttgataaaaggttacattcgtgaatctcttagtccttgctcagttcctgttttacttgttccaaagaaagatgggtcatggcgtatgtgtgtcgactatcgcgctattaataacatcacaattcgttatcgatatcctataccacgccttgatgatatgctagatgagcttagtggtgccattattttcactaagattgatttgcgtagtggataccatcatattcgaatgaaactgggtgatgaatggaaaacggcttttaaaatgaagtttgggttatatgaatggttggttatgccgtttggattgactaatgctccaagcacctttatgcgtttgatgaacgaagttccaaggcccttcataggattgtttgtcattgtctattttgatgatatccttatttacatcaagactatggaagagcatttcgaacatttgagtgttgtttacttgtttttgatgcgttgcgtgctgccgcttatttggtaacgtggactaatgcatcttttgcacacaacgtgtctcgcttcttggttatgttgttactccacagggcatagaggtggatagtagcaagattgctgccattcgggactggcctacaccgacgacggtcacacagatttggagttttcttggacttgcagtcttctaccgtaggttcgtccatgattttagctccattgcagcccctctacatgagcttacaaataaaggtgtgccatttgcttggggcgacgcgcaggaggtagcgttcaacactttgaaagataagttaacacatgctcccctcttgcaattgcctgattttaataaagtgtttgagcttgaatgtgatgctagcggtattggactaggtgctgttttgttgcaagatggaaagtcggttgcttattttagtgaaaaattaagcggtgctagcctgagatattctacttatgataaggagctttatgctttagttcgcactttgcaaacatggcagcactatctttgcatcgtgagtttataattcattctgatcatgaggcttttgaaacatattcgtactcaaacaaatctgaaccgccgtcatgctaactaggtcgaattcatcgagtctttcccttacattattaaacacaagaacaggaaggaaaatgtcattgctgatgtgttgtctcgtagatataccatgctttcatagttagattttaaaaaatttggcttgcaaactatgaaggatcaatatgtcaatgatgctgattttaaagatgttttaatacattgcatgcatggcagaccatggggccatttccacgtgcaggatgggttcctgtttcgcgctaacaagttgtgtattccagcaagctcggttcctctgttgttgttacaggaagcacatggaggtggtctcatgggacactttggcgtctacaaaacgcacgaggtgctggctgcacacttcttttggacccagatgcgccgtgatgtcgagcgccttgttgcacgctgcactacttgtcagaaagctaagtcacgattgagcaaccatggtttgtatatgcctttgcatgtccctacgtttccttggcttgatatttctatggactttgttttgggtttgcctagaactaagaaggggagggatagcatttttgtggttgttgatagattctccaaaatggctcattttataccctgtcataaaactgatgatgctagcagtgttgctgaattgttctttcgagagattattcgtttgcatggtattctgaatacaatagtctctgatcgtgatgctaagtttcttagtcatttttggagatctctttggaataaattgggaactaaattgttgtttagtacaactttttcaccctcaaactgatgggcaaactgaggtggtgaatagaacttttatcaaccatgcttagggctgttttagacaaaaatttgagactttgggagcattgcttgcctcatattgaattttgcttataatcgtgcaacacattcttctaaaaagatgtgcccctttcagattgtttatggttacattcctcgggcacctattggtttgtttttgcttgatgctgagggacgcccttacatatcgaggttgttgcacatgttgaacaaatgattgacctccatgaaacaaacacaccaaaacattgctgctgctaatgctaagtatcaggttgctggtagtaaaggaagaaaacatgttacttttgcacctggtgatatggtttggttgcatttgcgcaaggatcgttttcctactttgcgtcgttctaaattgatgcctcgtgccgctggtccttttaaggtgctaaccaagattaatgataatgcttatatcctagacctacctgtagaatttggtgtttcccctagttttaatgttgcagatttgaaaccatatgtgggcgaggatgacgagttgccgtcgaggacgacttcggttctagaaggggaggatgatgaggacatcaaatacaacaccagtacgactaccccagcagcaccttttccagcaccaccagatgcacctactccttaggcgccaccttcttcctcatctgggccaatcacccgagcccatgcaagagatctaaacttcgtcatgctactgaagaacgaaggcccacaagaatagacgctggcccaactgaagaccttgtgtgggtgcctagggctggccaccactaggggctgcgccccctccctggctgcccttccctaggggctgtgccccccccccctctccctctatttagatggaggcttcttttcttttcagactcgagttttgttttacaattagctttagctactcttgaacacgcgcaaatctgcgttgtcctcgtgtattttataactccaccttcgagtgataattagattgctcgcatctctttc

SEQ ID NO: 39914 - DNA, 1025 bp, Zea Mays
atttctcgttcagagttgagacatcagagaagggccacagcacagagagagtcagtctaaaaaaggcatagagagcctccctgccagtgccggactgccagtgtactgtgactgcgagggatcacctccgactccgactcagatccaaccccgaccgatgcgagcgccggcgatgcaccgctgggccgcggcggcgctcgcagcgttcctcgttgccttgccggctgccgccttctacctccctggcgtggcgcccaatgacttccacaaaaaagatccacttttggtgaaggtgaataagctgacatcaacaaagacacaacttccctactcgtattactctcttcctttttgcaagccaaacatgatagttgacagtgcagagaatcttggagaagttctgcgtggtgatcgcattgagaactctccttatgtgtttgagatgggggagcccaagatgtgccagattatttgcaaaacaaaaattgatgataaacaaacaaaggagctcaaggaaaagatagaggatgagtatcgggtgaacatgattcttgacaacctcccactagttgtttctattgcaaggcaggataggggtgctactgtttaccaggctgggtgtcaagggccaatatgctggtaacaaggatgagaaatcctttatccacaaccacttgacatttttagtgaaataccacaaggatgaaactacagatctctctagaattgttggatttgaggtcaagccattcagtatcaaccaccagtttgaagggccgtggaatgataaaaccactcgtttaatcacatgtgaccctcatgccagcaagcttgtggtaaactcagatactcctcaggaggttgaagctggaaaggaaatcatatttacctatgatgtgggcttcgaggccctttaggagactgacatggccttaaataggggtgaaaacgggtagggtacccgaaacgggtaccggatacgggtactgattcgggaccatttttcggatacggatacgggtatt

SEQ ID NO: 39915 - DNA, 2062 bp, Zea Mays
ctcgttcagagttgagacatcagagaagggccacagcacagagagagtcagtctaaaaaaggcatagagagcctccctgccagtgccggactgccagtgtactgtgactgcgagggatcacctccgactccgactcagatccaaccccgaccgatgcgagcgccggcgatgcaccgctgggccgcggcggcgctcgcagcgttcctcgttgccttgccggctgccgccttctacctccctggcgtggcgcccaatgacttccacaaaaaagatccacttttggtgaaggtgaataagctgacatcaacaaagacacaacttccctactcgtattactctcttcctttttgcaagccaaacatgatagttgacagtgcagagaatcttggagaagttctgcgtggtgatcgcattgagaactctccttatgtgtttgagatgggggagcccaagatgtgccagattatttgcaaaacaaaaattgatgataaacaaacaaaggagctcaaggaaaagatagaggatgagtatcgggtgaacatgattcttgacaacctcccactagttgtttctattgcaaggcaggataggggtgctactgtttaccaggctgggtgtcaagggccaatatgctggtaacaaggatgagaaatcctttatccacaaccacttgacatttttagtgaaataccacaaggatgaaactacagatctctctagaattgttggatttgaggtcaagccattcagtatcaaccaccagtttgaagggccgtggaatgataaaaccactcgtttaatcacatgtgaccctcatgccagcaagcttgtggtaaactcagatactcctcaggaggttgaagctggaaaggaaatcatatttacctatgatgtgggcttcgaggagagtgatgtcaagtgggcttctcgctgggacacatacctgttaatgacagatgatcaaattcactggttttctattgtgaactctctcatgatcgtactcttcttatctgggatggtggccatgattatgctccgcaccctgtatagagatatctctagatacaatcagcttgaaactgaagaagaagcccaagaggagacagggtggaagcttgttcatggagatgtattccgacctcctgcaaactctgatttactctgtgtctgtgttgggactggtgttcagttctttggtatgctgctagtaaccatgatttttgctgttttgggttttctttcgccatcaaaccggggaggactgatgactgccatgctgctcacttgggtcttgatggggttgttcgctggctatgcttcttcacgcctatataagatgttcaaaggatcagaatggaagagcatcaccctaaggaccgctttcctgtttcccgggattgctttcggtattttcttcattctgaatgctcttatatggggggagaagtcgtctggtgctgttcctttcaccacaatgtttgccttggtcctcctttggtttggtatctcggttcctcttgtatttgttgggagctatctgggtttcaagcaacctgccatcgaggctccggtgaagacaaacaagatccccagacaggtccccgagcaggcttggtacatgaaccctgccttcaccattcttattggtggtattcttccgttcggagcagttttcattgagctcttcttcatcctgacatcaatctggcttcaccagttctactacatctttggctttctcttcctggtgttcattatcctcatcatcacctgtgcggagatcacgatcgtgctgtgctatttccaactgtgcagcgaggactacatgtggtggtggaggtcctatctcacatcaggatcatctgcaatctacctcttcctgtatgcggggttctacttcttcactaagctgcagatcaccaaggtggtgtcggggatactatactttggttacatgcttcttgcctcgtttgccttctgtgtgctcaccggtacgatcggcttttgcgcttgcttctggttcacaagattgatttattcgtctgtgaagatcgactag

SEQ ID NO: 39916 - DNA, 836 bp, Zea Mays
gcatagagagcctccctgccagtgccggactgccagtgtactgtgactgcgagggatcacctccgactccgactcagatccaaccccgaccgatgcgagcgccggcgatgcaccgctgggccgcggcggcgctcgcagcgttcctcgttgccttgccggctgccgccttctacctccctggcgtggcgcccaatgacttccacaaaaaagatccacttttggtgaaggtgaataagctgacatcaacaaagacacaacttccctactcgtattactctcttcctttttgcaagccaaacatgatagttgacagtgcagagaatcttggagaagttctgcgtggtgatcgcattgagaactctccttatgtgtttgagatgggggagcccaagatgtgccagattatttgcaaaacaaaaattgatgataaacaaacaaaggagctcaaggaaaagatagaggatgagtatcgggtgaacatgattcttgacaacctcccactagttgtttctattgcaaggcaggataggggtgctactgtttaccaggctgggtgtcaagggccaatatgctggttgaaataccacaaggatgaaactacagatctctctagaattgttggatttgaggtcaagccattcagtatcaaccaccagtttgaagggccgtggaatgataaaaccactcgtttaatcacatgtgaccctcatgccagcaagcttgtggtaaactcagatactcctcaggaggttgaagctggaaaggaaatcatatttacctatgatgtgggcttcgaggtgatatttctcacatctgcttctctttttgtgctctaa

SEQ ID NO: 39917 - DNA, 2010 bp, Zea Mays
gagagcctccctgccagtgccggactgccagtgtactgtgactgcgagggatcacctccgactccgactcagatccaaccccgaccgatgcgagcgccggcgatgcaccgctgggccgcggcggcgctcgcagcgttcctcgttgccttgccggctgccgccttctacctccctggcgtggcgcccaatgacttccacaaaataattttctgcagaaagatccacttttggtgaaggtgaataagctgacatcaacaaagacacaacttccctactcgtattactctcttcctttttgcaagccaaacatgatagttgacagtgcagagaatcttggagaagttctgcgtggtgatcgcattgagaactctccttatgtgtttgagatgggggagcccaagatgtgccagattatttgcaaaacaaaaattgatgataaacaaacaaaggagctcaaggaaaagatagaggatgagtatcgggtgaacatgattcttgacaacctcccactagttgtttctattgcaaggcaggataggggtgctactgtttaccaggctgggtgtcaagggccaatatgctggtaacaaggatgagaaatcctttatccacaaccacttgacatttttagtgaaataccacaaggatgaaactacagatctctctagaattgttggatttgaggtcaagccattcagtatcaaccaccagtttgaagggccgtggaatgataaaaccactcgtttaatcacatgtgaccctcatgccagcaagcttgtggtaaactcagatactcctcaggaggttgaagctggaaaggaaatcatatttacctatgatgtgggcttcgaggagagtgatgtcaagtgggcttctcgctgggacacatacctgttaatgacagatgatcaaattcactggttttctattgtgaactctctcatgatcgtactcttcttatctgggatggtggccatgattatgctccgcaccctgtatagagatatctctagatacaatcagcttgaaactgaagaagaagcccaagaggagacagggtggaagcttgttcatggagatgtattccgacctcctgcaaactctgatttactctgtgtctgtgttgggactggtgttcagttctttggtatgctgctagtaaccatgatttttgctgttttgggttttctttcgccatcaaaccggggaggactgatgactgccatgctgctcacttgggtcttgatggggttgttcgctggctatgcttcttcacgcctatataagatgttcaaaggatcagaatggaagagcatcaccctaaggaccgctttcctgtttcccgggattgctttcggtattttcttcattctgaatgctcttatatggggggagaagtcgtctggtgctgttcctttcaccacaatgtttgccttggtcctcctttggtttggtatctcggttcctcttgtatttgttgggagctatctgggtttcaagcaacctgccatcgaggctccggtgaagacaaacaagatccccagacaggtccccgagcaggcttggtacatgaaccctgccttcaccattcttattggtggtattcttccgttcggagcagttttcattgagctcttcttcatcctgacatcaatctggcttcaccagttctactacatctttggctttctcttcctggtgttcattatcctcatcatcacctgtgcggagatcacgatcgtgctgtgctatttccaactgtgcagcgaggactacatgtggtggtggaggtcctatctcacatcaggatcatctgcaatctacctcttcctgtatgcggggttctacttcttcactaagctgcagatcaccaaggtggtgtcggggatactatactttggttacatgcttcttgcctcgtttgccttctgtgtgctcaccggtacgatcggcttttgcgcttgcttctggttcacaagattgatttattcgtctgtgaagatcgactag

SEQ ID NO: 39918 - DNA, 3213 bp, Zea Mays
ggaaatggcatgtatccattttggtgttgcagggagtgtttacacttcatttagtgacatagcatgaattttgaagtaaaataatgagtgtttggatagatcctgctgttgttttttctactgaaattgtatggacaattggacatccgtgagttagcaatgttggcctgttgcagtatttcgggtgttgataagatccataactttcttagcttcttaacttgaatgtcaccttctgttttgcagttccttcaaatgccagatagcccactggagacaaggtcacaaagatgaatgtcatccaccaactgttaatactaggcccgatgatgaaggaaaggctgaagagggaagagctgcccaagagaatgtatcagttggtgttaaacaggtttctgaaatgaacaaaccagctgttggatcagaaacttctgatttaaaccataatttgaagagctcaaatggtaaaagtaaacatacgctttcagaagcagtatgtaccagtgcaaaggttcctggaggtcatcagtccaacagcacggtcgaaatttctgaaaatgttccagtgtctgttgacagtagtaagatgggatcaagtatgaaacatgcaaatgcaaattttggtgaagatggttcttccaccaaggacttaaatggggtgtcaccatgtaagtctcagtcttctccatcaaacataaatggtcatagcagttttgtaaacgatgaattctgcaatcattccaaggaacaccaaagagccaaggatggcagtgttgttgatgattgtcttcagacaagcagtaccagagagcttgaagacagtagcattccccaagcagctgcatatgctgtcttggagcccaaaagttctaggactcctattcatgtagaacttgagaggtctaaaacgaaatctgttggtaatgacagcattcagagcatgaaacctgtgccttctgcattgactgttgacaaagccacttcagttcgtgggaattgttctattacacttaattcatctaaagtagcagataatcttcctgatagaaattttgaaccttcagataggtcaggttcaacagcgaataaccttgcaacatctctgaagaaaatggtcaggcagcaaactgcaccaaaagttgtgaggcattatccatcagaatctacactcttcccatatgaactttttgtgaggctctatgtcaaggttgagttgcgcccgtttggtcttcataacctaggcaacagttgctatgcaaatgctgttcttcagtgtttgatgtttactcgaccactcacaacatatcttttggaagggcttcactcaaaaaactgttctcaaaacggatggtgcttcatgtgtgaatttgaaaaactcattgtggagggcaaacggcgcaagattgccttgtcaccaactgggatactctctcatttgaatgacattggcagtagctttggtcctggtaaacaagaagatgctcatgaatttcttaggtatgcaattgatgctatgcaatctgtatgcacgaaggaagctagaaaaggaggtgttcttcggtcagcggaagaaacaactcttgtccaattgatatttgggggctatttgcgatctaagatcaaatgttcaaggtgccatgttagttctgaacaatgtgagcccatgttagatcttactgttgaaatagacggtgacattagttcgctcgatgaagcacttgtgcgctttacatccacagaagccttggatggagaaaacaaatatcactgcagcagatgcaaatcttatgaacgtgctaaaaagaagctgacaatagaagaagcgccgaatattctgactattgcactgaaaagatatcagtctggcaagtttggaaagatcagcaaagccatcagatttccagaaaccctcaacatagtttgctatatgaatccagatactgatgacatatcgccagtttacagcctctatgcagtggttgtccatcatgatgtcatgaatgctgccttctctggtcattatgtatgttatgttaaagatacacatggaaagtggttcaaggcagatgacagtcaggtgaaacctgtatctctggacaatgttatgtcaaagtgtgcttatatgctgctgtatgcaaggtgttcaccgagggcaccgagctctgttaggcaggctatttcggacccagcacgcccgaagaaggccaaacagaaggtggttccaggaggaacaacatggcgaggaggttctttcaacaggcaccaagatggtcagcggcatagcaaccacacggcagatgaccttacccatgcatttgacgaatataggaatgcaccatattcgccttcagattctccgagtcctagtgagagttcatccctctttagcaactctgatgcagggtcgcacagcactgtaagcaccgatagcagcgagagcacgaggaactcgaccagcaccgaggagtatgagtatgtgttcggagctgctgatcagatgtacccaggaggccccatgggaggagcacctgtggagagtgatcaaatgtacccaggaggccccatgggaggagcacctgtggagagtgactattctacgtattcccgatccaggtccagcttgaataccagctcatcaggccgggatgcatacagtgcggctagctctgccgaccacaagcatcaggtcgtcggttccggtgggcaggttgagggcgatgagagcacgtccttgttgtatactgacagaagtaatcagcagttgagcagtaagttaacagaccaatataggcagttagatgggagcggacatgaccctggagaaaccaggggcggtgtcttattgagaagaccatctagggacaggaccgctcaaacattttattgatgtgcagggtttgggctgtagagaaataatgtaatgtagcctgtaatattatctcgctgcattgtgtaaaaagagaagagagatgtcgtagtccataaaagttgaatccccaacttggtgatataatcccgaggaacctgtaacaaatgtcacgtattccacgggatcgacgtaggactgtaggagtagatcataagattaatgcaaaagttcattgaacacagactctgaaatctgtgggcctggcaacgctcaaacagatggcgtgtcactactcactagtaggctcgattttttgcaagtacaagtttgacatatatagggat

SEQ ID NO: 39919 - DNA, 2944 bp, Zea Mays
cttagcttcttaacttgaatgtcaccttctgttttgcagttccttcaaatgccagatagcccactggagacaaggtcacaaagatgaatgtcatccaccaactgttaatactaggcccgatgatgaaggaaaggctgaagagggaagagctgcccaagagaatgtatcagttggtgttaaacaggtttctgaaatgaacaaaccagctgttggatcagaaacttctgatttaaaccataatttgaagagctcaaatggtaaaagtaaacatacgctttcagaagcagtatgtaccagtgcaaaggttcctggaggtcatcagtccaacagcacggtcgaaatttctgaaaatgttccagtgtctgttgacagtagtaagatgggatcaagtatgaaacatgcaaatgcaaattttggtgaagatggttcttccaccaaggacttaaatggggtgtcaccatgtaagtctcagtcttctccatcaaacataaatggtcatagcagttttgtaaacgatgaattctgcaatcattccaaggaacaccaaagagccaaggatggcagtgttgttgatgattgtcttcagacaagcagtaccagagagcttgaagacagtagcattccccaagcagctgcatatgctgtcttggagcccaaaagttctaggactcctattcatgtagaacttgagaggtctaaaacgaaatctgttggtaatgacagcattcagagcatgaaacctgtgccttctgcattgactgttgacaaagccacttcagttcgtgggaattgttctattacacttaattcatctaaagtagcagataatcttcctgatagaaattttgaaccttcagataggtcaggttcaacagcgaataaccttgcaacatctctgaagaaaatggtcaggcagcaaactgcaccaaaagttgtgaggcattatccatcagaatctacactcttcccatatgaactttttgtgaggctctatgtcaaggttgagttgcgcccgtttggtcttcataacctaggcaacagttgctatgcaaatgctgttcttcagtgtttgatgtttactcgaccactcacaacatatcttttggaagggcttcactcaaaaaactgttctcaaaacggatggtgcttcatgtgtgaatttgaaaaactcattgtggagggcaaacggcgcaagattgccttgtcaccaactgggatactctctcatttgaatgacattggcagtagctttggtcctggtaaacaagaagatgctcatgaatttcttaggtatgcaattgatgctatgcaatctgtatgcacgaaggaagctagaaaaggaggtgttcttcggtcagcggaagaaacaactcttgtccaattgatatttgggggctatttgcgatctaagatcaaatgttcaaggtgccatgttagttctgaacaatgtgagcccatgttagatcttactgttgaaatagacggtgacattagttcgctcgatgaagcacttgtgcgctttacatccacagaagccttggatggagaaaacaaatatcactgcagcagatgcaaatcttatgaacgtgctaaaaagaagctgacaatagaagaagcgccgaatattctgactattgcactgaaaagatatcagtctggcaagtttggaaagatcagcaaagccatcagatttccagaaaccctcaacatagtttgctatatgaatccagatactgatgacatatcgccagtttacagcctctatgcagtggttgtccatcatgatgtcatgaatgctgccttctctggtcattatgtatgttatgttaaagatacacatggaaagtggttcaaggcagatgacagtcaggtgttcaccgagggcaccgagctctgttaggcaggctatttcggacccagcacgcccgaagaaggccaaacagaaggtggttccaggaggaacaacatggcgaggaggttctttcaacaggcaccaagatggtcagcggcatagcaaccacacggcagatgaccttacccatgcatttgacgaatataggaatgcaccatattcgccttcagattctccgagtcctagtgagagttcatccctctttagcaactctgatgcagggtcgcacagcactgtaagcaccgatagcagcgagagcacgaggaactcgaccagcaccgaggagtatgagtatgtgttcggagctgctgatcagatgtacccaggaggccccatgggaggagcacctgtggagagtgatcaaatgtacccaggaggccccatgggaggagcacctgtggagagtgactattctacgtattcccgatccaggtccagcttgaataccagctcatcaggccgggatgcatacagtgcggctagctctgccgaccacaagcatcaggtcgtcggttccggtgggcaggttgagggcgatgagagcacgtccttgttgtatactgacagaagtaatcagcagttgagcagtaagttaacagaccaatataggcagttagatgggagcggacatgaccctggagaaaccaggggcggtgtcttattgagaagaccatctagggacaggaccgctcaaacattttattgatgtgcagggtttgggctgtagagaaataatgtaatgtagcctgtaatattatctcgctgcattgtgtaaaaagagaagagagatgtcgtagtccataaaagttgaatccccaacttggtgatataatcccgaggaacctgtaacaaatgtcacgtattccacgggatcgacgtaggactgtaggagtagatcataagattaatgcaaaagttcattgaacacagactctgaaatctgtgggcctggcaacgctcaaacagatggcgtgtcactactcactagtaggctcgattttttgcaagtacaagtttgacatatatagggat

SEQ ID NO: 39920 - DNA, 2869 bp, Zea Mays
gaatgtcaccttctgttttgcagttccttcaaatgccagatagcccactggagacaaggtcacaaagatgaatgtcatccaccaactgttaatactaggcccgatgatgaaggaaaggctgaagagggaagagctgcccaagagaatgtatcagttggtgttaaacaggtttctgaaatgaacaaaccagctgttggatcagaaacttctgatttaaaccataatttgaagagctcaaatggtaaaagtaaacatacgctttcagaagcagtatgtaccagtgcaaaggttcctggaggtcatcagtccaacagcacggtcgaaatttctgaaaatgttccagtgtctgttgacagtagtaagatgggatcaagtatgaaacatgcaaatgcaaattttggtgaagatggttcttccaccaaggacttaaatggggtgtcaccatgtaagtctcagtcttctccatcaaacataaatggtcatagcagttttgtaaacgatgaattctgcaatcattccaaggaacaccaaagagccaaggatggcagtgttgttgatgattgtcttcagacaagcagtaccagagagcttgaagacagtagcattccccaagcagctgcatatgctgtcttggagcccaaaagttctaggactcctattcatgtagaacttgagaggtctaaaacgaaatctgttggtaatgacagcattcagagcatgaaacctgtgccttctgcattgactgttgacaaagccacttcagttcgtgggaattgttctattacacttaattcatctaaagtagcagataatcttcctgatagaaattttgaaccttcagataggtcaggttcaacagcgaataaccttgcaacatctctgaagaaaatggtcaggcagcaaactgcaccaaaagttgtgaggcattatccatcagaatctacactcttcccatatgaactttttgtgaggctctatgtcaaggttgagttgcgcccgtttggtcttcataacctaggcaacagttgctatgcaaatgctgttcttcagtgtttgatgtttactcgaccactcacaacatatcttttggaagggcttcactcaaaaaactgttctcaaaacggatggtgcttcatgtgtgaatttgaaaaactcattgtggagggcaaacggcgcaagattgccttgtcaccaactgggatactctctcatttgaatgacattggcagtagctttggtcctggtaaacaagaagatgctcatgaatttcttagatcaaatgttcaaggtgccatgttagttctgaacaatgtgagcccatgttagatcttactgttgaaatagacggtgacattagttcgctcgatgaagcacttgtgcgctttacatccacagaagccttggatggagaaaacaaatatcactgcagcagatgcaaatcttatgaacgtgctaaaaagaagctgacaatagaagaagcgccgaatattctgactattgcactgaaaagatatcagtctggcaagtttggaaagatcagcaaagccatcagatttccagaaaccctcaacatagtttgctatatgaatccagatactgatgacatatcgccagtttacagcctctatgcagtggttgtccatcatgatgtcatgaatgctgccttctctggtcattatgtatgttatgttaaagatacacatggaaagtggttcaaggcagatgacagtcaggtgaaacctgtatctctggacaatgttatgtcaaagtgtgcttatatgctgctgtatgcaaggtgttcaccgagggcaccgagctctgttaggcaggctatttcggacccagcacgcccgaagaaggccaaacagaaggtggttccaggaggaacaacatggcgaggaggttctttcaacaggcaccaagatggtcagcggcatagcaaccacacggcagatgaccttacccatgcatttgacgaatataggaatgcaccatattcgccttcagattctccgagtcctagtgagagttcatccctctttagcaactctgatgcagggtcgcacagcactgtaagcaccgatagcagcgagagcacgaggaactcgaccagcaccgaggagtatgagtatgtgttcggagctgctgatcagatgtacccaggaggccccatgggaggagcacctgtggagagtgatcaaatgtacccaggaggccccatgggaggagcacctgtggagagtgactattctacgtattcccgatccaggtccagcttgaataccagctcatcaggccgggatgcatacagtgcggctagctctgccgaccacaagcatcaggtcgtcggttccggtgggcaggttgagggcgatgagagcacgtccttgttgtatactgacagaagtaatcagcagttgagcagtaagttaacagaccaatataggcagttagatgggagcggacatgaccctggagaaaccaggggcggtgtcttattgagaagaccatctagggacaggaccgctcaaacattttattgatgtgcagggtttgggctgtagagaaataatgtaatgtagcctgtaatattatctcgctgcattgtgtaaaaagagaagagagatgtcgtagtccataaaagttgaatccccaacttggtgatataatcccgaggaacctgtaacaaatgtcacgtattccacgggatcgacgtaggactgtaggagtagatcataagattaatgcaaaagttcattgaacacagactctgaaatctgtgggcctggcaacgctcaaacagatggcgtgtcactactcactagtaggctcgattttttgcaagtacaagtttgacatatatagggat

SEQ ID NO: 39921 - DNA, 2594 bp, Zea Mays
gaatgtcaccttctgttttgcagttccttcaaatgccagatagcccactggagacaaggtcacaaagatgaatgtcatccaccaactgttaatactaggcccgatgatgaaggaaaggctgaagagggaagagctgcccaagagaatgtatcagttggtgttaaacaggtttctgaaatgaacaaaccagctgttggatcagaaacttctgatttaaaccataatttgaagagctcaaatggtaaaagtaaacatacgctttcagaagcagtatgtaccagtgcaaaggttcctggaggtcatcagtccaacagcacggtcgaaatttctgaaaatgttccagtgtctgttgacagtagtaagatgggatcaagtatgaaacatgcaaatgcaaattttggtgaagatggttcttccaccaaggacttaaatggggtgtcaccatataggtcaggttcaacagcgaataaccttgcaacatctctgaagaaaatggtcaggcagcaaactgcaccaaaagttgtgaggcattatccatcagaatctacactcttcccatatgaactttttgtgaggctctatgtcaaggttgagttgcgcccgtttggtcttcataacctaggcaacagttgctatgcaaatgctgttcttcagtgtttgatgtttactcgaccactcacaacatatcttttggaagggcttcactcaaaaaactgttctcaaaacggatggtgcttcatgtgtgaatttgaaaaactcattgtggagggcaaacggcgcaagattgccttgtcaccaactgggatactctctcatttgaatgacattggcagtagctttggtcctggtaaacaagaagatgctcatgaatttcttaggtatgcaattgatgctatgcaatctgtatgcacgaaggaagctagaaaaggaggtgttcttcggtcagcggaagaaacaactcttgtccaattgatatttgggggctatttgcgatctaagatcaaatgttcaaggtgccatgttagttctgaacaatgtgagcccatgttagatcttactgttgaaatagacggtgacattagttcgctcgatgaagcacttgtgcgctttacatccacagaagccttggatggagaaaacaaatatcactgcagcagatgcaaatcttatgaacgtgctaaaaagaagctgacaatagaagaagcgccgaatattctgactattgcactgaaaagatatcagtctggcaagtttggaaagatcagcaaagccatcagatttccagaaaccctcaacatagtttgctatatgaatccagatactgatgacatatcgccagtttacagcctctatgcagtggttgtccatcatgatgtcatgaatgctgccttctctggtcattatgtatgttatgttaaagatacacatggaaagtggttcaaggcagatgacagtcaggtgaaacctgtatctctggacaatgttatgtcaaagtgtgcttatatgctgctgtatgcaaggtgttcaccgagggcaccgagctctgttaggcaggctatttcggacccagcacgcccgaagaaggccaaacagaaggtggttccaggaggaacaacatggcgaggaggttctttcaacaggcaccaagatggtcagcggcatagcaaccacacggcagatgaccttacccatgcatttgacgaatataggaatgcaccatattcgccttcagattctccgagtcctagtgagagttcatccctctttagcaactctgatgcagggtcgcacagcactgtaagcaccgatagcagcgagagcacgaggaactcgaccagcaccgaggagtatgagtatgtgttcggagctgctgatcagatgtacccaggaggccccatgggaggagcacctgtggagagtgatcaaatgtacccaggaggccccatgggaggagcacctgtggagagtgactattctacgtattcccgatccaggtccagcttgaataccagctcatcaggccgggatgcatacagtgcggctagctctgccgaccacaagcatcaggtcgtcggttccggtgggcaggttgagggcgatgagagcacgtccttgttgtatactgacagaagtaatcagcagttgagcagtaagttaacagaccaatataggcagttagatgggagcggacatgaccctggagaaaccaggggcggtgtcttattgagaagaccatctagggacaggaccgctcaaacattttattgatgtgcagggtttgggctgtagagaaataatgtaatgtagcctgtaatattatctcgctgcattgtgtaaaaagagaagagagatgtcgtagtccataaaagttgaatccccaacttggtgatataatcccgaggaacctgtaacaaatgtcacgtattccacgggatcgacgtaggactgtaggagtagatcataagattaatgcaaaagttcattgaacacagactctgaaatctgtgggcctggcaacgctcaaacagatggcgtgtcactactcactagtaggctcgattttttgcaagtacaagtttgacatatatagggat

SEQ ID NO: 39922 - DNA, 1451 bp, Zea Mays
ctaaatacctaaagatgcaaatcttatgaacgtgctaaaaagaagctgacaatagaagaagcgccgaatattctgactattgcactgaaaagatatcagtctggcaagtttggaaagatcagcaaagccatcagatttccagaaaccctcaacatagtttgctatatgaatccagatactgatgacatatcgccagtttacagcctctatgcagtggttgtccatcatgatgtcatgaatgctgccttctctggtcattatgtatgttatgttaaagatacacatggaaagtggttcaaggcagatgacagtcaggtgaaacctgtatctctggacaatgttatgtcaaagtgtgcttatatgctgctgtatgcaaggtgttcaccgagggcaccgagctctgttaggcaggctatttcggacccagcacgcccgaagaaggccaaacagaaggtggttccaggaggaacaacatggcgaggaggttctttcaacaggcaccaagatggtcagcggcatagcaaccacacggcagatgaccttacccatgcatttgacgaatataggaatgcaccatattcgccttcagattctccgagtcctagtgagagttcatccctctttagcaactctgatgcagggtcgcacagcactgtaagcaccgatagcagcgagagcacgaggaactcgaccagcaccgaggagtatgagtatgtgttcggagctgctgatcagatgtacccaggaggccccatgggaggagcacctgtggagagtgatcaaatgtacccaggaggccccatgggaggagcacctgtggagagtgactattctacgtattcccgatccaggtccagcttgaataccagctcatcaggccgggatgcatacagtgcggctagctctgccgaccacaagcatcaggtcgtcggttccggtgggcaggttgagggcgatgagagcacgtccttgttgtatactgacagaagtaatcagcagttgagcagtaagttaacagaccaatataggcagttagatgggagcggacatgaccctggagaaaccaggggcggtgtcttattgagaagaccatctagggacaggaccgctcaaacattttattgatgtgcagggtttgggctgtagagaaataatgtaatgtagcctgtaatattatctcgctgcattgtgtaaaaagagaagagagatgtcgtagtccataaaagttgaatccccaacttggtgatataatcccgaggaacctgtaacaaatgtcacgtattccacgggatcgacgtaggactgtaggagtagatcataagattaatgcaaaagttcattgaacacagactctgaaatctgtgggcctggcaacgctcaaacagatggcgtgtcactactcactagtaggctcgattttttgcaagtacaagtttgacatatatagggat

SEQ ID NO: 39923 - DNA, 1209 bp, Zea Mays
atgactcctagggtctggaaacaaaccatggagccatgaccactctgtgaccgaggggaccggcagcggcgtaaggagtcttcctctctaacgctggcaacgtcgacaccgctggcaagcttctctccggtttgatcctttctcatctgctctctacccctctctctatctttctacgtccagttgctgcacatccacatcggctcctagatcccgaccaccgccctgctctccgacggcgtcggcgaggccgcgcagatctactgtgagctcgcccgcctcagattgtccctgctccagtaagagtaggcgaggacgagcctcccccatcttgggtgttggtgcctgacccattttctcaagttttgctatggatatgagcaatagagatcaccttaggaggagggaggaggatgatgatgacctcttccttttgattctcccttccctacatctcttgggctatcttggacgtagtaaaaagaaattgaggcatacatcagcgctgaccggggaggaaaaggttcgagagctacttgaaggccatatcaagaactgcagggtatcatttagaatggaaccttacattttcaaatccttggccaactatcttagaatggaaggattggttaaagatacaagaatcaaagttgaggaaaaacttggcttcttcctatacatgattagccacaatgcgacatttgaagatctccaagtcttttttggtcatagcaatgatacatttcaccgtgtcatcaaacatttcttcgacattgttatccctggccttagcatgtggttcctaaagcctccttccaatcaagttcatcctaaaattcatggagacaaccgattttatccatacttcaaggtgacttcttttaactcttatgtgtccatcttagaacatcctcaatattagatcttagaagatcgtttctttttttttgcagaattgcataggttctgtcggtacccagaaactagggtaccccttactactgtgtaaagacacagtacccacgcggctttctttagtcgcgtggtaaaagagctgtatgtgggactaggccataactcgcccgagcatcgagcgactactctgggccagcaacagcgcctgacccctccatataggtgggtccgggtccgccatgtgtccagagaaagtgatatacttcaagacatcaatagtgagtccggacctcc

SEQ ID NO: 39924 - DNA, 1567 bp, Zea Mays
ctttaatccctggagttccatctcccgtagctgtacttggtcttatccgtgtacagagctcgttcatttctccaacacgacatccctctccagctcattccagcgcactccaccagttgctctctgccgcgcccctggcccctctgtccgagctcgttccatagccggcttcgagctcgccctgctcggtcatggcgtggacaccagacgagctccctggtacgtgaattaaccacgtgatgcggagaaccagagttgagtcttccacaagataatgctacgcgtgagcttctccacaaggtgatgctgatggacgaacctgaagatggacagacgaaacaagtgtcagaacaaagactgatcgtcaagtgatcgtcgtctaacaaacactaacctagtgtttcatcccaggcaagcctcggtgcatgcaacccattccttgtatttttaaaagatttttatacactttaagtctagtgaaatgtgcattaagtttataggagttgcttggaaaatattggatgcattgcctaccttgatatccatacctttatagatacttctgatgaagtatcaaaatatgatttacaaaaatgcttagtcctgcttagatcttggggatagaggttgtcttttgcattaatgcctagctcaggggttatcctgaggaaggacgacttctacctgcaagaatatattttcattgggagcatagtgggatcttactgcaaaaatccctataatgctcttttcatcctaaggaacatagacaatcctaaggatggaagtacttaaatcgggacttgggctagaaataggtgatgttctacctaggttaattaaggattggatgtgtatgtaggcctgttgatcaaggactatcttaactagccacatgccccggatatgggacagggtaagcttgaactcggctattccatacatgaaaagacaatcgtgcactgggagtggagagatggcgagagtggcacgtaccctcctggcaacggaccgcctaaaaggggttgtgtgctctcgggtggcgtggacctattcatgcagtggaggatccgggggaatagtagacatatgcaagagttacgagaaacatatgtcgtgtggttagagatcctcagctgagtaaatcgattcggatcgccgttatatccccggagagtggagacttgatctccgacctacaacctaagtcaggatgtgaacattatgaataaaaatgatgttgtattgatgagatggtgaaattagactaggtgcaaccagagtctattaatatttaatctggctttaaattattgaaagtaagtgttgggggccttcggcttccgaaggtcctcaaaaacaagatttaacagtgtttctggagtataatgtgtgaacaggtatcttcggactcgagtcgatatcacagtaggagaagcccaaataatacgaaggttgatacagcgccgaagatgtgagcaggaaagcttcggcgtggtagcagaaaaggaaaccgacttaaagatgaaaaggctattcagacctcggtggattactatagaattac

SEQ ID NO: 39925 - DNA, 3334 bp, Zea Mays
ctttaatccctggagttccatctcccgtagctgtacttggtcttatccgtgtacagagctcgttcatttctccaacacgacatccctctccagctcattccagcgcactccaccagttgctctctgccgcgcccctggcccctctgtccgagctcgttccatagccggcttcgagctcgccctgctcggtcatggcgtggacaccagacgagctccctggtgctcgcccctctccagccgagctcctcctatctctccctcgcgtcttcctctccctgccatggacgccggagttccgctgctcggccatggccgctgtcgagcttcctgctcgtgcctatctccctccatggctgcgcttcatcaagctctctgcgcgccgtgaagcccctgcgcgtcgcggtctcccaagctcgccatggctgccggacgagtctcttccgtctctgctcgacatcttcgagcttggttcctgcgcgcgcgctgcactgctcccatggcgtgttcctacgcccggctggatttccctgctgagctcggtcacatgcctgggcaccgtgttctgcacgctcgccggtttcctcgcctccatcagccgcggcaacatgctcttgctggggcccctagtcgcaactcaagttgtcttttcggctggccaccagcgtgtcgtctagggacgattcttcactgttgcttctccacgaccgtcaccttccatggccggcgttcccctctcttccattgccgcgatgctccctcgctcctgctgctcgccgtggccggctccctgctgcgctcgccctggtcgccgccgtcgagttctctggtgtctacacgccgtcgcccagctcgccaaagtcgccatggctgcgcatagtgttcttgtcgatgttgtgccgttgccgatgctgtagagctcgccttgctccttgcgtcgccgttcgtcggtctcggatgcttgggtctctagccgcgtttccgtctctagtcctgaccgcgttccagaagctctttctggttggtcgcgtcggtcgtcccgcgtacgctcgccaattttcttggccgcgtctgttgagcttcccagcgctccggctagcggatatcgtcgggttcgattgtcccagctcgtcctggtggccgttgatttggagctctgcgcggactcggccattcccaacactatccatgtagccatcgtacgtctccgcgtcatgtatagcaatatcatcgatcgtgcctttgcatgctttgccgcgtcgagctctttcccgttgtgactcgcgcgctatctttttgtcaatggaatactaatgagcttctcctcgcgacacagtttttctgtgtcgttgttgcgctagaagacgaaagaaaaccgccaatgcaatgcttgtcaggtgctggtgttgtgcgtgggccggatagcgccttcgatttcgcgatttcaaatcggattttagtagcgtaacttgattttctgcttctgttattttattttaataaatggattagtggaatagattgcgatatttaacgtgtaatcgacgaaaaacccggattcgtattcgttaatcaatgtagtgaatctgagctaaatttattattggcgcacaagtttgttagccgaattgttagatagattaaataaatatgtgtggtgcgaaataaaatcaaattagttcttggtaagcaaagtggtataatttataaagcgagggataaatttagcatttaactaattagctgatgagttgtgtttaggctaattatatttaatgtgtatggtttgttgttcgtgatgtttgtgttaggttcgttaatttagagaagcgtgattattgcgcttagtcgtacgtcagtaactagtgtttccgtataaaattgtacaacgcctcgccactagatgtttaatgcgatgtcgtataacactatttagatttgtgctattcctgtttatatgcattcatgtgcattatgcatatcattcaggtacgtgaattaaccacgtgatgcggagaaccagagttgagtcttccacaagataatgctacgcgtgagcttctccacaaggtgatgctgatggacgaacctgaagatggacagacgaaacaagtgtcagaacaaagactgatcgtcaagtgatcgtcgtctaacaaacactaacctagtgtttcatcccaggcaagcctcggtgcatgcaacccattccttgtatttttaaaagatttttatacactttaagtctagtgaaatgtgcattaagtttataggagttgcttggaaaatattggatgcattgcctaccttgatatccatacctttatagatacttctgatgaagtatcaaaatatgatttacaaaaatgcttagtcctgcttagatcttggggatagaggttgtcttttgcattaatgcctagctcaggggttatcctgaggaaggacgacttctacctgcaagaatatattttcattgggagcatagtgggatcttactgcaaaaatccctataatgctcttttcatcctaaggaacatagacaatcctaaggatggaagtacttaaatcgggacttgggctagaaataggtgatgttctacctaggttaattaaggattggatgtgtatgtaggcctgttgatcaaggactatcttaactagccacatgccccggatatgggacagggtaagcttgaactcggctattccatacatgaaaagacaatcgtgcactgggagtggagagatggcgagagtggcacgtaccctcctggcaacggaccgcctaaaaggggttgtgtgctctcgggtggcgtggacctattcatgcagtggaggatccgggggaatagtagacatatgcaagagttacgagaaacatatgtcgtgtggttagagatcctcagctgagtaaatcgattcggatcgccgttatatccccggagagtggagacttgatctccgacctacaacctaagtcaggatgtgaacattatgaataaaaatgatgttgtattgatgagatggtgaaattagactaggtgcaaccagagtctattaatatttaatctggctttaaattattgaaagtaagtgttgggggccttcggcttccgaaggtcctcaaaaacaagatttaacagtgtttctggagtataatgtgtgaacaggtatcttcggactcgagtcgatatcacagtaggagaagcccaaataatacgaaggttgatacagcgccgaagatgtgagcaggaaagcttcggcgtggtagcagaaaaggaaaccgacttaaagatgaaaaggctattcagacctcggtggattactatagaattac

SEQ ID NO: 39926 - DNA, 2019 bp, Zea Mays
gctgcggcctagctctctatccaaggcccaagcgcatccccgggggcccatcgtagccgtcctcgatctccctcgctccgcagcacaccactcgtagccgccggcaaggcgactgacctctttcctgctgccgagcgccatcgtctcctcggaccatctcacctcagagctgctgcgaccgccggccaacccgtctagagcctagaacatctttgcattttggagagtctccactcggagctattgtacagtctccatccctttcaacgagatggcacgtcagtctgctctctcgcttgtgagggatcgagcaaagacgggagcgctgaagcgtctgactctgagttcatcgaagacggctgggaggaactcgtctgggcgcatcacctctttccaccgtggtggaggggccaagaggttgcagaggaaggtcgatgtgaaacgcgacgcctgttccacgggtattgtggagcggatcgagtacgacccgaatcgctcctcgagccttgctcttgtgcgatgggtgcaaggggtgcatttccgccgccccaagagtccacaagaactcagtgccatgtctcaaatccaacaatctgctacagctgatgtctccggccggttttcccttgctgcattatctagtagagtgcataaagataaggaagcttctgcactgtactctgctctgggaaatggagatatttctgcatctcttaaatctggtgcgtcatcgagcttaccgaggatagctgtagctggtgccaagcccacattctttgctcaagccaaagcggatgaagaaggaaaacatacattttcctttactgagattcagaaatgggcaacagatgatgtgctttgggcacagagaatgaagcgtcaagctgcactctcctggcagaatgaactgaagaagaaacatttgcttaagacacaagctaacagcttcagtagcttggcagcaaagactagtggtacgagtaaagggccaaagggaaaggctgattgcataccagtgtcttatatattggccagtcaccagtgcatgccaggtagtacagtgatgaactataattcctcgaagccttctaagagttcagcctcttcaccatattccttggaaaatcagttcgatataattgatctcaactcaaaggttggaaattgtataccattagccaatgcacgaattggaacctgggtgcataatattgaatgtcgtcctggtcagggtgggaagatggttcgagcagctggtacatatgctaaggtagtccaggagccaggcgccaagtgtgtcctgcgccttccctcaggtgctgagaaggctgttgattcaagatgccatgctacaattggtatagtctccaacccaagccatggtacacgcaagctaagaaaggcagggcacagcaggtggttaggcagacgccctgttgtccgtggtgttgctatgaatcctgtggatcatccccatggtggaggcgaggggcgtactaaaggaggcaggccttcagtttctccctggggaaagcccaccaaagcagggtaccgatcaccaagtgtggccagtcggaaagcgtttgctggaacaaagctcatacagttcagaaaataaagaatatgtgtttgtggcagagggaactgtgataatcgacttgattctggtgcagcagaagaaatggttgttatcactccaatcgacaacacagaataaatgttttcactccaatggttgttatcgctacttttccccttttgtcattctgcagaaactagctcttcatgaaacctgattagtgaatttcttcctgtatttcttttgcttctttaacacttggcaaatttggctatggttccacggctctgattgagaagggatgctcttacctttttggtcaaggcctgtccaaaactaagaaacacatgttggtagtatgatttttctctctatatttcgcatgctgtctgttaagttattgtttacattttattgtggctatgagcgtgattggatgc

SEQ ID NO: 39927 - DNA, 1874 bp, Zea Mays
cacatctgtaccaggtctagattgtgtagaaaaagatctattttctaggcaagagcctagaacatctttgcattttggagagtctccactcggagctattgtacagtctccatccctttcaacgagatggcacgtcagtctgctctctcgcttgtgagggatcgagcaaagacgggagcgctgaagcgtctgactctgagttcatcgaagacggctgggaggaactcgtctgggcgcatcacctctttccaccgtggtggaggggccaagaggttgcagaggaaggtcgatgtgaaacgcgacgcctgttccacgggtattgtggagcggatcgagtacgacccgaatcgctcctcgagccttgctcttgtgcgatgggtgcaaggggtgcatttccgccgccccaagagtccacaagaactcagtgccatgtctcaaatccaacaatctgctacagctgatgtctccggccggttttcccttgctgcattatctagtagagtgcataaagataaggaagcttctgcactgtactctgctctgggaaatggagatatttctgcatctcttaaatctggtgcgtcatcgagcttaccgaggatagctgtagctggtgccaagcccacattctttgctcaagccaaagcggatgaagaaggaaaacatacattttcctttactgagattcagaaatgggcaacagatgatgtgctttgggcacagagaatgaagcgtcaagctgcactctcctggcagaatgaactgaagaagaaacatttgcttaagacacaagctaacagcttcagtagcttggcagcaaagactagtggtacgagtaaagggccaaagggaaaggctgattgcataccagtgtcttatatattggccagtcaccagtgcatgccaggtagtacagtgatgaactataattcctcgaagccttctaagagttcagcctcttcaccatattccttggaaaatcagttcgatataattgatctcaactcaaaggttggaaattgtataccattagccaatgcacgaattggaacctgggtgcataatattgaatgtcgtcctggtcagggtgggaagatggttcgagcagctggtacatatgctaaggtagtccaggagccaggcgccaagtgtgtcctgcgccttccctcaggtgctgagaaggctgttgattcaagatgccatgctacaattggtatagtctccaacccaagccatggtacacgcaagctaagaaaggcagggcacagcaggtggttaggcagacgccctgttgtccgtggtgttgctatgaatcctgtggatcatccccatggtggaggcgaggggcgtactaaaggaggcaggccttcagtttctccctggggaaagcccaccaaagcagggtaccgatcaccaagtgtggccagtcggaaagcgtttgctggaacaaagctcatacagttcagaaaataaagaatatgtgtttgtggcagagggaactgtgataatcgacttgattctggtgcagcagaagaaatggttgttatcactccaatcgacaacacagaataaatgttttcactccaatggttgttatcgctacttttccccttttgtcattctgcagaaactagctcttcatgaaacctgattagtgaatttcttcctgtatttcttttgcttctttaacacttggcaaatttggctatggttccacggctctgattgagaagggatgctcttacctttttggtcaaggcctgtccaaaactaagaaacacatgttggtagtatgatttttctctctatatttcgcatgctgtctgttaagttattgtttacattttattgtggctatgagcgtgattggatgc

SEQ ID NO: 39928 - DNA, 1336 bp, Zea Mays
ttaaattcgttgatcacggatcacggtccacatattcttgggtgggcctctcctctcgtttgcctgcgccgccgcgatcgccaatcggcatggctcttcccaaaccccgcccgccaacgccgacggcgtcagcggccacgggcacctcctcgtcgcgaatagactcgccatcgctaaaggccgcgctcgcaatggctctcatccactacaaccgcctccctggcaaagccaacgccaccgcgggcacatcacccccgtctctcctccactggaagcgcaaggccaaggaccggaagcgcgaaatcctccgcctccgcgaggagctcaaggtcctccaagatggggtgcgcggggaggagatggagcccccggttgcgtcgtgccggtgccacttcttcgacgggtgccgggaccttcgaccgcagcagggtggcggtggtggggagcactgggttgacgaggtgctgaggaggaggtttctcagactggtgcggtggaaggagaagcgacggcgagtggatcgatctcttccaagttctagtttgatcgatttcaacagtgaggatgagatgcagcagctcagcatgtcgactgatttcctggtggagctatcagacggcatttttgccaaaagtgaagctggccactcatttgctacattttctcaccaagcagtagatttcattttggctacactgaagaacattctttcatcggaaagggaaaaagacttagttggggagataatcgatagtttagtgactcgtttgatgaaaaggatgtgcactgttcctgaaaagcttgtcacatcagattcaggtctccaattttcatcagctagggcttcagacaaaccttcaggttctccagtagtagtaagacaggaactccatcttgaagccttgtgcccttgtacgaggagacaatattggttatgaacttccagacacaccagatgctgggtctgggtctgcatcttctgtaggttctggatctgctgcaggcacattaggtgctacatctgcaggttcagatgctgcatcagtttgtgcagtagtatgcttcctccctttttgttgacattgatagacattgctccgtgttggcttcatttcatacaacctgtcacattattgttcagcaggtgctgtatttactagagcctcctgagtcttgcttgcatttgtatcatgtgtacattagtagatatatctcaagaagtgtttgcattagtatcaactagatgatgatttggcaataaggaatcagctgtatattgatgtcccctattatcaaagttagatgaaggcaacaagatgggaggtaggagattaat

SEQ ID NO: 39929 - DNA, 1577 bp, Zea Mays
ttaaattcgttgatcacggatcacggtccacatattcttgggtgggcctctcctctcgtttgcctgcgccgccgcgatcgccaatcggcatggctcttcccaaaccccgcccgccaacgccgacggcgtcagcggccacgggcacctcctcgtcgcgaatagactcgccatcgctaaaggccgcgctcgcaatggctctcatccactacaaccgcctccctggcaaagccaacgccaccgcgggcacatcacccccgtctctcctccactggaagcgcaaggccaaggaccggaagcgcgaaatcctccgcctccgcgaggagctcaaggtcctccaagatggggtgcgcggggaggagatggagcccccggttgcgtcgtgccggtgccacttcttcgacgggtgccgggaccttcgaccgcagcagggtggcggtggtggggagcactgggttgacgaggtgctgaggaggaggtttctcagactggtgcggtggaaggagaagcgacggcgagtggatcgatctcttccaagttctagtttgatcggttggttctgtcttgaatccaccgtcataattttgatgtcattcaaacatctaaaatttgaaaagtctgtaaacaacagcctttcacttgccttggactgcatttctcttgcagtagaaaatctgtcaatgtacagtagaaaattttccctgtgacgctcatttctgattatctgggttactcttggaagagaaaatgttatatttcttaggttatagtttcaattgtttcacttctccagatttcaacagtgaggatgagatgcagcagctcagcatgtcgactgatttcctggtggagctatcagacggcatttttgccaaaagtgaagctggccactcatttgctacattttctcaccaagcagtagatttcattttggctacactgaagaacattctttcatcggaaagggaaaaagacttagttggggagataatcgatagtttagtgactcgtttgatgaaaaggatgtgcactgttcctgaaaagcttgtcacatcagattcaggtctccaattttcatcagctagggcttcagacaaaccttcaggttctccagtagtagtaagacaggaactccatcttgaagccttgtgcccttgtacgaggagacaatattggttatgaacttccagacacaccagatgctgggtctgggtctgcatcttctgtaggttctggatctgctgcaggcacattaggtgctacatctgcaggttcagatgctgcatcagtttgtgcagtagtatgcttcctccctttttgttgacattgatagacattgctccgtgttggcttcatttcatacaacctgtcacattattgttcagcaggtgctgtatttactagagcctcctgagtcttgcttgcatttgtatcatgtgtacattagtagatatatctcaagaagtgtttgcattagtatcaactagatgatgatttggcaataaggaatcagctgtatattgatgtcccctattatcaaagttagatgaaggcaacaagatgggaggtaggagattaat

SEQ ID NO: 39930 - DNA, 1540 bp, Zea Mays
ttaaattcgttgatcacggatcacggtccacatattcttgggtgggcctctcctctcgtttgcctgcgccgccgcgatcgccaatcggcatggctcttcccaaaccccgcccgccaacgccgacggcgtcagcggccacgggcacctcctcgtcgcgaatagactcgccatcgctaaaggccgcgctcgcaatggctctcatccactacaaccgcctccctggcaaagccaacgccaccgcgggcacatcacccccgtctctcctccactggaagcgcaaggccaaggaccggaagcgcgaaatcctccgcctccgcgaggagctcaaggtcctccaagatggggtgcgcggggaggagatggagcccccggttgcgtcgtgccggtgccacttcttcgacgggtgccgggaccttcgaccgcagcagggtggcggtggtggggagcactgggttgacgaggtgctgaggaggaggtttctcagactggtgcggtggaaggagaagcgacggcgagtggatcgatctcttccaagttctagtttgatcgatttcaacagtgaggatgagatgcagcagctcagcatgtcgactgatttcctggtggagctatcagacggcatttttgccaaaagtgaagctggccactcatttgctacattttctcaccaagcagtagatttcattttggctacactgaagaacattctttcatcggaaagggaaaaagacttagttggggagataatcgatagtttagtgactcgtttgatgaaaaggatgtgcactgttcctgaaaagcttgtcacatcagattcaggatcaactggctgctcagatgcccagttctcagtgcagcacttattccgtaagttgggaaatgatgaattcattggtcagcggttacttgagttcctcatatctgattacatgaaagtttggctatgctgtgagcatattaacaaaagactttttgaagaatgtaccagatctattctcaaggcacgcaatgatttgcaaatcctggaaaacatgaatgggctctatgtggtgtacattgagcgtgtggtcggaaggttggcaagggatgtggctcctgctgcacatcaggggaagctggacctagaagttttctccaaactgctgtgctgagagtgccttgcatatgacattccaagcctgacccggcctgttatatgcttaggttgattcaaaaccacgacaccattggtccacttagactatgcatagttacatttctgtttgaaagacaaactttagaatttggtagtggatctacttgtatggcctgttgtttcatgtcaccattgatagttgattagtttcattttgctgacttaacccctatacactgtgagttgctgtagacatgctttgttactctgcaaatttaggttgcatccgtgaataatagtaacttctgcgcgccctgcgcgcacaaaaaacgttacacaatatgtagtgtaaatgacatatttatacttagttatatatgctaatgcggtgaatttggcttggac

SEQ ID NO: 39931 - DNA, 1504 bp, Zea Mays
ttaaattcgttgatcacggatcacggtccacatattcttgggtgggcctctcctctcgtttgcctgcgccgccgcgatcgccaatcggcatggctcttcccaaaccccgcccgccaacgccgacggcgtcagcggccacgggcacctcctcgtcgcgaatagactcgccatcgctaaaggccgcgctcgcaatggctctcatccactacaaccgcctccctggcaaagccaacgccaccgcgggcacatcacccccgtctctcctccactggaagcgcaaggccaaggaccggaagcgcgaaatcctccgcctccgcgaggagctcaaggtcctccaagtgcggtggaaggagaagcgacggcgagtggatcgatctcttccaagttctagtttgatcgatttcaacagtgaggatgagatgcagcagctcagcatgtcgactgatttcctggtggagctatcagacggcatttttgccaaaagtgaagctggccactcatttgctacattttctcaccaagcagtagatttcattttggctacactgaagaacattctttcatcggaaagggaaaaagacttagttggggagataatcgatagtttagtgactcgtttgatgaaaaggatgtgcactgttcctgaaaagcttgtcacatcagattcaggatcaactggctgctcagatgcccagttctcagtgcagcacttattccgtaagttgggaaatgatgaattcattggtcagcgggtaatccttgtagtttctcaaaagatatccaacgtatctgaaagattgttcttggctgatccgtttgctgatgctttccctgatatgcatgacaatatattcatcatgattcagttacttgagttcctcatatctgattacatgaaagtttggctatgctgtgagcatattaacaaaagactttttgaagaatgtaccagatctattctcaaggcacgcaatgatttgcaaatcctggaaaacatgaatgggctctatgtggtgtacattgagcgtgtggtcggaaggttggcaagggatgtggctcctgctgcacatcaggggaagctggacctagaagttttctccaaactgctgtgctgagagtgccttgcatatgacattccaagcctgacccggcctgttatatgcttaggttgattcaaaaccacgacaccattggtccacttagactatgcatagttacatttctgtttgaaagacaaactttagaatttggtagtggatctacttgtatggcctgttgtttcatgtcaccattgatagttgattagtttcattttgctgacttaacccctatacactgtgagttgctgtagacatgctttgttactctgcaaatttaggttgcatccgtgaataatagtaacttctgcgcgccctgcgcgcacaaaaaacgttacacaatatgtagtgtaaatgacatatttatacttagttatatatgctaatgcggtgaatttggcttggac

SEQ ID NO: 39932 - DNA, 1505 bp, Zea Mays
ttaaattcgttgatcacggatcacggtccacatattcttgggtgggcctctcctctcgtttgcctgcgccgccgcgatcgccaatcggcatggctcttcccaaaccccgcccgccaacgccgacggcgtcagcggccacgggcacctcctcgtcgcgaatagactcgccatcgctaaaggccgcgctcgcaatggctctcatccactacaaccgcctccctggcaaagccaacgccaccgcgggcacatcacccccgtctctcctccactggaagcgcaaggccaaggaccggaagcgcgaaatcctccgcctccgcgaggagctcaaggtcctccaagatggggtgcgcggggaggagatggagcccccggttgcgtcgtgccggtgccacttcttcgacgggtgccgggaccttcgaccgcagcagggtggcggtggtggggagcactgggttgacgaggtgctgaggaggaggtttctcagactggtgcggtggaaggagaagcgacggcgagtggatcgatctcttccaagttctagtttgatcgatttcaacagtgaggatgagatgcagcagctcagcatgtcgactgatttcctggtggagctatcagacggcatttttgccaaaagtgaagctggccactcatttgctacattttctcaccaagcagtagatttcattttggctacactgaagaacattctttcatcggaaagggaaaaagacttagttggggagataatcgatagtttagtgactcgtttgatgaaaaggatgtgcactgttcctgaaaagcttgtcacatcagattcaggatcaactggctgctcagatgcccagttctcagtgcagcacttattccttacttgagttcctcatatctgattacatgaaagtttggctatgctgtgagcatattaacaaaagactttttgaagaatgtaccagatctattctcaaggcacgcaatgatttgcaaatcctggaaaacatgaatgggctctatgtggtgtacattgagcgtgtggtcggaaggttggcaagggatgtggctcctgctgcacatcaggggaagctggacctagaagttttctccaaactgctgtgctgagagtgccttgcatatgacattccaagcctgacccggcctgttatatgcttaggttgattcaaaaccacgacaccattggtccacttagactatgcatagttacatttctgtttgaaagacaaactttagaatttggtagtggatctacttgtatggcctgttgtttcatgtcaccattgatagttgattagtttcattttgctgacttaacccctatacactgtgagttgctgtagacatgctttgttactctgcaaatttaggttgcatccgtgaataatagtaacttctgcgcgccctgcgcgcacaaaaaacgttacacaatatgtagtgtaaatgacatatttatacttagttatatatgctaatgcggtgaatttggcttggac

SEQ ID NO: 39933 - DNA, 1705 bp, Zea Mays
ttaaattcgttgatcacggatcacggtccacatattcttgggtgggcctctcctctcgtttgcctgcgccgccgcgatcgccaatcggcatggctcttcccaaaccccgcccgccaacgccgacggcgtcagcggccacgggcacctcctcgtcgcgaatagactcgccatcgctaaaggccgcgctcgcaatggctctcatccactacaaccgcctccctggcaaagccaacgccaccgcgggcacatcacccccgtctctcctccactggaagcgcaaggccaaggaccggaagcgcgaaatcctccgcctccgcgaggagctcaaggtcctccaagatggggtgcgcggggaggagatggagcccccggttgcgtcgtgccggtgccacttcttcgacgggtgccgggaccttcgaccgcagcagggtggcggtggtggggagcactgggttgacgaggtgctgaggaggaggtttctcagactggtgcggtggaaggagaagcgacggcgagtggatcgatctcttccaagttctagtttgatcggttggttctgtcttgaatccaccgtcataattttgatgtcattcaaacatctaaaatttgaaaagtctgtaaacaacagcctttcacttgccttggactgcatttctcttgcagtagaaaatctgtcaatgtacagtagaaaattttccctgtgacgctcatttctgattatctgggttactcttggaagagaaaatgttatatttcttaggttatagtttcaattgtttcacttctccagatttcaacagtgaggatgagatgcagcagctcagcatgtcgactgatttcctggtggagctatcagacggcatttttgccaaaagtgaagctggccactcatttgctacattttctcaccaagcagtagatttcattttggctacactgaagaacattctttcatcggaaagggaaaaagacttagttggggagataatcgatagtttagtgactcgtttgatgaaaaggatgtgcactgttcctgaaaagcttgtcacatcagattcaggattcagttacttgagttcctcatatctgattacatgaaagtttggctatgctgtgagcatattaacaaaagactttttgaagaatgtaccagatctattctcaaggcacgcaatgatttgcaaatcctggaaaacatgaatgggctctatgtggtgtacattgagcgtgtggtcggaaggttggcaagggatgtggctcctgctgcacatcaggggaagctggacctagaagttttctccaaactgctgtgctgagagtgccttgcatatgacattccaagcctgacccggcctgttatatgcttaggttgattcaaaaccacgacaccattggtccacttagactatgcatagttacatttctgtttgaaagacaaactttagaatttggtagtggatctacttgtatggcctgttgtttcatgtcaccattgatagttgattagtttcattttgctgacttaacccctatacactgtgagttgctgtagacatgctttgttactctgcaaatttaggttgcatccgtgaataatagtaacttctgcgcgccctgcgcgcacaaaaaacgttacacaatatgtagtgtaaatgacatatttatacttagttatatatgctaatgcggtgaatttggcttggac

SEQ ID NO: 39934 - DNA, 2542 bp, Zea Mays
tcactacaaaacgacctgccctttagcaatgcatatatgtgttggtacaagcctatataagcgttgctagggtctataccaacgcataattatgtgttgcctatactgtcgttgctaggggctatcgtaacacttatacatatgttggtaagtcatataaataagcgttggtaaactgcaacagatttttataagatacaacaacgctttaatgtgttggtgccgcccatgaccaactcgtcatcataggatgcaacgtagattcgagttgtggcaacatttttatgcgttgcaagcaataaaccaataaaaaaattgaatattttattttgaggttaagagtacatgctgaacaatgcacatttgatatttctggaatcatccacacacacgacaaataagcaaaaataatatatattaaaaatcaatagtagcattacaagaagttgatccatagtttcatatataatatatgttcgagacacttttggtaggataaaaatatatttacatatgactcatagccatcgatgatctagatccaaacaaaacaataagcaaaacaaatatccatatgcagcaagcccttgcatcttcatagtgttctaggttcagaactgaaaaaatgaagaccagaaaatataacaggttaatatataccaaatgaaaggaataagtaatgcaaagtagagaagagatgtgcaaatatcacctttcaaagaagggaaaaggaaaatattatagcgcataaatcagtataccatataatatgttgagtaatctgcatatacaagacaaaacatacatatacaaaggacgagggatgagcaataccagaaatccctacgcctcattcataccatttgtgctctttaatgtcttttttgaggaaattttcagatttggggaattcaactactgaatcggcttagcaaaggacacagttcacacatgacatactaatgcatcatacctacagttaataagactttcccaacgtggagaaaacataaccaccgaggtccatatctgcaaacgtaacatgaacaccactgttagcataaaactgagtagaaaagactcttccagctttcccaacgtggagaaaactctgtttcaccataacactgctgttagggaacataatacaaccaaaaagttgatgaacattctgtatttgttactaaaatctgtttacttaaataaaaagaacccttgtgaagtgaaatggatactagattgttgcatcaacgaaacaaaggtgtaataacgtagcgaagcaattgcccacgagattcaaccacagtgtttgttgcacaaagaacaaactccttcagtatatatagaacaaaatagcttaatggtcttggattcagaaaccagctccaacaggtttgtcaacacaaatatatacagaacagatagaaggaaatggaaatgctctacgcatacaggtgaggtactactcctttccatgcagatattgcagtttcacagtatgaataaaaagatagtgtgtttcaaattcagaatacctatttggatgcacactcctatctccaatggcagtccagtcaaaaatggtggcccaaaaaaacatggttggagcaacctgctttgagtactgaaccattttttaacaaaaggttaaaaatgtggatcaaaatcagtaatccaaccctaaaggttaaaaatgtgggtccaaattatcacaccattaactcaagtgccctactgaaggttttatgtcaagggtgatggatcttgacctgacacaagctttaggatcaaaataaaattacaactgctttgagaaacatgcaggactcaaaaggattcgaaactaggcaggaccattggacttggtaggcttgaccagtccattttgaaacattcatttgcaaagtaaatttgatggttgatcatgacctgaagcacccagacattaacagtctgtttggattgcgacaccactccatccagaaatcagttcgttcgtccgacggaaaatagccatccagaaatcagttcgatcgtcatgggacggagccatgttgtccaacgatttctggacctgtgagtccgttaaagtaccagatcaggcgatagagagaccaggggtataccatgtaattggtgctgatgagggggtcgttcatagcgacgagctcgtcatcatcgctctgcagggccaccttggccaccagccttctgatcttgccaaatcctgcaccaacaaaaaaaggcgatcaaaacccacaaggtcggcgtaactcaaatacattatacatcacaactcagatcggaggatgcaaactcaacattcatcctgatcttgctcttggcaatttatattttcattaggacaagtacaggaccattttttgacaaaatataaatgtggtatacataagaaacaaaagtctgaaatgctacctgaaaaaaatcgatgacatcagcaatctgatctacaaggtcattgatagatggaacaggcacatcagctaaaatctaagctgctcccaattgcaatacttaacat

SEQ ID NO: 39935 - DNA, 2636 bp, Zea Mays
ctccatcttcatctcctcacggcgcgttcctgcgtcctggtccgagtctccagctcgcgcccagccgcttcatctcccagcctctcctccttgcttctctctccctctcgcgtcttactcccatggcgcgctctctgctcgctcgcgctttgccgagctccttcccgatctccgccccactatggcgctggccgccgcacctatgccggttctctgctcggccatggaagtcgcgaccccctagcttcctctaccgactccggccggagctccctcccatggcagccgctcgtctgtctccctgatgctcgtcgcgtgcgtccctgcctctctgttcttttctcctcctcaaactcgccttccagttcgctcgacctccttcccctggagctcccacacgccgctgtcctggtccaagctcccgcgcgagcccctcccctcttctcactagtgccgctctctacttttccctcctcttcttcttccccgcgcacccagacattccggcatccggcccagctcggtcgctcctccctaaactcgccccaaccatggccacgcccctgcacgtcttccccacgcgtgcctgctccccatggccggctgccagcccttgttcctccatcggactgcgcttcggcccctcccatggcgctcggcatcacctctgtctcccctgcgcgtcgtgtttcttttcccaccccatggcggcttcccatggcgccccagctccctggctcaccggccgtgcagctcggccccgcccatccgcgctcctcccggctccagccccctctgcccggtcgccgtcgagttccctgcgcgcgctcgtggctcggcagcaacaccagcgaacttagtccctgcatcctccctgctgttgcgtccatggcgcccagctcggatttttgcttggttgcctgccgtttcccggtgccgtggtctcgcccggccatgtcctgtcaaggttgttcctgcacgcgcgtcctgatacccctgcttgctatcaggccgaccgtcagcagctccccggccatgtcttcatccataacaccgtcaaccggtgtatctccttcgatgtcagcacaacccctccgcatcgtcgggctcatcggcacgctgctcgttcacacttcacgcgtctgcgacgtcgtcacatgtctcctcgccagcagtgaacgcctaggagaggaaattcgagaaggtttgtatggtaaggacaacccctatgctgtgatgcctatctagtgttcgatgatgcatgaactagtgaacgttttggttcttgcgaaaatctaagttcaacttagtctggtgagctaattcgttgctctagctaattggtttaaattaatggatcggatatacagagcagtcacgctggtccttatagtttagcaagagcgatgtgtagtggtttagtcgcatcgtatcgaatcgacagtttgtagagtatgtgaataatgctctggtggatgcatatgtcgattaggtttaaactggttctttgttgtggagtgaggagaagtagtagcgagaagaattaaatcggtgctttgtatctggtgagtggtcaaagtaacgttatggaaagtaggtcctgtgtttgtgtttctagtgttagtcgaagtatagcatgtggtgggtttcgtctattgtatggagtcgatgccctgctgtgatatccatgatgcttaatgcttgttaagtgattctaatgcttggttttaagtgtttcatcctttttagtgtagattatctatcttatactctttatactcgtgctcatacatgtgcatcgtgcatctcatgaggtacgataaataatcgtgtgatgcggaagacgagccaagtcgaccccaagcgcgggctaatccgcaagatgatgctgatggacgaaccgaaagatggataatctaaacaagtgccaagccaaaggatgctcgccaagtggtcgcctaacaaacactaacctagtgttactcaggcaagccccggtgcatttgccacctccttgctattttaaaatcttttatcaacttgtttgatgcattaggtgataggagttatgtgctaaaccgttgatgcatttccttccttgaaaattgattacccttccttgatacccgttttgaaaagaattttatgatgcttagccttgctttagcaaacaaaatttttttgttttaaatcaaaagtgatgcttcagtgggtgggaagttttcaaaaataaaacttggtggtggatccattagggccttgatggattcaacatcggaaaagatgtacctctgccaggtaccaaactttgggtttaaataataaagctgagaccgggcgggtgacttgcacgagaaaggagtctcggtgtagtgtctccgtctgtgtcgattaaggactgtaccgattgttggcctgctgatctaggaccctttatctggccacatacctcgtcatgggtaagcttaaacccggctattccaaacatgaaaagacaatcgcgcactgggagtgggagtggagagatggcgagagtggcacgtaccctcctggcaacgggccgcctaaaaggggtggtgtgctcttgggttgcgcagaccagttcatgtggtggaggatccgtgggaatggtagat

SEQ ID NO: 39936 - DNA, 329 bp, Zea Mays
cttctacaacctcaggtggcatctggcttctgcgcaggccacatcccatccgcccataaacaggaaggaagacgtcgccgcctagattcaccaaacgaactgaccgacctttgtctcgatcctcctatcatgctccgaccagctcgtctcctcaggccagaaggtaccaaagcctacaaaggattccatttttcagttacagagttcctttcactttgggacctccaaacaacttcataagtgtaagcatcctagagccattagccatgaacaattatttttttatggaaaaggcaagagctctgctgcttaattaagtgagaaaaaag

SEQ ID NO: 39937 - DNA, 393 bp, Zea Mays
ttctacaacctcaggtggcatctggcttctgcgcaggccacatcccatccgcccataaacaggaaggaagacgtcgccgcctagattcaccaaacgaactgaccgacctttgtctcgatcctcctatcatgctccgaccagctcgtctcctcaggtcgccgcctcaatgcctctcttatcgagctcttcatccgcgagtctgaggcccttaagtccaaggccagaaggtaccaaagcctacaaaggattccatttttcagttacagagttcctttcactttgggacctccaaacaacttcataagtgtaagcatcctagagccattagccatgaacaattatttttttatggaaaaggcaagagctctgctgcttaattaagtgagaaaaaag

SEQ ID NO: 39938 - DNA, 416 bp, Zea Mays
ttctacaacctcaggtggcatctggcttctgcgcaggccacatcccatccgcccataaacaggaaggaagacgtcgccgcctagattcaccaaacgaactgaccgacctttgtctcgatcctcctatcatgctccgaccagctcgtctcctcaggtgcatgtcgaaggactggaaacaacttgaaggcaaatgagcgtttcacggagcaaggatgtgacggaacctcctaagtcattaggcccacctacagttctccttgtccaatggaccttgggcaactgtaacacccactttgtaagaaaggtctagaaagagaaattatattactttataactatatgagttatctatgtttctcatttcatgtgaacaccataattaaacaaataaataaatgacaagagatacccaacaa

SEQ ID NO: 39939 - DNA, 3445 bp, Zea Mays
gtcatccttatcccaccgcttagcttttcttcatatctcatctctggccaccgcacggacggctgctcccccacgtggtcttccttctgggatttctccctgtcgtggcgaatgcagaaaccccaccaggccaggtcggcgacctcatctccctgctccccccatggcgatttccccttggattcctccctgctcgcgctcctctctccatggctgtcgtcgcccccaagcctgcagtcttgccaagctcgccagagctccctgcgccgaccgtccctaccccctcctgcaactcggtgcctctcccagctcgctggtcatcgagcccctctcctccctagcgctcgcccctgcccctctccatggcattgtcgtcttggctcccagcagctcctccctggcactcggcaaactccatggtttcagccctcaagccccagccgacctctcccatggagcttttagtggaggagagaaagatcctaggtttttggttggataagaaaagcactagtgcctcgcacactaggtgctcggcgtaatgcttaaatcggaatcatcattgttcttgtggattcttttagctcggactgaattatgctcaggcatgttgtatgttgatatccgaacccaagaatattgtctgtgtgctaatccttcgcggtgttcagggaaggataccactcctccattttatttgtgacggtttgaattatatggtgaaattgggattctacttattaagtcaaataagatggggtgtttagtttagaatatagattatataagttaatttaaaagaatgagaggttgggatgttggagataggaaaggatacagtcacgtataactctagattaactagatattcacctcaccgtttgagtgtgtgtaaaacgtttgataaattgccatttatgttgtttggttgtatttaattggaaagtcaaatgatatgtcgtttatgtttttcaagtgttgctaggtatatgttcgatatgaatgtttgatgaaataactccttatatatcatagtatgggtatatgcgtgcttgacaggtagttttaattcaaatagaattagccaattggttttattagtgtgattgggttgcctttgttggtatattaaagttgatacattcctttggaaggtggtaccttctatgttaattatgaagagtacaattcatgaagttatatgtttgtaaagtgctttaccagtaaatttgtggagtgtcttatgttggttgaatgttgtttagagaactatttagattgtttctatccatgaattgagttctaagtctcctaatggtaaggtaatcgagtgctttgtcttagtattaagagcatgtagaatgtagaagttaaataggaactaaatggaatgtttgctgtttgggactgcatgagcagttttaattatacagctagtttagtaaagtaaatcatgttttctgtgaaagtgttatatagaaacgttatagataacttctttatcttgcttgtgcaaaaatttcatgaccataggtttagtagtttaggagttatgatttttccaagtccactttcagaatctgtccaaattctgtacaggtttcgaaaattggattgtttggctaagttaaaatgagaatcaggcattagtaattataggagaattgtagtactttccttaaggtttccaacaaattttggatcatcctttttggtgatatataaaataagttacagttgtttgagttaggatctctgaatttgtcccaatttggacagcagagcctttctcatgttttctgaccttgatatatattgaattaacctgggatgtttataaacgaattgtagacaattctactaactttctaaaaagtctaagatcacctgatttggatgcctaaaactccagttatggatttttgaactgagtagtcgaattctgtccaaatctggatagaatttacatttagtactgtttgacatttctaaatgttgaatcttgttgtgatgataatacaaaagttatagaggactttataatctttccaaaaagtcttagtttactatttttggatgaatatcgtgtgagttatgaataaaacaactgactgctgtactgctgtccaaaatcagcaagtattaaaatggttgtttagagaagtcgatgctttgctctagttgtcgtgttctgtattgagtgatcggttaaatcttgtagatgaatattgatcgtttagattaataatcctgaatacctatttatcgtggtccaaatcagttgaaggtaagcagcatcggttggtccgctttagttaaaatcgaaaagctatttagtggtcatcatccattagtattttaggtctttagatttaaaaattgtggacttctaaaaaatctatgttatttgataaggatctacttgttagattaagtggtgtggtgcttgatttattcgatgtgctatgcctgataatctagattagtaaatctaaaatctagttaaagtatttctattcgtcactttaagttataggtatccatggttgttgtgtctaagtattgttagccttcgacgttatgctttaactaagtaaagcatagatcttgtgataaaaaaaattatataattattgagttagattgagttaagctagagaacatgattattgtgtctgattgtatagacctatttagtgcttgattatgaacatttgtgagattttgccattacgtctcctttaatgtgacattatttagtcatattatttccctgtataatcattcatgtgcattatgcatatcattcaggtttgttaattgatcacgtgatgcggacgacaagagccgagttgatcctaaaatgatgctggtgaacgaacctgaagcttggatgatctggtcaagtaccaggatgagagatgctccccaagcagacatcatctaacaacactaacgtagtgttatcctaggcaagccccggtgcatccttccttgttatttaaatgctttatcaccttatatgatgcattaggtgataggagttgtgtgataaacaattgatgcattacctttccttggaattctattactattccttgatacatgttttataaaaagaactgataacgcttatccctgcttagaagctgaaaatcgtttgtttaaaaaagaatgatgtggaacactgttatgggcttttgtttaaaaatcaaagcaaacttatggtgatgattcgccttcagccggaatgggttcatcattcggaaaagagtacccctgccgggtaccaaaaatgggagaatggttggaataaatctagaccagacgctgagcaggaaaggtcactcgtctgtgtcgattaaggaccacaccgaaagtaggcttgctgatctaggacactttaattggccacatgcctcatcatggataagcttagcctcag

SEQ ID NO: 39940 - DNA, 6241 bp, Zea Mays
gtcatccttatcccaccgcttagcttttcttcatatctcatctctggccaccgcacggacggctgctcccccacgtggtcttccttctgggatttctccctgtcgtggcgaatgcagaaaccccaccaggccaggtcggcgacctcatctccctgctccccccatggcgatttccccttggattcctccctgctcgcgctcctctctccatggctgtcgtcgcccccaagcctgcagtcttgccaagctcgccagagctccctgcgccgaccgtccctaccccctcctgcaactcggtgcctctcccagctcgctggtcatcgagcccctctcctccctagcgctcgcccctgcccctctccatggcattgtcgtcttggctcccagcagctcctccctggcactcggcaaactccatggtttcagccctcaagccccagccgacctctcccatggagcttttagtggaggagagaaagatcctaggtttttggttggataagaaaagcactagtgcctcgcacactaggtgctcggcgtaatgcttaaatcggaatcatcattgttcttgtggattcttttagctcggactgaattatgctcaggcatgttgtatgttgatatccgaacccaagaatattgtctgtgtgctaatccttcgcggtgttcagggaaggataccactcctccattttatttgtgacggtttgaattatatggtgaaattgggattctacttattaagtcaaataagatggggtgtttagtttagaatatagattatataagttaatttaaaagaatgagaggttgggatgttggagataggaaaggatacagtcacgtataactctagattaactagatattcacctcaccgtttgagtgtgtgtaaaacgtttgataaattgccatttatgttgtttggttgtatttaattggaaagtcaaatgatatgtcgtttatgtttttcaagtgttgctaggtatatgttcgatatgaatgtttgatgaaataactccttatatatcatagtatgggtatatgcgtgcttgacaggtagttttaattcaaatagaattagccaattggttttattagtgtgattgggttgcctttgttggtatattaaagttgatacattcctttggaaggtggtaccttctatgttaattatgaagagtacaattcatgaagttatatgtttgtaaagtgctttaccagtaaatttgtggagtgtcttatgttggttgaatgttgtttagagaactatttagattgtttctatccatgaattgagttctaagtctcctaatggtaaggtaatcgagtgctttgtcttagtattaagagcatgtagaatgtagaagttaaataggaactaaatggaatgtttgctgtttgggactgcatgagcagttttaattatacagctagtttagtaaagtaaatcatgttttctgtgaaagtgttatatagaaacgttatagataacttctttatcttgcttgtgcaaaaatttcatgaccataggtttagtagtttaggagttatgatttttccaagtccactttcagaatctgtccaaattctgtacaggtttcgaaaattggattgtttggctaagttaaaatgagaatcaggcattagtaattataggagaattgtagtactttccttaaggtttccaacaaattttggatcatcctttttggtgatatataaaataagttacagttgtttgagttaggatctctgaatttgtcccaatttggacagcagagcctttctcatgttttctgaccttgatatatattgaattaacctgggatgtttataaacgaattgtagacaattctactaactttctaaaaagtctaagatcacctgatttggatgcctaaaactccagttatggatttttgaactgagtagtcgaattctgtccaaatctggatagaatttacatttagtactgtttgacatttctaaatgttgaatcttgttgtgatgataatacaaaagttatagaggactttataatctttccaaaaagtcttagtttactatttttggatgaatatcgtgtgagttatgaataaaacaactgactgctgtactgctgtccaaaatcagcaagtattaaaatggttgtttagagaagtcgatgctttgctctagttgtcgtgttctgtattgagtgatcggttaaatcttgtagatgaatattgatcgtttagattaataatcctgaatacctatttatcgtggtccaaatcagttgaaggtaagcagcatcggttggtccgctttagttaaaatcgaaaagctatttagtggtcatcatccattagtattttaggtctttagatttaaaaattgtggacttctaaaaaatctatgttatttgataaggatctacttgttagattaagtggtgtggtgcttgatttattcgatgtgctatgcctgataatctagattagtaaatctaaaatctagttaaagtatttctattcgtcactttaagttataggtatccatggttgttgtgtctaagtattgttagccttcgacgttatgctttaactaagtaaagcatagatcttgtgataaaaaaaattatataattattgagttagattgagttaagctagagaacatgattattgtgtctgattgtatagacctatttagtgcttgattatgaacatttgtgagattttgccattacgtctcctttaatgtgacattatttagtcatattatttccctgtataatcattcatgtgcattatgcatatcattcaggtttgttaattgatcacgtgatgcggacgacaagagccgagttgatcctaaaatgatgctggtgaacgaacctgaagcttggatgatctggtcaagtaccaggatgagagatgctccccaagcagacatcatctaacaacactaacgtagtgttatcctagctcaggcgtgttgtatgttgatatccgaaccgagaatattgtctgtgtgctaatccttcgcggtgttcagggaaggataccgctcctttattttattagtgacggtttgaattatatggtgaaattgggattctacatattaagtcaaataagatggggtgtttagtttagcatatagattatataagttaatttaaaagaatgagaggttgggatgttggagataggaaaggatactgtcacatataacattagattaactaggtattcacctcaccgtttgagtgtgtgtaaaacgtttgataaattgccatttatgctgtttggttgtatttaattggaaagtcaaatgatatgtcgtttatgtttttcaagtgttgctaggtatatgttcgatatgaatgtttgatgaaataactccttatatgtcatagtattggtatatgcgtgcttgacaggtagttttaattcaaatagaattagccaattggttttattagtgtgattgggttgcctttgttggtatattaaagttgatacattcctttggaaggtggtaccttctatgttaattatgaagagtacagttcatgaagttatatgtttgtaaagtgctttaccagtaaatttgtggagtgccttatgttggttgaatgttgtttagagaactagttagattgtttctatccatgaattgagttctaaatctcctaatggtaaggtaaccgagtgctttgtcttagtattaagagcatgtagaatgtagtagttaaataggaactaaatggaatgtttgctgtttgggactgcatgagcagttttaattatacagctagtttagtaaagtaaatcatgttttctgtgaaagtgttatatataaaagttatagataacttctttatcttgcttgtgctaaaatttcatggccataggtttagtagtttcagaatctgtccaaattctgtacaggtttcgaaaattggattgtttggctaagttaaaatgagaatcagtcattagtaattataggagaattgtagcactttccttaagcttttcaacaaattttggatcaccctttttggtgatctataaaataagttacagctgtttgagttagtatctctgaatctgtcccaatttggacagcagagcctttctcatgttttctgaccttgatatatattgaattaacctgggatatttataaatgaattgtagacaattctactagctttctaaaaagtgtaagatcacctgatttggatgcctgaaactccagttatggatttttgaactgagtagtcgaattctgtccaaatcaggacagaatttacatttagtattgtttgacatttctaaatgttgaatcttgttgtgatgataatacaaaagttatagaggactttataatctttccaaaaagtcttagtttactatttttggaataatatcgtgtgagttatgaataaaacaactgactgctgtactgctgtccaaaatcagcaagtattaaaatggttgtttagagaagtcgatgctttgctctagttgtcgtgttctgtattgagtgatcggttaaatcttgtagatgaatatcgatcgtttagattaataatcctgaatacctatttatcgtggtccaaatcagttgaaggtaagcagcatcggttggtccgctttagttaaaatccaaaagctatttagtggtcatcatccattagtattttaggtctttagatttaaaaattgtggacttctcaaaactctatgttatttgataaggctctacttgttagattaagtggtgtggtgcttgatttagtcgatgtgctatgcctgataatctagattagtaactctaaaatctagttaaagtatttctattcgtcagtttcagttataggtatccatggttgttgtgtctaagtattgttagccttcgacgttatgcttaactaagtaaagcatagatcttgtgataaaaaaattatataatgattgagttagattgagttaagctagagaacatgattattgtgtctgattgtatagacctatttagtgcttgattatgaacatttgtgagattttgccattacgtctactttaatgtgacattatttagtcttgttatttccctgtataatcattcatgtgcattatgcatatcattcaggttcgttaattgatcacgtgatgcggacgacaagagccgagttgatcccaaaatgatgctagtgaacgaatctgaagcttggatgatctggtcaagtaccaggatgagagatgctccccaagcgaacatcatctaacaacactaacgtagtgttatcacaggcaagccccggtgcatttgtcccttccttgttatttaaatgatttatcaccttatatgatgcattaggtgataggagttgtgtgataaacaattgatgcattacctttccttggaattcgattattattccttgatacctgttttataaaaagaactgataacgcttatccctgcttagaagctgaaaatcgtttgtttaaaaaagaatcatgtggaacactgttacgggcttttgtttaaaaatcaaagcaaacttatggtgatgattccccttcagccagagtgggttcatcatttggaaaagagtatccctgccgggtaccaaaaatgggagaatggatggaataaatctagaccagacgctgagcaggaaaggtcgcccgtctgtgtcgattaaggaccgcaccgaaagtaggcttgctgatctagggccctttaactggccacatgcctcgtcatgggtaagcttagcctcggctggaccaataccagaaaggctggcccgcaatgggagtggagagatggcgagagtatcgtgtatctacctggcaagaggctggatggtggggtactaagctctcggttggtggggacccgttctggtcttgagaaaaccgtgggcgagttgacatatgcaagagttaagtgctacatatgtcgtatggttggagatcctcagctgagtattaatcgattcggatcgctgttacttctcggatatgaagactggatcactgccctgcatcgtagataacaagtgaaattaaagatgctaaaataaagctagtgtaggacaagtgaatgctctagattagaaaatctagatttaggaaaagtacttaactggtgaagtaaaagcttggcataagggtccattactagtaagcttttctgcaaaaatgagtctttgaaacttgatgagccttac

SEQ ID NO: 39941 - DNA, 3417 bp, Zea Mays
cttttcttcatatctcatctctggccaccgcacggacggctgctcccccacgtggtcttccttctgggatttctccctgtcgtggcgaatgcagaaaccccaccaggccaggtcggcgacctcatctccctgctccccccatggcgatttccccttggattcctccctgctcgcgctcctctctccatggctgtcgtcgcccccaagcctgcagtcttgccaagctcgccagagctccctgcgccgaccgtccctaccccctcctgcaactcggtgcctctcccagctcgctggtcatcgagcccctctcctccctagcgctcgcccctgcccctctccatggcattgtcgtcttggctcccagcagctcctccctggcactcggcaaactccatggtttcagccctcaagccccagccgacctctcccatggagcttttagtggaggagagaaagatcctaggtttttggttggataagaaaagcactagtgcctcgcacactaggtgctcggcgtaatgcttaaatcggaatcatcattgttcttgtggattcttttagctcggactgaattatggcatgttgtatgttgatatccgaacccaagaatattgtctgtgtgctaatccttcgcggtgttcagggaaggataccactcctccattttatttgtgacggtttgaattatatggtgaaattgggattctacttattaagtcaaataagatggggtgtttagtttagaatatagattatataagttaatttaaaagaatgagaggttgggatgttggagataggaaaggatacagtcacgtataactctagattaactagatattcacctcaccgtttgagtgtgtgtaaaacgtttgataaattgccatttatgttgtttggttgtatttaattggaaagtcaaatgatatgtcgtttatgtttttcaagtgttgctaggtatatgttcgatatgaatgtttgatgaaataactccttatatatcatagtatgggtatatgcgtgcttgacaggtagttttaattcaaatagaattagccaattggttttattagtgtgattgggttgcctttgttggtatattaaagttgatacattcctttggaaggtggtaccttctatgttaattatgaagagtacaattcatgaagttatatgtttgtaaagtgctttaccagtaaatttgtggagtgtcttatgttggttgaatgttgtttagagaactatttagattgtttctatccatgaattgagttctaagtctcctaatggtaaggtaatcgagtgctttgtcttagtattaagagcatgtagaatgtagaagttaaataggaactaaatggaatgtttgctgtttgggactgcatgagcagttttaattatacagctagtttagtaaagtaaatcatgttttctgtgaaagtgttatatagaaacgttatagataacttctttatcttgcttgtgcaaaaatttcatgaccataggtttagtagtttaggagttatgatttttccaagtccactttcagaatctgtccaaattctgtacaggtttcgaaaattggattgtttggctaagttaaaatgagaatcaggcattagtaattataggagaattgtagtactttccttaaggtttccaacaaattttggatcatcctttttggtgatatataaaataagttacagttgtttgagttaggatctctgaatttgtcccaatttggacagcagagcctttctcatgttttctgaccttgatatatattgaattaacctgggatgtttataaacgaattgtagacaattctactaactttctaaaaagtctaagatcacctgatttggatgcctaaaactccagttatggatttttgaactgagtagtcgaattctgtccaaatctggatagaatttacatttagtactgtttgacatttctaaatgttgaatcttgttgtgatgataatacaaaagttatagaggactttataatctttccaaaaagtcttagtttactatttttggatgaatatcgtgtgagttatgaataaaacaactgactgctgtactgctgtccaaaatcagcaagtattaaaatggttgtttagagaagtcgatgctttgctctagttgtcgtgttctgtattgagtgatcggttaaatcttgtagatgaatattgatcgtttagattaataatcctgaatacctatttatcgtggtccaaatcagttgaaggtaagcagcatcggttggtccgctttagttaaaatcgaaaagctatttagtggtcatcatccattagtattttaggtctttagatttaaaaattgtggacttctaaaaaatctatgttatttgataaggatctacttgttagattaagtggtgtggtgcttgatttattcgatgtgctatgcctgataatctagattagtaaatctaaaatctagttaaagtatttctattcgtcactttaagttataggtatccatggttgttgtgtctaagtattgttagccttcgacgttatgctttaactaagtaaagcatagatcttgtgataaaaaaaattatataattattgagttagattgagttaagctagagaacatgattattgtgtctgattgtatagacctatttagtgcttgattatgaacatttgtgagattttgccattacgtctcctttaatgtgacattatttagtcatattatttccctgtataatcattcatgtgcattatgcatatcattcaggtttgttaattgatcacgtgatgcggacgacaagagccgagttgatcctaaaatgatgctggtgaacgaacctgaagcttggatgatctggtcaagtaccaggatgagagatgctccccaagcagacatcatctaacaacactaacgtagtgttatcctaggcaagccccggtgcatccttccttgttatttaaatgctttatcaccttatatgatgcattaggtgataggagttgtgtgataaacaattgatgcattacctttccttggaattctattactattccttgatacatgttttataaaaagaactgataacgcttatccctgcttagaagctgaaaatcgtttgtttaaaaaagaatgatgtggaacactgttatgggcttttgtttaaaaatcaaagcaaacttatggtgatgattcgccttcagccggaatgggttcatcattcggaaaagagtacccctgccgggtaccaaaaatgggagaatggttggaataaatctagaccagacgctgagcaggaaaggtcactcgtctgtgtcgattaaggaccacaccgaaagtaggcttgctgatctaggacactttaattggccacatgcctcatcatggataagcttagcctcag

SEQ ID NO: 39942 - DNA, 3927 bp, Zea Mays
atgtattcttttatataaaaaaaggaaaaccttgttccttatcttccaccgttagctagtcatccttatcccaccgcttagtttttcttcatatctcatctctggccaccgcacggacggctgctcccccacgtggtcttccttctgggatttctccctgtcgtggcggctgtagaaaccccaccaggccaggtcggcgacctcatctccctgctccccccatggcgatttccccttggattcctccctgctcgcgctcctctctccatggctgtcgtcacccccaagcctgcggtcttgccaagctcgccagagctccctgcgccgaccgtccctactccctcctgtaactcggtgcctctcccagctcgctggtcatcgagcccctctcctccctagcgctcgcccctgcccctctccatggcgttgtcgtcttggctcccagcagctcctccctggcactcagcaaactccatggtttcagccctcaagccccagccgacctctcccatggagctttcagtggagaagagaaagatcctaggtttttggttggagaaaaaaagcactagtgcctcgcacactaggtgctcggtgtaatgcttaaatcggaatcatcattgttcttgtggattcttttagctcgaactgaattgtgctcaggcgtgttgtatgttgatatccgaaccgagaatattgtctgtgtgctaatccttcgcggtgttcagggaaggataccgctcctttattttattagtgacggtttgaattatatggtgaaattgggattctacatattaagtcaaataagatggggtgtttagtttagcatatagattatataagttaatttaaaagaatgagaggttgggatgttggagataggaaaggatactgtcacatataacattagattaactaggtattcacctcaccgtttgagtgtgtgtaaaacgtttgataaattgccatttatgctgtttggttgtatttaattggaaagtcaaatgatatgtcgtttatgtttttcaagtgttgctaggtatatgttcgatatgaatgtttgatgaaataactccttatatgtcatagtattggtatatgcgtgcttgacaggtagttttaattcaaatagaattagccaattggttttattagtgtgattgggttgcctttgttggtatattaaagttgatacattcctttggaaggtggtaccttctatgttaattatgaagagtacagttcatgaagttatatgtttgtaaagtgctttaccagtaaatttgtggagtgccttatgttggttgaatgttgtttagagaactagttagattgtttctatccatgaattgagttctaaatctcctaatggtaaggtaaccgagtgctttgtcttagtattaagagcatgtagaatgtagtagttaaataggaactaaatggaatgtttgctgtttgggactgcatgagcagttttaattatacagctagtttagtaaagtaaatcatgttttctgtgaaagtgttatatataaaagttatagataacttctttatcttgcttgtgctaaaatttcatggccataggtttagtagtttcagaatctgtccaaattctgtacaggtttcgaaaattggattgtttggctaagttaaaatgagaatcagtcattagtaattataggagaattgtagcactttccttaagcttttcaacaaattttggatcaccctttttggtgatctataaaataagttacagctgtttgagttagtatctctgaatctgtcccaatttggacagcagagcctttctcatgttttctgaccttgatatatattgaattaacctgggatatttataaatgaattgtagacaattctactagctttctaaaaagtgtaagatcacctgatttggatgcctgaaactccagttatggatttttgaactgagtagtcgaattctgtccaaatcaggacagaatttacatttagtattgtttgacatttctaaatgttgaatcttgttgtgatgataatacaaaagttatagaggactttataatctttccaaaaagtcttagtttactatttttggaataatatcgtgtgagttatgaataaaacaactgactgctgtactgctgtccaaaatcagcaagtattaaaatggttgtttagagaagtcgatgctttgctctagttgtcgtgttctgtattgagtgatcggttaaatcttgtagatgaatatcgatcgtttagattaataatcctgaatacctatttatcgtggtccaaatcagttgaaggtaagcagcatcggttggtccgctttagttaaaatccaaaagctatttagtggtcatcatccattagtattttaggtctttagatttaaaaattgtggacttctcaaaactctatgttatttgataaggctctacttgttagattaagtggtgtggtgcttgatttagtcgatgtgctatgcctgataatctagattagtaactctaaaatctagttaaagtatttctattcgtcagtttcagttataggtatccatggttgttgtgtctaagtattgttagccttcgacgttatgcttaactaagtaaagcatagatcttgtgataaaaaaattatataatgattgagttagattgagttaagctagagaacatgattattgtgtctgattgtatagacctatttagtgcttgattatgaacatttgtgagattttgccattacgtctactttaatgtgacattatttagtcttgttatttccctgtataatcattcatgtgcattatgcatatcattcaggttcgttaattgatcacgtgatgcggacgacaagagccgagttgatcccaaaatgatgctagtgaacgaatctgaagcttggatgatctggtcaagtaccaggatgagagatgctccccaagcgaacatcatctaacaacactaacgtagtgttatcacaggcaagccccggtgcatttgtcccttccttgttatttaaatgatttatcaccttatatgatgcattaggtgataggagttgtgtgataaacaattgatgcattacctttccttggaattcgattattattccttgatacctgttttataaaaagaactgataacgcttatccctgcttagaagctgaaaatcgtttgtttaaaaaagaatcatgtggaacactgttacgggcttttgtttaaaaatcaaagcaaacttatggtgatgattccccttcagccagagtgggttcatcatttggaaaagagtatccctgccgggtaccaaaaatgggagaatggatggaataaatctagaccagacgctgagcaggaaaggtcgcccgtctgtgtcgattaaggaccgcaccgaaagtaggcttgctgatctagggccctttaactggccacatgcctcgtcatgggtaagcttagcctcggctggaccaataccagaaaggctggcccgcaatgggagtggagagatggcgagagtatcgtgtatctacctggcaagaggctggatggtggggtactaagctctcggttggtggggacccgttctggtcttgagaaaaccgtgggcgagttgacatatgcaagagttaagtgctacatatgtcgtatggttggagatcctcagctgagtattaatcgattcggatcgctgttacttctcggatatgaagactggatcactgccctgcatcgtagataacaagtgaaattaaagatgctaaaataaagctagtgtaggacaagtgaatgctctagattagaaaatctagatttaggaaaagtacttaactggtgaagtaaaagcttggcataagggtccattactagtaagcttttctgcaaaaatgagtctttgaaacttgatgagccttac

SEQ ID NO: 39943 - DNA, 2311 bp, Zea Mays
aagatatcaatgtagaggaatagctagatgttaatcgagtccatgtatataaattttcattgagggctattctgaagtcacgtctaaaaagtttgtgcaagatatgatggtccacccactgtgtcaatttcaaaccaaaactataatttttatagccttattaaagtcttattcatgctccatggtgcctcttttattgctttacctatgaaatattgtgaacatagtgcaaatgggcactagctatggctatcttttctactatctggacttatatattgttgatattgctatgttttttctttcctatctgcttgaaggttatagcagcacgagttgcttgtaaccctagaaacaaaatgaagcctactctgcttggattttggatcttaaaaaatggggatgtcagttttagtagttttaatttgcaatcatagcattttgtggtgtgagattttgtggctcaagattagatgatgaaaaagtttggatttaatctaagaaataacactttaatactgtgaagatcgttgggctgctaggtgatggatttggctcaacaccatagttgagtaaacggaacatcttgtgggtggttagccaaatgcaggtcatcatcgagcgctaaccttgctggtatggtttacaacatcatatcatcttatgatcttgttcagttttcttatcgcgatttcagcttgaaaagatagcaccatgtggttattttttggagacatggaattagtaatgattatatggcttgtttcctcagtgctaggtattgagtgattagttaatgggttttcaagttgccttttctgtgcccacaaaatgactggactaaaaatagctactcttacgatgttgattgatgctcccgaaagcacattttatttgactttaaccaaaggagaaccaagttggcagttgtctcccactacgatactaaattttgggttaaaagtatagaaccatcgtggtttgaaaaaagttacagttgagactattgagacatagagataaaaaccaatatgcctcgcatctgacatgattggcatgaccataactcatcaaaaacaactgaaataaattctccactccaatctaatcagaatactagatcttcataagaagatcatggtgtattttgctttgttgtgtgcccacaaaatgactggactaaaagtagctgctcttaagatgttggttgattctcctgaaagcagattttcatcaagtctgctatctatgtggccagattttcttattttgtcgagttactttttatcatttcgttaatgaaaattgaccgttaaataaagcagaagcattaagctctgtatttgacaattgacatatatgtatgtttgttggctgctcagatgcccagttctctatgtagcacttgttccgtaaattggtaatccttgtagtttctcaaaagatctcaaatatgtctaaaagattactattggttgatccgtttgataatgctttccccgatatgcataacaatatattcatcatgtaagttgatcttcatctctttctaatttaaatttcattcgaagaatcttaacttcttcactcaatcatgagtgtccagtgtgttctcgagatttgagaataaatatcggatttatttccaaaagaaacttctttaaagatgacattcgacaccgtaaaactttaattcattacgtcctaacgtgatcagttcattccttaggaactatggaagatatataaaatatagatgcaagatgccacattttttagaattttagcgatctgtttggaatatactactagagatatcattcataccctgtgcaatataggcaagtgctatgtggtcttactacagttttgaatagaaatctgaacctatgggccattattgtattcagtttcgaatatggaacagcttaggttttaaattgtttagtaccaatggatcatttcagttaagaaaatgacaattaagtgcacaagtgggtgttgtgggttgtctgccttttttgtaacattagtatgagtatctcattggagaagaagaaggtggcgatcccgctgctgtgccacggtcacttgcggtcggtggtggatctcttctacagctccgtcacatccaatggttacttcctcatcagcgccagcaaggagattcggtgtggtagacctcttctcgtagaaggcggattctcatgctggaagaaaaggagggtactcccaatcagatggagctcattaccttagcaacaagcctgtgaatggtctgtctcttttccctctcccatttattattttt

SEQ ID NO: 39944 - DNA, 1515 bp, Zea Mays
atgacggaggcggagaggagaacccatcgatttggtggtgtaagtgggagctcattgaggccggctcatattaaagagctcgaagaagtgaagctgctcaagaaactgtctcaccccaacattgttagatatcttgtgactgttcgtgaggaagacacactaaacattttgctagaatttgttcctggagggcctattaattcagtcacttttggggaagctcggttcattcccagagcatggcatgctcaaagtggcccaatatctcgcctacctcttgttacaatttcatattctagcaaccttttgcgagatgttcctgttcgtcagcctctttggcacaacccgccgccgccgcaggcgcaggcgcaggtggacatggatctaccaagcctcgccgtcgtgctgcgcgccgcgctcagccacgttcctgaggagcgcaaggcggcagaagagagcctcaaccagtacacaccacagcatttggtgagattgttacagatcattgttgatggaagttgtgatatggctgtaagacaggttgcaagcattcatttcaagaattttattgcgaagaactggtcgcctaatgatccagatgagtccccgaaagttttagaaagcgacaaggccatggttcgtgaaaacatacttggttttattgttcaagtgccccctttgttaagagcccagcttggagaaagtatcaaaacaatagttcattctgattatcctgagcagtggccaagtctccttcattgggtttcacacaatttagacttgcagaaccaaatttttggtgctttatatgtcctgagggttcttgccagaaaatatgagttcaagtctgaggatgagaggataccattatttcacatcgtagaggagacatttcctcgtctactaagcatttttagcaaattggttcagattgtcaatccaccaattgaagttgctgatttaatcaagttgatatgtaaaatattttggtcttctatttatttggagattccgaagcagctatttgatccaaatgtcttcaatgcatggatggttctgtttataaacttgttggagagaccagttcccgtggaaggccaaccaatagatcctgagattaggaaatcttgggcctggtggaaagttaagaaatggactatccatatcctgaaccgtctctataccagatttggtgatctgaagcttcagaaaccagagagtaaagcttttgctcaaatgtttcagaagacttattcagggaaaatattggcatgtcacatgcagctgctgaatgcaattcgtggtggagactacttgccagatagggttatcaatcttgttctacagtatctgactaacagtgttacaaagaacaatattatcgaagatttgtacagtccccgaacagctgctatggacttcgtgagtgaattggttagaaagcgagggaaaaacaatctccaaaagttcatccatttcattgttgatatatttaggagcatcattgatttatag

SEQ ID NO: 39945 - DNA, 1370 bp, Zea Mays
gtgagtgcctcgccgccctccatattcgctggtggacctgggctcctaagtattaaattactccgtgccaggcgatgccaaaaagttggtgcctcgattaactgttcgagcagacagtttcatgatcagttcatggccagggtaaatggtactcttgacgagggccagttttcattactgaagttccagtacacaccacagcatttggtgagattgttacagatcattgttgatggaagttgtgatatggctgtaagacaggttgcaagcattcatttcaagaattttattgcgaagaactggtcgcctaatgatccagatgagtccccgaaagttttagaaagcgacaaggccatggttcgtgaaaacatacttggttttattgttcaagtgccccctttgttaagagcccagcttggagaaagtatcaaaacaatagttcattctgattatcctgagcagtggccaagtctccttcattgggtttcacacaatttagacttgcagaaccaaatttttggtgctttatatgtcctgagggttcttgccagaaaatatgagttcaagtctgaggatgagaggataccattatttcacatcgtagaggagacatttcctcgtctactaagcatttttagcaaattggttcagattgtcaatccaccaattgaagttgctgatttaatcaagttgatatgtaaaatattttggtcttctatttatttggagattccgaagcagctatttgatccaaatgtcttcaatgcatggatggttctgtttataaacttgttggagagaccagttcccgtggaaggccaaccaatagatcctgagattaggaaatcttgggcctggtggaaagttaagaaatggactatccatatcctgaaccgtctctataccagatttggtgatctgaagcttcagaaaccagagagtaaagcttttgctcaaatgtttcagaagacttattcagggaaaatattggcatgtcacatgcagctgctgaatgcaattcgtggtggagactacttgccagatagggttatcaatcttgttctacagtatctgactaacagtgttacaaagaacagtatgtatcagatgatgcagcctcagatttgatatacttctttttgagataatttttcctcttatgtgcttcaatgacaatgaccaaaagttatgggatgaagatcctcacgaattatgttcgcaagggctatgatattatcgaagatttgtacagtccccgaacagctgctatggacttcgtgagtgaattggttagaaagcgagggaaaaacaatctccaaaagttcatccatttcattgttgatatatttaggagcatcattgatttatag

SEQ ID NO: 39946 - DNA, 1107 bp, Zea Mays
tactgtggaggctgtgtggatgcggccatggagtgagctttgagccgtagtgagttccagtacacaccacagcatttggtgagattgttacagatcattgttgatggaagttgtgatatggctgtaagacaggttgcaagcattcatttcaagaattttattgcgaagaactggtcgcctaatgatccagatgagtccccgaaagttttagaaagcgacaaggccatggttcgtgaaaacatacttggttttattgttcaagtgccccctttgttaagagcccagcttggagaaagtatcaaaacaatagttcattctgattatcctgagcagtggccaagtctccttcattgggtttcacacaatttagacttgcagaaccaaatttttggtgctttatatgtcctgagggttcttgccagaaaatatgagttcaagtctgaggatgagaggataccattatttcacatcgtagaggagacatttcctcgtctactaagcatttttagcaaattggttcagattgtcaatccaccaattgaagttgctgatttaatcaagttgatatgtaaaatattttggtcttctatttatttggagattccgaagcagctatttgatccaaatgtcttcaatgcatggatggttctgtttataaacttgttggagagaccagttcccgtggaaggccaaccaatagatcctgagattaggaaatcttgggcctggtggaaagttaagaaatggactatccatatcctgaaccgtctctataccagatttggtgatctgaagcttcagaaaccagagagtaaagcttttgctcaaatgtttcagaagacttattcagggaaaatattggcatgtcacatgcagctgctgaatgcaattcgtggtggagactacttgccagatagggttatcaatcttgttctacagtatctgactaacagtgttacaaagaacaatattatcgaagatttgtacagtccccgaacagctgctatggacttcgtgagtgaattggttagaaagcgagggaaaaacaatctccaaaagttcatccatttcattgttgatatatttaggagcatcattgatttatag

SEQ ID NO: 39947 - DNA, 1096 bp, Zea Mays
gtggaggctgtgtggatgcggccatggagtgagctttgagccgtagtgagttccagtacacaccacagcatttggtgagattgttacagatcattgttgatggaagttgtgatatggctgtaagacaggttgcaagcattcatttcaagaattttattgcgaagaactggtcgcctaatgatccagatgagtccccgaaagttttagaaagcgacaaggccatggttcgtgaaaacatacttggttttattgttcaagtgccccctttgttaagcttggagaaagtatcaaaacaatagttcattctgattatcctgagcagtggccaagtctccttcattgggtttcacacaatttagacttgcagaaccaaatttttggtgctttatatgtcctgagggttcttgccagaaaatatgagttcaagtctgaggatgagaggataccattatttcacatcgtagaggagacatttcctcgtctactaagcatttttagcaaattggttcagattgtcaatccaccaattgaagttgctgatttaatcaagttgatatgtaaaatattttggtcttctatttatttggagattccgaagcagctatttgatccaaatgtcttcaatgcatggatggttctgtttataaacttgttggagagaccagttcccgtggaaggccaaccaatagatcctgagattaggaaatcttgggcctggtggaaagttaagaaatggactatccatatcctgaaccgtctctataccagatttggtgatctgaagcttcagaaaccagagagtaaagcttttgctcaaatgtttcagaagacttattcagggaaaatattggcatgtcacatgcagctgctgaatgcaattcgtggtggagactacttgccagatagggttatcaatcttgttctacagtatctgactaacagtgttacaaagaacaatattatcgaagatttgtacagtccccgaacagctgctatggacttcgtgagtgaattggttagaaagcgagggaaaaacaatctccaaaagttcatccatttcattgttgatatatttaggagcatcattgatttatag

SEQ ID NO: 39948 - DNA, 1226 bp, Zea Mays
gtggatgcggccatggagtgagctttgagccgtagtgagttccagtacacaccacagcatttggtgagattgttacagatcattgttgatggaagttgtgatatggctgtaagacaggttgcaagcattcatttcaagaattttattgcgaagaactggtcgcctaatgatccagatgagtccccgaaagttttagaaagcgacaaggccatggttcgtgaaaacatacttggttttattgttcaagtgccccctttgttaagagcccagcttggagaaagtatcaaaacaatagttcattctgattatcctgagcagtggccaagtctccttcattgggtttcacacaatttagacttgcagaaccaaatttttggtgctttatatgtcctgagggttcttgccagaaaatatgagttcaagtctgaggatgagaggataccattatttcacatcgtagaggagacatttcctcgtctactaagcatttttagcaaattggttcagattgtcaatccaccaattgaagttgctgatttaatcaagttgatatgtaaaatattttggtcttctatttatttggagattccgaagcagctatttgatccaaatgtcttcaatgcatggatggttctgtttataaacttgttggagagaccagttcccgtggaaggccaaccaatagatcctgagattaggaaatcttgggcctggtggaaagttaagaaatggactatccatatcctgaaccgtctctataccagatttggtgatctgaagcttcagaaaccagagagtaaagcttttgctcaaatgtttcagaagacttattcagggaaaatattggcatgtcacatgcagctgctgaatgcaattcgtggtggagactacttgccagatagggttatcaatcttgttctacagtatctgactaacagtgttacaaagaacagtatgtatcagatgatgcagcctcagatttgatatacttctttttgagataatttttcctcttatgtgcttcaatgacaatgaccaaaagttatgggatgaagatcctcacgaattatgttcgcaagggctatgatattatcgaagatttgtacagtccccgaacagctgctatggacttcgtgagtgaattggttagaaagcgagggaaaaacaatctccaaaagttcatccatttcattgttgatatatttaggagcatcattgatttatag

SEQ ID NO: 39949 - DNA, 2296 bp, Zea Mays
  misc_feature (1)..(1): n is a, c, g, or t
ngtgctcttctcttctattgggacactttgtgataaactgaagcaaacagatccatataaatcagagcttgagacaatgctggtccgacatgtctttcctgaattcagcagtcgtgttggacacctgcgagcaaaggcagcatgggttgctgggcagtatgcccatatcaacttttcagacccgaacaattttcgtcaggctatgcactgtatagtttcaggaatgcatgatccagatcttcctgtgagggttgattcggtctttgcacttcgttcttttgttgaagcctgcaaagatttaaatgagattcgacctatacttcctcagctccttgatgaattttttaagctgatgaatgaggttgagaatgaggatcttgtgttcaccctagaaaccattgttgacaaatttggtgaagagatggcaccttatgcattaggtttgtgccagaatttggctgctgctttctggagatgtatggctagttcagaagctgatgatgaagctgatgattccggtgctttggcagctgttggttgcttgcgagcaatcagcacaatccttgagtcaattagcagcctcccacatctttttacgcaaatagaaccaacattgctgcctataatgcgcaggatgttgacatctgatggccaagatattcttgttccattagacaactacatttctcggggaactgatcactttcttgcatgcaaagatccagattaccagcaaagcctgtggaaggcacttcaatctattatgatggacgaaaacatggaagattctgatattgaacctgctcccaagctcattgaagttgtttttcaaaattgtaaaggcaacgtggatcactgggttgagcactatctcaggattacaattgagcggttacgtcgagcacacaaaccatacctgaaatgcctccttgtacaagtgatcgctaatgcgctctactacaatcctgcgctgacccttgagattttaaataagctcggggttgcagctgacatttttaaccattggtttgctatgctacgacaagttaaaaaaagtggggcacgtgttaatttcaagagggagcatgataagaaagtttgctgcttgggcttgacctcccttattgcgcttccagctgctaagattccagcagatgctttggatcggatcttcaaagcaacacttgagctgcttgttgcttacaaggaccaagttgcagaagctaagaagcaaaatgaagaggctgctgatgatatggatggttttgatgctgatgaagaagatgatgacgaagttgactctgataaggagatgggtcttgatgatgaagacggggatgaagtaagcagtcttcagctgcagaaattagccgcagaggctagaggcttccaaccagccgatgacgatgactcagatgatgatttcagcgacgatgagctacactcaccaatagacgaggtggatcctttcattttctttgtagaaactgtccaaggtttgcaggcatctgatcctgccaggttccagaaccttatgcatacattggatttttcttatcaagcgcttgctagtggcattgcacaacatgccgagcaaagaaaaaatgaaattgagaaggagaaatctgagaaggcaaatgcacagtgacgtcataaagcatttctggttcccttcgattgttttgccattttgccggtatagcattggtggacggttaatttcctgcgatttgcaggccgcaggtaagagtttttgcagccttagccaaagtgtaggacaaattcaatcttgtgagatagcatcttggataacctgtcacctcgaccatgttcgtcgtggccagttgtagacgtcttggttgtgcaagaaagtttctctcgaggacagttgctcgttttgttagggccatcaatttttttgggcggcttgtaagttatttgagaatcccacctcaggttgaggggttgtattctcgagtcgtcaaagtttagtaccggtgcggtgtagattgtatatggtttcagttgtctagaacgttgtggcttcatggacgggctgtggtataagtttttattattttttaatttttttgtcaacaagacattgtaattggggtttgtttgtttggtaagagcaagaaaggtcggcactgttatttcttcggtatcattgtccacttgtttcgatattagcagtttacctaatcctatatccaaactccactcttccatattcaaactccactctgaacaatgtaatctatagtgcttttgagtaaactatgaaaagattgct

SEQ ID NO: 39950 - DNA, 2407 bp, Zea Mays
ctcttctcttctattgggacactttgtgataaactgaagcaaacagatccatataaatcagagcttgagacaatgctggtccgacatgtctttcctgaattcagcagtcgtgttggacacctgcgagcaaaggcagcatgggttgctgggcagtatgcccatatcaacttttcagacccgaacaattttcgtcaggctatgcactgtatagtttcaggaatgcatgatccagatcttcctgtgagggttgattcggtctttgcacttcgttcttttgttgaagcctgcaaagatttaaatgagattcgacctatacttcctcagctccttgatgaattttttaagctgatgaatgaggttgagaatgaggatcttgtgttcaccctagaaaccattgttgacaaatttggtgaagagatggcaccttatgcattaggctgctgctttctggagatgtatggctagttcagaagctgatgatgaagctgatgattccggtgctttggcagctgttggttgcttgcgagcaatcagcacaatccttgagtcaattagcagcctcccacatctttttacgcaaatagaaccaacattgctgcctataatgcgcaggatgttgacatctgatggccaagatgtttatgaagaagtccttgaaattgtttcctatatgtcattttactcgcctacaatttcactggacatgtggaccttgtggccagtgatgatggaggcgcttaatgattgggctatagatttctttgagaatattcttgttccattagacaactacatttctcggggaactgatcactttcttgcatgcaaagatccagattaccagcaaagcctgtggaaggcacttcaatctattatgatggacgaaaacatggaagattctgatattgaacctgctcccaagctcattgaagttgtttttcaaaattgtaaaggcaacgtggatcactgggttgagcactatctcaggattacaattgagcggttacgtcgagcacacaaaccatacctgaaatgcctccttgtacaagtgatcgctaatgcgctctactacaatcctgcgctgacccttgagattttaaataagctcggggttgcagctgacatttttaaccattggtttgctatgctacgacaagttaaaaaaagtggggcacgtgttaatttcaagagggagcatgataagaaagtttgctgcttgggcttgacctcccttattgcgcttccagctgctaagattccagcagatgctttggatcggatcttcaaagcaacacttgagctgcttgttgcttacaaggaccaagttgcagaagctaagaagcaaaatgaagaggctgctgatgatatggatggttttgatgctgatgaagaagatgatgacgaagttgactctgataaggagatgggtcttgatgatgaagacggggatgaagtaagcagtcttcagctgcagaaattagccgcagaggctagaggcttccaaccagccgatgacgatgactcagatgatgatttcagcgacgatgagctacactcaccaatagacgaggtggatcctttcattttctttgtagaaactgtccaaggtttgcaggcatctgatcctgccaggttccagaaccttatgcatacattggatttttcttatcaagcgcttgctagtggcattgcacaacatgccgagcaaagaaaaaatgaaattgagaaggagaaatctgagaaggcaaatgcacagtgacgtcataaagcatttctggttcccttcgattgttttgccattttgccggtatagcattggtggacggttaatttcctgcgatttgcaggccgcaggtaagagtttttgcagccttagccaaagtgtaggacaaattcaatcttgtgagatagcatcttggataacctgtcacctcgaccatgttcgtcgtggccagttgtagacgtcttggttgtgcaagaaagtttctctcgaggacagttgctcgttttgttagggccatcaatttttttgggcggcttgtaagttatttgagaatcccacctcaggttgaggggttgtattctcgagtcgtcaaagtttagtaccggtgcggtgtagattgtatatggtttcagttgtctagaacgttgtggcttcatggacgggctgtggtataagtttttattattttttaatttttttgtcaacaagacattgtaattggggtttgtttgtttggtaagagcaagaaaggtcggcactgttatttcttcggtatcattgtccacttgtttcgatattagcagtttacctaatcctatatccaaactccactcttccatattcaaactccactctgaacaatgtaatctatagtgcttttgagtaaactatgaaaagattgct

SEQ ID NO: 39951 - DNA, 2399 bp, Zea Mays
ctcttctcttctattgggacactttgtgataaactgaagcaaacagatccatataaatcagagcttgagacaatgctggtccgacatgtctttcctgaattcagcagtcgtgttggacacctgcgagcaaaggcagcatgggttgctgggcagtatgcccatatcaacttttcagacccgaacaattttcgtcaggctatgcactgtatagtttcaggaatgcatgatccagatcttcctgtgagggttgattcggtctttgcacttcgttcttttgttgaagcctgcaaagatttaaatgagattcgacctatacttcctcagctccttgatgaattttttaagctgatgaatgaggttgagaatgaggatcttgtgttcaccctagaaaccattgttgacaaatttggtgaagagatggcaccttatgcattaggtttgtgccagaatttggctgctgctttctggagatgtatggctagttcagaagctgatgatgaagctgatgattccggtgctttggcagctgttggttgcttgcgagcaatcagcacaatccttgagtcaattagcagcctcccacatctttttacgcaaatagaaccaacattgctgcctataatgcgcaggatgttgacatctgatggccaagatgtttatgaagaagtccttgaaattgtttcctatatgtcattttactcgcctacaatttcactggacatgtggaccttgtggccagtgatgatggaggcgcttaatgattgggctatagatttctttgagaatattcttgttccattagacaactacatttctcggggaactgatcactttcttgcatgcaaagatccagattaccagcaaagcctgtggaaggcacttcaatctattatgatggacgaaaacatggaagattctgatattgaacctgctcccaagctcattgaagttgtttttcaaaattgtaaaggcaacgtggatcactgggttgagcactatctcaggattacaattgagcggttacgtcgagcacacaaaccatacctgaaatgcctccttgtacaagtgatcgctaatgcgctctactacaatcctgcgctgacccttgagattttaaataagctcggggttgcagctgacatttttaaccattggtttgctatgctacgacaagttaaaaaaaggagcatgataagaaagtttgctgcttgggcttgacctcccttattgcgcttccagctgctaagattccagcagatgctttggatcggatcttcaaagcaacacttgagctgcttgttgcttacaaggaccaagttgcagaagctaagaagcaaaatgaagaggctgctgatgatatggatggttttgatgctgatgaagaagatgatgacgaagttgactctgataaggagatgggtcttgatgatgaagacggggatgaagtaagcagtcttcagctgcagaaattagccgcagaggctagaggcttccaaccagccgatgacgatgactcagatgatgatttcagcgacgatgagctacactcaccaatagacgaggtggatcctttcattttctttgtagaaactgtccaaggtttgcaggcatctgatcctgccaggttccagaaccttatgcatacattggatttttcttatcaagcgcttgctagtggcattgcacaacatgccgagcaaagaaaaaatgaaattgagaaggagaaatctgagaaggcaaatgcacagtgacgtcataaagcatttctggttcccttcgattgttttgccattttgccggtatagcattggtggacggttaatttcctgcgatttgcaggccgcaggtaagagtttttgcagccttagccaaagtgtaggacaaattcaatcttgtgagatagcatcttggataacctgtcacctcgaccatgttcgtcgtggccagttgtagacgtcttggttgtgcaagaaagtttctctcgaggacagttgctcgttttgttagggccatcaatttttttgggcggcttgtaagttatttgagaatcccacctcaggttgaggggttgtattctcgagtcgtcaaagtttagtaccggtgcggtgtagattgtatatggtttcagttgtctagaacgttgtggcttcatggacgggctgtggtataagtttttattattttttaatttttttgtcaacaagacattgtaattggggtttgtttgtttggtaagagcaagaaaggtcggcactgttatttcttcggtatcattgtccacttgtttcgatattagcagtttacctaatcctatatccaaactccactcttccatattcaaactccactctgaacaatgtaatctatagtgcttttgagtaaactatgaaaagattgct

SEQ ID NO: 39952 - DNA, 2323 bp, Zea Mays
ctcttctcttctattgggacactttgtgataaactgaagcaaacagatccatataaatcagagcttgagacaatgctggtccgacatgtctttcctgaattcagcagtcgtgttggacacctgcgagcaaaggcagcatgggttgctgggcagtatgcccatatcaacttttcagacccgaacaattttcgtcaggctatgcactgtatagtttcaggaatgcatgatccagatcttcctgtgagggttgattcggtctttgcacttcgttcttttgttgaagcctgcaaagatttaaatgagattcgacctatacttcctcagctccttgatgaattttttaagctgatgaatgaggttgagaatgaggatcttgtgttcaccctagaaaccattgttgacaaatttggtgaagagatggcaccttatgcattaggtttgtgccagaatttggctgctgctttctggagatgtatggctagttcagaagctgatgatgaagctgatgattccggtgctttggcagctgttggttgcttgcgagcaatcagcacaatccttgagtcaattagcagcctcccacatctttttacgcaaatagaaccaacattgctgcctataatgcgcaggatgttgacatctgatggccaagatgtttatgaagaagtccttgaaattgtttcctatatgtcattttactcgcctacaatttcactggacatgtggaccttgtggccagtgatgatggaggcgcttaatgattgggctatagatttctttgagaatattcttgttccattagacaactacatttctcggggaactgatcactttcttgcatgcaaagatccagattaccagcaaagcctgtggaaggcacttcaatctattatgatggacgaaaacatggaagattctgatattgaacctgctcccaagctcattgaagttgtttttcaaaattgtaaaggcaacgtggatcactgggttgagcactatctcaggattacaattgagcggttacgtcgagcacacaaaccatacctgaaatgcctccttgtacaagtgatcgctaatgcgctctactacaatcctgcgctgacccttgagattttaaataagctcggggttgcagctgacatttttaaccattggtttgctatgctacgacaagttaaaaaaagtggggcacgtgttaatttcaagagggagcatgataagaaagtttgctgcttgggcttgacctcccttattgcgcttccagctgctaagattccagcagatgctttggatcggatcttcaaagcaacacttgagctgcttgttgcttacaaggaccaagttgcagaagctaagaagcaaaatgaagaggctgctgatgatatggatggttttgatgctgatgaagaagatgatgacgaagttgactctgataaggagatgggtcttgatgatgaagacggggatgaagtaagcagtcttcagctgcagaaattagccgcagaggctagaggcttccaaccagccgatgacgatgactcagatgatgatttcagcgacgatgagctacactcaccaatagacgaggtggatcctttcattttctttgtagaaactgtccaaggtttgcaggcatctgatcctgccaggttccagaaccttatgcatacattggatttttcttatcaagcgcttgctagtggcattgcacaacatgccgagcaaagaaaaaatgaaattgagaaggagaaatctgagaaggcaaatgcacagtgacgtcataaagcatttctggttcccttcgattgttttgccattttgccggtatagcattggtggacggttaatttcctgcgatttgcaggccgcagttgtagacgtcttggttgtgcaagaaagtttctctcgaggacagttgctcgttttgttagggccatcaatttttttgggcggcttgtaagttatttgagaatcccacctcaggttgaggggttgtattctcgagtcgtcaaagtttagtaccggtgcggtgtagattgtatatggtttcagttgtctagaacgttgtggcttcatggacgggctgtggtataagtttttattattttttaatttttttgtcaacaagacattgtaattggggtttgtttgtttggtaagagcaagaaaggtcggcactgttatttcttcggtatcattgtccacttgtttcgatattagcagtttacctaatcctatatccaaactccactcttccatattcaaactccactctgaacaatgtaatctatagtgcttttgagtaaactatgaaaagattgct

SEQ ID NO: 39953 - DNA, 2419 bp, Zea Mays
ttctattgggacactttgtgataaactgaagcaaacagatccatataaatcagagcttgagacaatgctggtccgacatgtctttcctgaattcagcagtcgtgttggacacctgcgagcaaaggcagcatgggttgctgggcagtatgcccatatcaacttttcagacccgaacaattttcgtcaggctatgcactgtatagtttcaggaatgcatgatccagatcttcctgtgagggttgattcggtctttgcacttcgttcttttgttgaagcctgcaaagatttaaatgagattcgacctatacttcctcagctccttgatgaattttttaagctgatgaatgaggttgagaatgaggatcttgtgttcaccctagaaaccattgttgacaaatttggtgaagagatggcaccttatgcattaggtttgtgccagaatttggctgctgctttctggagatgtatggctagttcagaagctgatgatgaagctgatgattccggtgctttggcagctgttggttgcttgcgagcaatcagcacaatccttgagtcaattagcagcctcccacatctttttacgcaaatagaaccaacattgctgcctataatgcgcaggatgttgacatctgatggccaagatgtttatgaagaagtccttgaaattgtttcctatatgtcattttactcgcctacaatttcactggacatgtggaccttgtggccagtgatgatggaggcgcttaatgattgggctatagatttctttgagaatattcttgttccattagacaactacatttctcggggaactgatcactttcttgcatgcaaagatccagattaccagcaaagcctgtggaaggcacttcaatctattatgatggacgaaaacatggaagattctgatattgaacctgctcccaagctcattgaagttgtttttcaaaattgtaaaggcaacgtggatcactgggttgagcactatctcaggattacaattgagcggttacgtcgagcacacaaaccatacctgaaatgcctccttgtacaagtgtgctgttgtgttttattgagcacaaaaaccatgtggagtgtcttcctgtctgatgagttgatcgtggtgttcttggatctggttcttggcctttccatttacttctatgataactggaaaaaaattaaaactgttgaagtgagggagcatgataagaaagtttgctgcttgggcttgacctcccttattgcgcttccagctgctaagattccagcagatgctttggatcggatcttcaaagcaacacttgagctgcttgttgcttacaaggaccaagttgcagaagctaagaagcaaaatgaagaggctgctgatgatatggatggttttgatgctgatgaagaagatgatgacgaagttgactctgataaggagatgggtcttgatgatgaagacggggatgaagtaagcagtcttcagctgcagaaattagccgcagaggctagaggcttccaaccagccgatgacgatgactcagatgatgatttcagcgacgatgagctacactcaccaatagacgaggtggatcctttcattttctttgtagaaactgtccaaggtttgcaggcatctgatcctgccaggttccagaaccttatgcatacattggatttttcttatcaagcgcttgctagtggcattgcacaacatgccgagcaaagaaaaaatgaaattgagaaggagaaatctgagaaggcaaatgcacagtgacgtcataaagcatttctggttcccttcgattgttttgccattttgccggtatagcattggtggacggttaatttcctgcgatttgcaggccgcaggtaagagtttttgcagccttagccaaagtgtaggacaaattcaatcttgtgagatagcatcttggataacctgtcacctcgaccatgttcgtcgtggccagttgtagacgtcttggttgtgcaagaaagtttctctcgaggacagttgctcgttttgttagggccatcaatttttttgggcggcttgtaagttatttgagaatcccacctcaggttgaggggttgtattctcgagtcgtcaaagtttagtaccggtgcggtgtagattgtatatggtttcagttgtctagaacgttgtggcttcatggacgggctgtggtataagtttttattattttttaatttttttgtcaacaagacattgtaattggggtttgtttgtttggtaagagcaagaaaggtcggcactgttatttcttcggtatcattgtccacttgtttcgatattagcagtttacctaatcctatatccaaactccactcttccatattcaaactccactctgaacaatgtaatctatagtgcttttgagtaaactatgaaaagattgct

SEQ ID NO: 39954 - DNA, 2475 bp, Zea Mays
tctattgggacactttgtgataaactgaagcaaacagatccatataaatcagagcttgagacaatgctggtccgacatgtctttcctgaattcagcagtcgtgttggacacctgcgagcaaaggcagcatgggttgctgggcagtatgcccatatcaacttttcagacccgaacaattttcgtcaggctatgcactgtatagtttcaggaatgcatgatccagatcttcctgtgagggttgattcggtctttgcacttcgttcttttgttgaagcctgcaaagatttaaatgagattcgacctatacttcctcagctccttgatgaattttttaagctgatgaatgaggttgagaatgaggatcttgtgttcaccctagaaaccattgttgacaaatttggtgaagagatggcaccttatgcattaggtttgtgccagaatttggctgctgctttctggagatgtatggctagttcagaagctgatgatgaagctgatgattccggtgctttggcagctgttggttgcttgcgagcaatcagcacaatccttgagtcaattagcagcctcccacatctttttacgcaaatagaaccaacattgctgcctataatgcgcaggatgttgacatctgatggccaagatgtttatgaagaagtccttgaaattgtttcctatatgtcattttactcgcctacaatttcactggacatgtggaccttgtggccagtgatgatggaggcgcttaatgattgggctatagatttctttgagaatattcttgttccattagacaactacatttctcggggaactgatcactttcttgcatgcaaagatccagattaccagcaaagcctgtggaaggcacttcaatctattatgatggacgaaaacatggaagattctgatattgaacctgctcccaagctcattgaagttgtttttcaaaattgtaaaggcaacgtggatcactgggttgagcactatctcaggattacaattgagcggttacgtcgagcacacaaaccatacctgaaatgcctccttgtacaagtgtgctgttgtgttttattgagcacaaaaaccatgtggagtgtcttcctgtctgatgagttgatcgtggtgttcttggatctggttcttggcctttccatttacttctatgataactggaaaaaaattaaaactgttgaagtgagggagcatgataagaaagtttgctgcttgggcttgacctcccttattgcgcttccagctgctaagattccagcagatgctttggatcggatcttcaaagcaacacttgagctgcttgttgcttacaaggaccaagttgcaggtggagtgatccatgtttttagttgtgcttgtgtttttttccctggtgaatacacagaagctaagaagcaaaatgaagaggctgctgatgatatggatggttttgatgctgatgaagaagatgatgacgaagttgactctgataaggagatgggtcttgatgatgaagacggggatgaagtaagcagtcttcagctgcagaaattagccgcagaggctagaggcttccaaccagccgatgacgatgactcagatgatgatttcagcgacgatgagctacactcaccaatagacgaggtggatcctttcattttctttgtagaaactgtccaaggtttgcaggcatctgatcctgccaggttccagaaccttatgcatacattggatttttcttatcaagcgcttgctagtggcattgcacaacatgccgagcaaagaaaaaatgaaattgagaaggagaaatctgagaaggcaaatgcacagtgacgtcataaagcatttctggttcccttcgattgttttgccattttgccggtatagcattggtggacggttaatttcctgcgatttgcaggccgcaggtaagagtttttgcagccttagccaaagtgtaggacaaattcaatcttgtgagatagcatcttggataacctgtcacctcgaccatgttcgtcgtggccagttgtagacgtcttggttgtgcaagaaagtttctctcgaggacagttgctcgttttgttagggccatcaatttttttgggcggcttgtaagttatttgagaatcccacctcaggttgaggggttgtattctcgagtcgtcaaagtttagtaccggtgcggtgtagattgtatatggtttcagttgtctagaacgttgtggcttcatggacgggctgtggtataagtttttattattttttaatttttttgtcaacaagacattgtaattggggtttgtttgtttggtaagagcaagaaaggtcggcactgttatttcttcggtatcattgtccacttgtttcgatattagcagtttacctaatcctatatccaaactccactcttccatattcaaactccactctgaacaatgtaatctatagtgcttttgagtaaactatgaaaagattgct

SEQ ID NO: 39955 - DNA, 2472 bp, Zea Mays
tctattgggacactttgtgataaactgaagcaaacagatccatataaatcagagcttgagacaatgctggtccgacatgtctttcctgaattcagcagtcgtgttggacacctgcgagcaaaggcagcatgggttgctgggcagtatgcccatatcaacttttcagacccgaacaattttcgtcaggctatgcactgtatagtttcaggaatgcatgatccagatcttcctgtgagggttgattcggtctttgcacttcgttcttttgttgaagcctgcaaagatttaaatgagattcgacctatacttcctcagctccttgatgaattttttaagctgatgaatgaggttgagaatgaggatcttgtgttcaccctagaaaccattgttgacaaatttggtgaagagatggcaccttatgcattaggtttgtgccagaatttggctgctgctttctggagatgtatggctagttcagaagctgatgatgaagctgatgattccggtgctttggcagctgttggttgcttgcgagcaatcagcacaatccttgagtcaattagcagcctcccacatctttttacgcaaatagaaccaacattgctgcctataatgcgcaggatgttgacatctgatggccaagatgtttatgaagaagtccttgaaattgtttcctatatgtcattttactcgcctacaatttcactggacatgtggaccttgtggccagtgatgatggaggcgcttaatgattgggctatagatttctttgagaatattcttgttccattagacaactacatttctcggggaactgatcactttcttgcatgcaaagatccagattaccagcaaagcctgtggaaggcacttcaatctattatgatggacgaaaacatggaagattctgatattgaacctgctcccaagctcattgaagttgtttttcaaaattgtaaaggcaacgtggatcactgggttgagcactatctcaggattacaattgagcggttacgtcgagcacacaaaccatacctgaaatgcctccttgtacaagtgatcgctaatgcgctctactacaatcctgcgctgacccttgagattttaaataagctcggggttgcagctgacatttttaaccattggtttgctatgctacgacaagttaaaaaaagtggggcacgtgttaatttcaagagggagcatgataagaaagtttgctgcttgggcttgacctcccttattgcgcttccagctgctaagattccagcagatgctttggatcggatcttcaaagcaacacttgagctgcttgttgcttacaaggaccaagttgcaggtggagtgatccatgtttttagttgtgcttgtgtttttttccctggtgaatacacagaagctaagaagcaaaatgaagaggctgctgatgatatggatggttttgatgctgatgaagaagatgatgacgaagttgactctgataaggagatgggtcttgatgatgaagacggggatgaagtaagcagtcttcagctgcagaaattagccgcagaggctagaggcttccaaccagccgatgacgatgactcagatgatgatttcagcgacgatgagctacactcaccaatagacgaggtggatcctttcattttctttgtagaaactgtccaaggtttgcaggcatctgatcctgccaggttccagaaccttatgcatacattggatttttcttatcaagcgcttgctagtggcattgcacaacatgccgagcaaagaaaaaatgaaattgagaaggagaaatctgagaaggcaaatgcacagtgacgtcataaagcatttctggttcccttcgattgttttgccattttgccggtatagcattggtggacggttaatttcctgcgatttgcaggccgcaggtaagagtttttgcagccttagccaaagtgtaggacaaattcaatcttgtgagatagcatcttggataacctgtcacctcgaccatgttcgtcgtggccagttgtagacgtcttggttgtgcaagaaagtttctctcgaggacagttgctcgttttgttagggccatcaatttttttgggcggcttgtaagttatttgagaatcccacctcaggttgaggggttgtattctcgagtcgtcaaagtttagtaccggtgcggtgtagattgtatatggtttcagttgtctagaacgttgtggcttcatggacgggctgtggtataagtttttattattttttaatttttttgtcaacaagacattgtaattggggtttgtttgtttggtaagagcaagaaaggtcggcactgttatttcttcggtatcattgtccacttgtttcgatattagcagtttacctaatcctatatccaaactccactcttccatattcaaactccactctgaacaatgtaatctatagtgcttttgagtaaactatgaaaagattgct

SEQ ID NO: 39956 - DNA, 1859 bp, Zea Mays
agacactcttgccatattacttgctgccgcatataggaggattagatcagctatagatggaatccctctaatcagggagatctcttgatgtttatgaagaagtccttgaaattgtttcctatatgtcattttactcgcctacaatttcactggacatgtggaccttgtggccagtgatgatggaggcgcttaatgattgggctatagatttctttgagaatattcttgttccattagacaactacatttctcggggaactgatcactttcttgcatgcaaagatccagattaccagcaaagcctgtggaaggcacttcaatctattatgatggacgaaaacatggaagattctgatattgaacctgctcccaagctcattgaagttgtttttcaaaattgtaaaggcaacgtggatcactgggttgagcactatctcaggattacaattgagcggttacgtcgagcacacaaaccatacctgaaatgcctccttgtacaagtgatcgctaatgcgctctactacaatcctgcgctgacccttgagattttaaataagctcggggttgcagctgacatttttaaccattggtttgctatgctacgacaagttaaaaaaagtggggcacgtgttaatttcaagagggagcatgataagaaagtttgctgcttgggcttgacctcccttattgcgcttccagctgctaagattccagcagatgctttggatcggatcttcaaagcaacacttgagctgcttgttgcttacaaggaccaagttgcagaagctaagaagcaaaatgaagaggctgctgatgatatggatggttttgatgctgatgaagaagatgatgacgaagttgactctgataaggagatgggtcttgatgatgaagacggggatgaagtaagcagtcttcagctgcagaaattagccgcagaggctagaggcttccaaccagccgatgacgatgactcagatgatgatttcagcgacgatgagctacactcaccaatagacgaggtggatcctttcattttctttgtagaaactgtccaaggtttgcaggcatctgatcctgccaggttccagaaccttatgcatacattggatttttcttatcaagcgcttgctagtggcattgcacaacatgccgagcaaagaaaaaatgaaattgagaaggagaaatctgagaaggcaaatgcacagtgacgtcataaagcatttctggttcccttcgattgttttgccattttgccggtatagcattggtggacggttaatttcctgcgatttgcaggccgcaggtaagagtttttgcagccttagccaaagtgtaggacaaattcaatcttgtgagatagcatcttggataacctgtcacctcgaccatgttcgtcgtggccagttgtagacgtcttggttgtgcaagaaagtttctctcgaggacagttgctcgttttgttagggccatcaatttttttgggcggcttgtaagttatttgagaatcccacctcaggttgaggggttgtattctcgagtcgtcaaagtttagtaccggtgcggtgtagattgtatatggtttcagttgtctagaacgttgtggcttcatggacgggctgtggtataagtttttattattttttaatttttttgtcaacaagacattgtaattggggtttgtttgtttggtaagagcaagaaaggtcggcactgttatttcttcggtatcattgtccacttgtttcgatattagcagtttacctaatcctatatccaaactccactcttccatattcaaactccactctgaacaatgtaatctatagtgcttttgagtaaactatgaaaagattgct

SEQ ID NO: 39957 - DNA, 1445 bp, Zea Mays
aaaatagaaaaggtggaaatttaggaagcaaacaaaagctccgctgccttgtctgcaatggcgtctggcgcttttcccacgagcgccccctgcccttctcgctctcctccataggcagacgccgcgctcccccaacgccgctccgccgaccccagtcatatctcccgcccccagctgaggcaatggggtcctcgtcctcgccgtcgccgccgccgccgcccatgatcgggcgggccgggaacctcaccgtcttcatcacgccgccgtctcctgctagcacgccgcggggcgctttgcgcacgccgccgcccgagtctccgcgctcggatttctctacacccacccgacagaggatagccccgtcgccctccccttctccctcgccgcagaaacacgagagcccgttcgcggcgcctgcggtggtgttcaccccgcccccgccgtcggctcctgtgaaggtcgcgccgccgccggtgcaggtgccgccgccgcagtacgagaaggcgtccgcgggaggcaagcacgacggatcggcgtttggcttcttctgggacgccgtcgcgcgcgtccaggaagcctcgacgagtacatggctacctggttcgggttggatcagtccaagtaccagtgggcgctcaacgactactacgaggccacaggcaaggacgtggattgtgtaaagggtagtaagctgaaggagcttactactaaagtgcagaaagtctgaaaaaaaagcaactttgttttgtgttgaagaggtgtagcttgtagcgtatgtctggagaagcatgttccattagttacattttggtgggggccttcttgaaaagtggccatctctgcttcgccaggcagttggacaactggaggccgcggttgaatcaaaggagcggccgttgtttcgttccggtgtttaggatctgctgtaatcctaaggttatgtcaaaacacagaatgggtcttatttgcaatggttctaatctggatgctgtccgttgcttaccgccacaccctcgtcttttctcttatctagatagcaaaagcacgcccataacttgatgtggcaggcgatggtacacaatcatcacttcgtttccgccagacctggctcagggttgtagatcggaggcgcttcccttctggctccttgttgtaaagctgaagagctcacgaattacgatcgtacactgcgttcccttgttgcttgtccggaccggctttggcatatgctgaattgcatgggcgaacacagcagaaatccagcgtcggtgttcagggtaatgcatgtactagtctgcatccaggtttatattcatcatttgttgtatgcatggactctcatgtagccttgcagtttctaaatcagaattacgttataaggctatttttagcaacttatccccatccctcatttgaaactccactctaaaaaaacatcacagtct

SEQ ID NO: 39958 - DNA, 1358 bp, Zea Mays
aaaatagaaaaggtggaaatttaggaagcaaacaaaagctccgctgccttgtctgcaatggcgtctggcgcttttcccacgagcgccccctgcccttctcgctctcctccataggcagacgccgcgctcccccaacgccgctccgccgaccccagtcatatctcccgcccccagctgaggcaatggggtcctcgtcctcgccgtcgccgccgccgccgcccatgatcgggcgggccgggaacctcaccgtcttcatcacgccgccgtctcctgctagcacgccgcggggcgctttgcgcacgccgccgcccgagtctccgcgctcggatttctctacacccacccgacagaggatagccccgtcgccctccccttctccctcgccgcagaaacacgagagcccgttcgcggcgcctgcggtggtgttcaccccgcccccgccgtcggctcctgtgaaggtcgcgccgccgccggtgcaggtgccgccgccgcagtacgagaaggcgtccgcgggaggcaagcacgacggatcggcgtttggcttcttctgggacgccgtcgcgcgcgtccaggaagcgcacgccagcctcgacgagtacatggctacctggttcgggttggatcagtccaagtaccagtgggcgctcaacgactactacgaggccacaggcaaggacgtggattgtgtaaagggtagtaagctgaaggagcttactactaaagtgcagaaagtctgaaaaaaaagcaactttgttttgtgttgaagaggtgtagcttgtagcgtatgtctggagaagcatgttccattagttacattttggtgggggccttcttgaaaagtggccatctctgcttcgccaggcagttggacaactggaggccgcggttgaatcaaaggagcggccgttgtttcgttccggtgtttaggatctgctgtaatcctaagatagcaaaagcacgcccataacttgatgtggcaggcgatggtacacaatcatcacttcgtttccgccagacctggctcagggttgtagatcggaggcgcttcccttctggctccttgttgtaaagctgaagagctcacgaattacgatcgtacactgcgttcccttgttgcttgtccggaccggctttggcatatgctgaattgcatgggcgaacacagcagaaatccagcgtcggtgttcagggtaatgcatgtactagtctgcatccaggtttatattcatcatttgttgtatgcatggactctcatgtagccttgcagtttctaaatcagaattacgttataaggctatttttagcaacttatccccatccctcatttgaaactccactctaaaaaaacatcacagtct

SEQ ID NO: 39959 - DNA, 805 bp, Zea Mays
gataagtgtcttctctgtatgatggacgtggattgtgtaaagggtagtaagctgaaggagcttactactaaagtgcagaaagtctgaaaaaaaagcaactttgttttgtgttgaagaggtgtagcttgtagcgtatgtctggagaagcatgttccattagttacattttggtgggggccttcttgaaaagtggccatctctgcttcgccaggcagttggacaactggaggccgcggttgaatcaaaggagcggccgttgtttcgttccggtgtttaggatctgctgtaatcctaaggttatgtcaaaacacagaatgggtcttatttgcaatggttctaatctggatgctgtccgttgcttaccgccacaccctcgtcttttctcttatctagatagcaaaagcacgcccataacttgatgtggcaggcgatggtacacaatcatcacttcgtttccgccagacctggctcagggttgtagatcggaggcgcttcccttctggctccttgttgtaaagctgaagagctcacgaattacgatcgtacactgcgttcccttgttgcttgtccggaccggctttggcatatgctgaattgcatgggcgaacacagcagaaatccagcgtcggtgttcagggtaatgcatgtactagtctgcatccaggtttatattcatcatttgttgtatgcatggactctcatgtagccttgcagtttctaaatcagaattacgttataaggctatttttagcaacttatccccatccctcatttgaaactccactctaaaaaaacatcacagtct

SEQ ID NO: 39960 - DNA, 2657 bp, Zea Mays
atcaatcgccacgccactaccgagctcaggcaaggcctgagagcaaatcaccctggcctcacatcgcacccggcagcagcagcaaacgaggccgaggccgaaggaaccaagcggaacgaagaccaaaatcacatcacgtagctacagctcctccgtcagcagccggggagcccagcccagcagcactttgtcccttgcaccgatcgttcctccgtcctcctcgcgtcctcgccttgcgcgagcactgcaccagcaagttagttctcccgttggttgatttgtgtactggggcatattggattggaggagccagaaaacttgaaaacccagagaattactttgaacttatatttatgtcctgatttatggaatcccatttctaagagatgccatcatcgataccaccaccgccacaaaattttctcccactgccatcaccaggggttgggcagagcactcgtattaaccttggggaaatcaagctaaaactagttaagaggattggtctagagcgagcaaagaggtactttgagcacctgcagaggtttttgtctttgaagctgagcaagagtctatttgacaagttctgcctcacaatacttggtgatgataacattcagcttcataaccacctcgtttgctcaattctccacaatgcttgccaagcaagtgggccatcgacagtcagtacacctaaatcaattggagttgccaagaattcaaatcatgtcttaagtcctacagtccctttctctgacattggtgatgttctgcatcatcatgtcaaggaccactatccacgaagcagaaatgcacatgtcgtccaggagaatggtgttgtgcgtttgtccaaactgaagagatttccgcagcctcacagtgaacttgtggaactactgtccaaacgatcacgtgtggagaatgcatattcaaatttatcagaccccataaatagcaactgtcctggtgtctctggtagagaatatgtggaagctgttgcacagcatgctcgaggtccaataattgccccactaggggttgccttctgttctggtcatttcggtgggaattcaaaaaccttgacacttccctctggtgctagcagtgatgactctatttgttgttatgaccttggtcagctgtgtgatacttcatcactgagacagcgtatggggagaatagcagaaacagaagggttggatgctgtgtcattagaatgtgctaattcattgaataatggagttgatttttacttgaaataccttattggatcatgtattgagctagtaagagcaagatctcagcatgatcgaataaatcatatggcactaaaacaacagttaagtcaaaagctaataaatggtgtgcagctccaaaatcaggtgcatggtcaaagtgccactacatgtccgcaaatcagctcggtttcattgcaagacttcaaggctctatcagagacaattcctcagctgcttggagtcaatgcatcactggtacttgaaaaaataaattcatataactaatcaattcggatgcaaatggatcaatgcttccgcagagtttaatctttgcctatcagacaatagaattgaaagctcaaaattgtatctttgtcacatgcaccatcaggcaatgctgaagtgtttcttcctgtttcatctctattgccttgcgaagtccaagcctgcctccatacacttattgcagctgaggcaatggaagatgctgatgaacattgttcaatatcctgttctggtgaaatccacagctcactatcaagactgctccatcaaaataagttcagatctcataacttctagagaatgttgattatacaaagacatcaatttgtcattatgtgcaccagtgaggagtcaagtcaaggctgtacacagaaacatggtgatgctaggtgcaaaacagatttagaacaggacttccaatacaaaaagaagttgatctttccatctaagagagaaggcaaacaactgtggaaaattgaccgcaaagcacaaaaggaggatggataggaaggaaatggcatggttcaaagtattctgccaaggaagaggcatacctgtgctgacctccgagctgttcacacggactccaaaagccgatcaatctctgcgatccatggtcaccaatggaatatagaaggaaggggaatgcttgcattgatgtgccccactttctatggcctgcctccttcacctcgagagtctaggcggtcgctgtgttcaaatagtctggctgaaaagacttcgagaatgtttggcccttgtgcttccttttttttttgtattcggtgggcggtctataaatagtgagcagagacttccctccattgatgattcatggtgtgtggagggcactccgctattcttggggatccgccgttttgtgtctttcaagcctattaacggcaggcagccgggcacggttacttgcgtgcctgcgtatgaactgccagctttgctgcacatgttgcatgtttgacaagagattgttgtatacggtgtaacttgaatagcattaactgagttttcttagctggctttgaatagcatttaagtcatacatttgatttgtatactgctgtcacatgacatgagttttgtgcacctggtcatcgttggccttattcccgtcgtgtt

SEQ ID NO: 39961 - DNA, 2710 bp, Zea Mays
aaatcaccctggcctcacatcgcacccggcagcagcagcaaacgaggccgaggccgaaggaaccaagcggaacgaagaccaaaatcacatcacgtagctacagctcctccgtcagcagccggggagcccagcccagcagcactttgtcccttgcaccgatcgttcctccgtcctcctcgcgtcctcgccttgcgcgagcactgcaccagcaagttagttctcccgttggttgatttgtgtactggggcatattggattggaggagccagaaaacttgaaaacccagagaattactttgaacttatatttatgtcctgatttatggaatcccatttctaagagatgccatcatcgataccaccaccgccacaaaattttctcccactgccatcaccaggggttgggcagagcactcgtattaaccttggggaaatcaagctaaaactagttaagaggattggtctagagcgagcaaagaggtactttgagcacctgcagaggtttttgtctttgaagctgagcaagagtctatttgacaagttctgcctcacaatacttggtgatgataacattcagcttcataaccacctcgtttgctcaattctccacaatgcttgccaagcaagtgggccatcgacagtcagtacacctaaatcaattggagttgccaagaattcaaatcatgtcttaagtcctacagtccctttctctgacattggtgatgttctgcatcatcatgtcaaggaccactatccacgaagcagaaatgcacatgtcgtccaggagaatggtgttgtgcgtttgtccaaactgaagagatttccgcagcctcacagtgaacttgtggaactactgtccaaacgatcacgtgtggagaatgcatattcaaatttatcagaccccataaatagcaactgtcctggtgtctctggtagagaatatgtggaagctgttgcacagcatgctcgaggtccaataattgccccactaggggttgccttctgttctggtcatttcggtgggaattcaaaaaccttgacacttccctctggtgctagcagtgatgactctatttgttgttatgaccttggtcagctgtgtgatacttcatcactgagacagcgtatggggagaatagcagaaacagaagggttggatgctgtgtcattagaatgtgctaattcattgaataatggagttgatttttacttgaaataccttattggatcatgtattgagctagtaagagcaagatctcagcatgatcgaataaatcatatggcactaaaacaacagttaagtcaaaagctaataaatggtgtgcagctccaaaatcaggtgcatggtcaaagtgccactacatgtccgcaaatcagctcggtttcattgcaagacttcaaggctctatcagagacaattcctcagctgcttggagtcaatgcatcactggtacttgaaaaaataaattcatataactaatcaattcggatgcaaatggatcaatgcttccgcagagtttaatctttgcctatcagacaatagaattgaaagctcaaaattgtatctttgtcacatgcaccatcaggcaatggtatgtggatgtttgcataactcaaacatgcatcgagctgaggttctagtaccaaatgcgacaatgatgaagtgttgagcctcgctagctagcatacttcacaaatttgatgttcacatccaagtcctgacttggttctgcacatatatgcagctgaagtgtttcttcctgtttcatctctattgccttgcgaagtccaagcctgcctccatacacttattgcagctgagctcactatcaagactgctccatcaaaataagttcagatctcataacttctagagaatgttgattatacaaagacatcaatttgtcattatgtgcaccagtgaggagtcaagtcaaggctgtacacagaaacatggtgatgctaggtgcaaaacagatttagaacaggacttccaatacaaaaagaagttgatctttccatctaagagagaaggcaaacaactgtggaaaattgaccgcaaagcacaaaaggaggatggataggaaggaaatggcatggttcaaagtattctgccaaggaagaggcatacctgtgctgacctccgagctgttcacacggactccaaaagccgatcaatctctgcgatccatggtcaccaatggaatatagaaggaaggggaatgcttgcattgatgtgccccactttctatggcctgcctccttcacctcgagagtctaggcggtcgctgtgttcaaatagtctggctgaaaagacttcgagaatgtttggcccttgtgcttccttttttttttgtattcggtgggcggtctataaatagtgagcagagacttccctccattgatgattcatggtgtgtggagggcactccgctattcttggggatccgccgttttgtgtctttcaagcctattaacggcaggcagccgggcacggttacttgcgtgcctgcgtatgaactgccagctttgctgcacatgttgcatgtttgacaagagattgttgtatacggtgtaacttgaatagcattaactgagttttcttagctggctttgaatagcatttaagtcatacatttgatttgtatactgctgtcacatgacatgagttttgtgcacctggtcatcgttggccttattcccgtcgtgtt

SEQ ID NO: 39962 - DNA, 3990 bp, Zea Mays
gtgccagcggctgggagaaggagagaaaaaaaaactggctctataccatattggaataacagaaaaccctaaccctaacaggggttgggtggtgtattaatagacttgagtactgggtcaggcccattacagaggggcgagacagtaattacatagggaacaaccccaaaccctaaacgagtattctaacaccgatgaatcccatatacataatcttgtggaagatgacaatgtatcaactcgaaagagtaagagaccaaggattgtaaagtcctttgttgatgattacattgtatatcttgtagatgacaccccaagtaccattgaagaggcatatttctcgatgctgacttttagaaggaagcaataaggagtgagatggattctattatgtctaatggaacttgggaggttgttgagcgtccttattggtgtaagcccattgggagtaaatgggtgtttaagaaaaaacttaggtctgatggtactattgaaaggtataaggcgaagcttgtaattaaaggctattcatagaaggaaggtgaggatttctttgatacttattcatccatggctcgattgaccacaattcgtgtgctactttctctagctgcctctcatggtttctcgtccatcaaatggatgttaagacaacattcttaaatggagagctagatgagaaaatctacatggagcagccagttgggtttgtagcaaacggttaagaaggcatggtgtgtaagttattgaaatctttatatggcctaaaacaagcacctaagcaatggcatgaaaagttcgatagaactttgacatctgttgtctttgttgtgaatgaagcagacaaatgcgtatattatcggtatggtgggggcgagggagtaattttatgcctgtatgttgatgacattctaatcttggggacgagtcttgatgtgattaaagagacaaaaaaactttttgtctaataattttgaaatgaaagatttgggagaagctgatgttattcttaacattaagctactgagagaagacaatggtggggtcacacttgtgcaatcccactatgtggaaaaggttttgagtcgatttggttataacgaatgtgaacctactacaacaccttatgatcctagtaagctattgaagaaaaattgaatgatagctagggatcaattgagatattcccaaataattagttcactcatgtacttagctagcgctacgaggcctgacatctcgtttgctgtgagcaaacttagccggtttatttcaaatctgggagatgattactagcatgctcttaagagagttctaagctatctaaaaggcactatgagtttaggcatccattataccgggtacccaacagtactggaggattattgtgatgcaaattggatatctaatgctgatcagatatatgcgacaagtggatatgtgttttcacttagaggtggcgctgtttcatggaagtcttgcaagcagaccatcttaacgagatcgattatggaagcagaactcacaacattagatactacttcagttgaggctgagtggcttcgtgaactccttatggatttaccggtggttgaaaaaacatgtgccggctatttctatgatctgtgataatcagactgtgataatcaagttaaacagttctatggataatacgaagtcgacaaggcacacaaagaggcgtttaaaatatgtcaggaaattgagaaactccagaataataacgttggactatgtccatacgtctaaaaatctggcagatcaatttactaaggggctatcacgtagtgtgatagacagtgcatcgagtgagatgggactgagacccacctaaagtttatcatattggtaaactgttctatgtgatcagagatcctgtgaattagaatggtgaaacaagatagtggtagactgagagaaaagacccttaataaagggttcatttcagatgaacatcttttccttactgtaagataggttggtgttttacaccttaagatgttccaagtggctttgtgaagcaaagatgttgtcctacagaacatctttagaggaacatacctatatgggttaactgctagtcacagtttatgagatctgggtgaaaggctatggagtttgacttatatgctccaaccagaggggatgcgctcgacaacctagtactgataaagagtttagatgaaacttattccacacaaaactgccaatttcaaggcctagtccattgtgcagttgtggtcaagtgtagtctagattctaggtggatgttcaacttaacaatctccattgaaacaccagtatatcaaacgtttgagatgatgagagcattttagtgtgacttagcatttggtggggattgttgaattaatgtgggcctgacccatattaatattcaataatagtcaaatctagaggcccactttaatgctacggtgtactagtactttagtaccataccggaagtttaagagacaattcactcaacttaaataggtggaccattggtgcatttattgagaagctgagaaaacgatgaaggactgtcacgcgcgccgccggccgggccgggccgagaccgtggtagatcggacattggtccgaatattccttcctaacggttgcatattttgcctagagtgatgaacgtccattactgtcgtacgttactggccgtttcctttgttatggctagtaacagacgagctgtaatggctatcagctagtaatggcatcactgatggcgttagtttctagctggctgtaacggtagctctgatggcgaccgttactgtccgttggcctcccgctatgcgtgtatatatacgaggaggggttgctgcttctggttacgagagaacacacgtacagtctcagacgcgttgcacacagccattcccgtcccaccttctgcgagcacatacagtgtgggagagcaggcctccgaaatcgtcgtccgcagagcgacacttgcacgggtgtgcgggcgatcaggtttttggggagcgtactcgtgactgctcgtttcgtccgctcgactaacgctgatccagttcttcgtcgtcggcgccgttcgtgggactgcactgcttacatctgcctgcgtcgactgcgtacgactacatcgaacatatacacgagatgtctcttgtgaatagagccactgatgccttgagcatcggtcactccgcaggttccatctaagagagaaggcaaacaactgtggaaaattgaccgcaaagcacaaaaggaggatggataggaaggaaatggcatggttcaaaggtaaaattatgctgatgatcatttgaaagcacataatactttttttacaaggggctctcactaattaactgcttattttctagtattctgccaaggaagaggcatacctgtgctgacctccgagctgttcacacggactccaaaagccgatcaatctctgcgatccatggtcaccaatggaatatagaaggaaggggaatgcttgcattgatgtgccccactttctatggcctgcctccttcacctcgagagtctaggcggtcgctgtgttcaaatagtctggctgaaaagacttcgagaatgtttggcccttgtgcttccttttttttttgtattcggtgggcggtctataaatagtgagcagagacttccctccattgatgattcatggtgtgtggagggcactccgctattcttggggatccgccgttttgtgtctttcaagcctattaacggcaggcagccgggcacggttacttgcgtgcctgcgtatgaactgccagctttgctgcacatgttgcatgtttgacaagagattgttgtatacggtgtaacttgaatagcattaactgagttttcttagctggctttgaatagcatttaagtcatacatttgatttgtatactgctgtcacatgacatgagttttgtgcacctggtcatcgttggccttattcccgtcgtgtt

SEQ ID NO: 39963 - DNA, 963 bp, Zea Mays
gaacagtaacagtcacattaatgaaatgaaacatatgaactatcgacctatacagtcttttttactttgcaatatgaaaagaaggtttgttattgtggctccgtcagcgcctcactttcagccagacatggcagtctcaaatctccccaccaaggccattaccttgttcttcctctcgtggatagttccatctaagagagaaggcaaacaactgtggaaaattgaccgcaaagcacaaaaggaggatggataggaaggaaatggcatggttcaaaggtaaaattatgctgatgatcatttgaaagcacataatactttttttacaaggggctctcactaattaactgcttattttctagtattctgccaaggaagaggcatacctgtgctgacctccgagctgttcacacggactccaaaagccgatcaatctctgcgatccatggtcaccaatggaatatagaaggaaggggaatgcttgcattgatgtgccccactttctatggcctgcctccttcacctcgagagtctaggcggtcgctgtgttcaaatagtctggctgaaaagacttcgagaatgtttggcccttgtgcttccttttttttttgtattcggtgggcggtctataaatagtgagcagagacttccctccattgatgattcatggtgtgtggagggcactccgctattcttggggatccgccgttttgtgtctttcaagcctattaacggcaggcagccgggcacggttacttgcgtgcctgcgtatgaactgccagctttgctgcacatgttgcatgtttgacaagagattgttgtatacggtgtaacttgaatagcattaactgagttttcttagctggctttgaatagcatttaagtcatacatttgatttgtatactgctgtcacatgacatgagttttgtgcacctggtcatcgttggccttattcccgtcgtgtt

SEQ ID NO: 39964 - DNA, 1646 bp, Zea Mays
tggcgccccatatttctctcctataaccgcccagcgaccggctcgccgtttgccgcgtcaagcagcaccctcgtctcgccatcgacgtccgtgcagtaggagcctgtgtccggactccccggagcatccgtccaaaatcgccgtcttccttgcgcgcttggtccgtcgttcgtcgtgcgcagattgcaatctgttcccgagcttcgaggaatcgacggtcaagcgttggcgaccgagtgatcaagttcttcgagttctacgagattgaagaccctgagcatctgtttggtgaaggcaagtgtcctctaacctattatgtcccatttactttataattcatcaacccgcataccatgatcaacctaaggattgactagctttgtatttaccttgtccttgattaccttttgggtcactatggttagcctcatggtattgctttactttaatcaatgaacatgatgtgaacaattatgatatgatgttgtcattattattatgatgttggactggtgatactttagggggctcgagtggtttctcgagtgcctctccgtaaggacctgtttgttggatgaccgcccgggaaaacagtgcaaccacgagggtggaatgggacgcccttagctaattaattagaggaactagaggtgtagttgcttcgccgtcgtgccgtcaatggggtccaggcacagtgcttgctctgccgaggctgggtgccgaggttctttcgttttgcttttgttagtcaccccctgcggggagtggtactgtgtttatcaaactggagaaacctaacgggcggctatgacctctagggaatctttgtaaaggcttcatagtgaatccctggccattcaccttgggagtggataagggtcttgcaagcccgggctagagagggaatcacatcttgtgggtaaagtgcacaacctctacagagtgtttgaaactaatatatcagccgtgcttgcggttatgagcggccaagggagctccattgattagagacacattggatcatggatactttgtttacagatgatgatgatgatgatgataatgctggtttctattgtgattatgattatggttttctggtattctttccgtttggaaagggtacttttgggttaacaacttgggttaatgctaaaacctggctctatattagtaataattacctgaccaactaaaagcaactgcttgaccctaactccacataaagctagtccactacggccaaacgggacatttgctgagtacgttgatgtgtactcacccttgctttcacaaaacaccaggttgcctttggtgcaatctatgctcaggtaaagaaggtgtcgaggcggatctccaggggttccaggacttcgacgagtccgaggattaggctagcgacctcccccagtctgctgcctgtggtgggttgtttacgttggctacgtttcgattctgtgtactttgatttatattatgtaaatggctctagtctgtaatattattacttactctttattgtaattcgaagcattgtgctatcatgagtcatttatgtaatcgctgtgtacgtgaataactgatcctggcacgtacatggttcgcattcggtttaccttctaaaaccgggtgtgacagtattcgac

SEQ ID NO: 39965 - DNA, 368 bp, Zea Mays
atctttctagaaggattttgcagaaggattttgcttggcatcaaggaacagtgcaaactagaagaaacccccgtcatcagcgacctctccccaacggcgccgacgatggcgcaacagcagacgcagctaaccactggctcgggcatcctggatgccgtcccgctcttcgtcgtcatcctcctcgcggcccacgtcctggccctcgtgttctggatgtacaagctggcttccgagaagcaaccaccccggaggaagacacagtgacggcgccgatctacgccatcggcgatccttcgctagcctctttatcgaatcatctttcttttttcttttttgggtttatggattaacggccacaccaagagaag

SEQ ID NO: 39966 - DNA, 351 bp, Zea Mays
atctttctagaaggattttgcagaaggattttgcttggcatcaaggaacagtgcaaactagaagaaacccccgtcatcagcgacctctccccaacggcgccgacgatggcgcaacagcagacgcagctaaccactggctcgggcatcctggatgccgtcccgctcttcgtcgtcatcctcctcgcggcccacgtcctggccctcgtgttctggatgtacaagctggcttccgagaagcaaccaccccggaggaagacacagtgacggcgccgatctacgccatcggcgatccttcgctagcctctttatcgaattaataaagaagtagagttcggtcaagctcaaagaggg

SEQ ID NO: 39967 - DNA, 902 bp, Zea Mays
atctttctagaaggattttgcagaaggattttgcttggcatcaaggaacagtgcaaactagaagaaacccccgtcatcagcgacctctccccaacggcgccgacgatggcgcaacagcagacgcagctaaccactggctcgggcatcctggatgccgtcccgctcttcgtcgtcatcctcctcgcggcccacgtcctggccctcgtgttctggatgtacaagctggcttccgagaagcaaccaccccggaggaagacacagtgacggcgccgatctacgccatcggcgatccttcgctagcctctttatcgggaatacgcgataatcatgaattgcaacatctttatctatgtctgtatttatgtttctgttgttagtacatgtgtctgaatatgacctgaacattttgatacttcagctgtaatgtgcgttcctccttttctctacatttttagttggtggcatgtgatacttgtcgcatttaacaattttgacgtgcaaataccattatatttagcaagtagtagccatgtatactttgtggcatgcttcgttgtagaagctgttcaatcccacactccattagactatctccagcagcttacccatccccatacctgtattcaaactctactctgcgaacagtgtagtctacagtgcaaaacaatgcatgtgggtaaattttaggtaatttgctggagtcgacctgatcgaccaacctcattgtgctttatgtgggaatgactgcatgccctttcccttgtcttacatatatatatattttttgttagttgagtctgtaatatggtaaatttattttgtctgaaagtatgcctgtaatacatgaccatattacgaaattgtcccgtaggtgaagttttttatatgaccatagatattac

SEQ ID NO: 39968 - DNA, 1169 bp, Zea Mays
atctttctagaaggattttgcagaaggattttgcttggcatcaaggaacagtgcaaactagaagaaacccccgtcatcagcgacctctccccaacggcgccgacgatggcgcaacagcagacgcagctaaccactggctcgggcatcctggatgccgtcccgctcttcgtcgtcatcctcctcgcggcccacgtcctggccctcgtgttctggatgtacaagctggcttccgagaagcaaccaccccggaggaagacacagtgacggcgccgatctacgccatcggcgatccttcgctagcctctttatcgcaggaggcactcgcgttggggtcgctcatcgacgacaagaagaaacttggtgactgccagttcgacctctagaaacagtcctacatggccgcatgtgccgctatgtatgacaagctccggcgcagctgccgcttggacgcggtgcagagcggctgctctgcgctgtccatcgtcaagcaggggggcctcatggtcgtcgccaacgtcgacgactcatcgggttgttctggacaccgcatcgacgacaacgtcatcacgtcgtccagctcatcgttcacctgaagctcaacctgtcacgtaagtcgctactgtctggccatgaattcttgtgcgttgagacgatggtcgttgctgacgttgtatgagtgtcctcgaacacgatatatgtagaggagtagcgcatccggtggtgcaacggccaggggtactaccttactgatgagtctggggtgcacttcgttttacagcccagccaagagtcatcagtactcggtatgtcacgcgcgttcgacgactactatatcgaggactgtggtgtcatcttagcgccataggtgacgcagaggaggaccgacaacaatgaccagttcgtcatcctcgccaccgttggggtagcttttgtgccggcttgcctttaattctcttcgcaaacacacacttgtctttttgtttaagcaaaagagtatggtggtacgtgtctgatgactaacgatgtacgagggaatttttttcggtatgtgtggaacgtgttatctaatgatgagaccatgcaaatcgtgacataaatcgaagtctgcatgatactgatggttgcaatgtagtggtgaaacagatagattataaataacaaaatttatg

SEQ ID NO: 39969 - DNA, 1580 bp, Zea Mays
aaactagcccaaagaatgacaaattttgcggagggggaaattgccaattttctcgtttcattcctcctcgggtggcccgtcatcgcgttcaccctagttctttctttcctggcagcgacaactgcgcagcggcgccgccaccggacgtcagatctccgttgggtgtttgatggcgatgagcacctgtcaggtgctgtggttcagatcttatgcatatcacttttgaagaaaaaaatagaaatgctaaatgccttattcacagcggtgggaatttggaaagtgtatttgtgctgcttcactgcacttgatttggccaagaaacaaatttcctggattcaatgaaattcattaaccactttgattggcagtattctttggttctaatattatgctaactccatggctcagtactctaaggccactttctctcattaaggtagtactgagttcattgcatgactatgacttctgaagatggagacattttggctcttctgtctgagccaagcctaaaggaagagcaacttgaggcttctgaatctgatgctatgttttctgcaattatgaaagccattgaatcaaataagaatgtagttgaagtttcacctgaggaagctgcctgggcagattcatgcttcgtgcagacttctgaactgtcatatgatgactggggagcgatgaggagtatgctgcttgatgccctcgaaaagccaacagaaagtcccagtgatacttcagaaagtgcacataatgcaatctcagaggcaaaacctcactcccttcctgctgaaaacatttctgagcatggcgacatccacatggagcaaataaacaataccgatgatgacaaggatggtactgaagcttttgaaattgctgatgtaatcagacgtgtagacgataatggtaagcaaattgatagttatgtagcagacgctggtgatgagttggtccttgagcagacccagtcaacaggttctatatttaaggtttgggacctggaactgccattttctgatgatgatgatgatggcgagcttgaactcgtcaaggatctgaagaagcttctcaaggagaacagccttccagaggatatatatccaactcttcctccagatgatgcagccaaacccttgagccagataagcatcaatgaaattgtggcgggcttgagcgatttatcaatacagcaagcccatgagtgactattatttctcaaatagctgtggcacaccttggtcgtccaggcgatattttgttttgtgcaaatcacttgggtggtttaaacagcaggtttaggctaactgttgtgctgtctgttttttctgtatactcgccgttttgatttctgcttaacttgaaatcagctaaaaatgaagatgctttggtagaattcgcgttctggtatttccccgtctatcgttgtactcgtgcttctgtctgtctcattttttcctttgctttcttcagcaatgacaacttcgtcaggaagtttaggtttaggacctgtttggttcctttagtacagggactaaagtttagttagaagactaaagttttgtcactaccatgtttggttc

SEQ ID NO: 39970 - DNA, 1587 bp, Zea Mays
attatgttatttgttgggattaattgacagaactcactggaacatctctaacttagttcttggtaattttagtggaattcttagtattaaaggaattttagtttacatcaggaatcagcacgtaagaaattattttcatgtctatggttacctctggtaaagaaatactgagttgacagtaagaccgtgccattttgatgattggtagttaaagatgaaatataggtcctcaaacatcttactctaaaatatctagggaaacagtgattactgttcactttgcttttgtaactgttgacatgagctgcgaccctattgcttctttttctgtattttcatgcattgctgttcagatgccaaatgaaagcgagaagttctccaccacagttctttcaacaaaacttttgctaacaggtactctaaggccactttctctcattaaggtagtactgagttcattgcatgactatgacttctgaagatggagacattttggctcttctgtctgagccaagcctaaaggaagagcaacttgaggcttctgaatctgatgctatgttttctgcaattatgaaagccattgaatcaaataagaatgtagttgaagtttcacctgaggaagctgcctgggcagattcatgcttcgtgcagacttctgaactgtcatatgatgactggggagcgatgaggagtatgctgcttgatgccctcgaaaagccaacagaaagtcccagtgatacttcagaaagtgcacataatgcaatctcagaggcaaaacctcactcccttcctgctgaaaacatttctgagcatggcgacatccacatggagcaaataaacaataccgatgatgacaaggatggtactgaagcttttgaaattgctgatgtaatcagacgtgtagacgataatggtaagcaaattgatagttatgtagcagacgctggtgatgagttggtccttgagcagacccagtcaacaggttctatatttaaggtttgggacctggaactgccattttctgatgatgatgatgatggcgagcttgaactcgtcaaggatctgaagaagcttctcaaggagaacagccttccagaggatatatatccaactcttcctccagatgatgcagccaaacccttgagccagataagcatcaatgaaattgtggcgggcttgagcgatttatcaatacagcaagcccatgagtgactattatttctcaaatagctgtggcacaccttggtcgtccaggcgatattttgttttgtgcaaatcacttgggtggtttaaacagcaggtttaggctaactgttgtgctgtctgttttttctgtatactcgccgttttgatttctgcttaacttgaaatcagctaaaaatgaagatgctttggtagaattcgcgttctggtatttccccgtctatcgttgtactcgtgcttctgtctgtctcattttttcctttgctttcttcagcaatgacaacttcgtcaggaagtttaggtttaggacctgtttggttcctttagtacagggactaaagtttagttagaagactaaagttttgtcactaccatgtttggttc

SEQ ID NO: 39971 - DNA, 3975 bp, Zea Mays
cactccacgcccaattctcagcgagcgagaggccctcgtcgagcccatccatcccatgatgacgcgggcgccgggagcacgcggacgggacggcaaccccagccaaagccaaaacaggcctgcttccttacacctcgcttggtggtctgggcgaccggccgctggcgtcgcgccctcccttataaaccaccacacttcagcacccacagctccctcttgcatcccctcgcccgtcgtctcgccagtcgctacaccccaaaaacctcacgcgcgcgctcgcgacccctcgcgctcgcctcgtcggcacgccggcgagaggggcgcccatccccgtgcctatataaggacgccggattggaggtgcccgtcccttatccgcgcggccagatctacctctgttccacgcctccgtcaccgccgcgtcggggcgatcccaccgaggccacaggtataagctggtaccatggcatccaacacaggagcatcaggatggctcaggggtaaggtgaaggctgtgacatctggagattgtctactaatcatggggagctcaaaagctgagatcccacctgagaagtccatcaccctgtcctaccttatggccccaaggctggctcgccgtggtggagttgacgagccctttgcatgggaaagcagagagtttctaaggaagctttgtatagggaaggaggtcacattcagagtggattatacggctcctaatattggacgagaattcggaactgtttatctaggtgacaagaatgttgcgtactcagtaatttctgctggatgggcaagggtaaaggagcaaggcccaaaggggggcgaacaaaattcgtaccttgccgagctgttgaggttggaggaagttgccaaacaacagggtgttggtcgttggagcaaggaacctggtgctgctgaagagtcaataagagatcttccaccatccgcaattggtgaaggaagtggttttgatgcaaagggttttgcggtttccaataaaggcaagagtttggaggccattgttgaacaagttcgtgatggcagtactgttcgtgtgtatttactccctaatttccagtttgtgcagatatatgttgctggagtacaggctccatcaatgggaagacgtccatcggtacctactgtaattgctgaaactgatgataatgctaatatcgcgaacgctgaagatcctgagggaacacctgcgcaactgactacagcacaaaggctagttgcatctgcagcttctgctgaaattccaccagataggtatggaagagaagccaaacatttcacagagactagagttctcaacagagatgtgcgtattgtggtggaaggcacagacagctttagtaatataattggttctgtgtattaccctgatggagagactgcaaaggacttggcccttgagcttgtcgaaaatgggctggcaaagtatgttgagtggagtgccaatatgcttgatgttgaagtaaaaataaagctgaagaatgcagaacttcaggctaaaaaggatcaattgagaatctggacagggtttaagccaccagcgacaaactcgaagcccattcatgaccagaaatttaatggaaaagtggtagaggttgtaagtggggattgcattattgtggctgatgattctgctccatatggaagtccttcagctgaacgtcgggttaatctgtcaagcattagggctcctaagttgggcaatgctcgtacagatgtgaagcctgaccattttgctcgtgaagctaaggagttcttacgcacgaggttgattggcaaacaagtggctgttgaaatggaatactctcgaaggatcagcactgtagatggacagagtgctgctccaacagcaaacatggctgatacaagagttttagattatgggtcagtttttctgggttcaccatcacagactgatggagatgacacatcttctgctccgagctctgctagccagcctggagttaatgttgctgagcttttgctctcacgaggctttgctaaaacatctaaacacagggattatgaggaaaggtcacactattatgatgctttattagcagctgaatcacgcgctgagaaagcaaagaaaggcgtgcattctcagaaagaatctcctgtgatgcatataacagatttaacaactgtatctgcaaagaaggccaaagattttcttcccttcttgcagcggaacagaaggcattcggccatcgttgaatatgtttttagtggccatcggttcaaactaacaattcccaaggagacttgtagtatcgccttctcattatctggtgtccgttgtcctggtaaaggcgagccatactcagacgaagctattgctttgatgaggagaaggatacttcaacgagatgtggagatagaggttgaagcagttgataggacaggaacgttcataggttctttgtgggagtccaagaccaacatgggctctgtgcttctggaagctggacttgccaagctgagttcatttggcttggataggacctcagatgcttatatcctaacaagagctgaacagtctgcgaagcaacagaagattaagatatgggagaactatgtcgagggtgaaaatgcttccaatggatccacacctgaatctaaacaaaagcaaattctcaaggttgttgtcacggaagttcttggtggtgggaagttttatgttcagacaatgggtgaccagagggtggcttcaattcaacagcagcttgcatctttgaaacttaaagatgcgccggtcattggtgcttttaatcctgtgaagggagagatagtcctcgcacaatttagcgttgacaactcctggaacagagctatgattgttaatggacctcgttctgttgaatctccggacgacaagtttgaagtattctatattgactatggcaaccaagaggtggttacctacagtcgtttacgacctgtagacccatctgtttcctcgtctcctgctcttgctcagctatgcagccttgctttcataaaagtgcccagtcttgaggatgactttggtcaggaagcagcagagtatctaagtgaatgtttgctcagtagctcaaagcaataccgggcaatgatcgaagaacatgatacttctggggggaaatcaaaaggacaaggaaccggaaatgttctcattgttactcttgttgatgcggagacagaaagtagcataaacgctaccatgcttgaggaagggcttgcccggctcgaaagaagcaagagatgggacactagggagaggaagacggctctccagaacctggaacagttccaggacaaggcaaagaaggaaaggctgcggatttggcagtacggagatgttgaatcggacgaggacgagcaggccccgcctgcaaggaagcctggaggtcgtcggtagagactgggcagtgtaaggctgcagtctggcatgctatgaaagttttggacaaccacaaatgttggactctgccgggagttatagatgaggacttactgaggggcgaaacttttgaagctatgcttcgctctgagatagaacatcaatcctttcaagtgctaaacttcacggaggctcgatctcatgaatgaccgaatcactgacctcgacaaactcaaagaggccaagggcttggcggccatgcaagacacgtctgagataaaagttgtgctgttgacgatctagtgctacgcaagatccaaagtatgaaggacaaacataaactgtcacccccttatgagggtcctttcatcatctctgaagtacttcggctcgacgcttattgactccagctagaagatgacacaatcaaccgtttttacgtgtaacttctccattttttgcaataagtccatctcgaacaactccaccgccatgactgagatgttgggggcctaacatcatgtatcaatacattcatatggagctgttacaagaaaattcatatctcg

SEQ ID NO: 39972 - DNA, 4390 bp, Zea Mays
ctccacgcccaattctcagcgagcgagaggccctcgtcgagcccatccatcccatgatgacgcgggcgccgggagcacgcggacgggacggcaaccccagccaaagccaaaacaggcctgcttccttacacctcgcttggtggtctgggcgaccggccgctggcgtcgcgccctcccttataaaccaccacacttcagcacccacagctccctcttgcatcccctcgcccgtcgtctcgccagtcgctacaccccaaaaacctcacgcgcgcgctcgcgacccctcgcgctcgcctcgtcggcacgccggcgagaggggcgcccatccccgtgcctatataaggacgccggattggaggtgcccgtcccttatccgcgcggccagatctacctctgttccacgcctccgtcaccgccgcgtcggggcgatcccaccgaggccacaggtataagctggtaccatggcatccaacacaggagcatcaggatggctcaggggtaaggtgaaggctgtgacatctggagattgtctactaatcatggggagctcaaaagctgagatcccacctgagaagtccatcaccctgtcctaccttatggccccaaggctggctcgccgtggtggagttgacgagccctttgcatgggaaagcagagagtttctaaggaagctttgtatagggaaggaggtcacattcagagtggattatacggctcctaatattggacgagaattcggaactgtttatctaggtgacaagaatgttgcgtactcagtaatttctgctggatgggcaagggtaaaggagcaaggcccaaaggggggcgaacaaaattcgtaccttgccgagctgttgaggttggaggaagttgccaaacaacagggtgttggtcgttggagcaaggaacctggtgctgctgaagagtcaataagagatcttccaccatccgcaattggtgaaggaagtggttttgatgcaaagggttttgcggtttccaataaaggcaagagtttggaggccattgttgaacaagttcgtgatggcagtactgttcgtgtgtatttactccctaatttccagtttgtgcagatatatgttgctggagtacaggctccatcaatgggaagacgtccatcggtacctactgtaattgctgaaactgatgataatgctaatatcgcgaacgctgaagatcctgagggaacacctgcgcaactgactacagcacaaaggctagttgcatctgcagcttctgctgaaattccaccagataggtatggaagagaagccaaacatttcacagagactagagttctcaacagagatgtgcgtattgtggtggaaggcacagacagctttagtaatataattggttctgtgtattaccctgatggagagactgcaaaggacttggcccttgagcttgtcgaaaatgggctggcaaagtatgttgagtggagtgccaatatgcttgatgttgaagtaaaaataaagctgaagaatgcagaacttcaggctaaaaaggatcaattgagaatctggacagggtttaagccaccagcgacaaactcgaagcccattcatgaccagaaatttaatggaaaagtggtagaggttgtaagtggggattgcattattgtggctgatgattctgctccatatggaagtccttcagctgaacgtcgggttaatctgtcaagcattagggctcctaagttgggcaatgctcgtacagatgtgaagcctgaccattttgctcgtgaagctaaggagttcttacgcacgaggttgattggcaaacaagtggctgttgaaatggaatactctcgaaggatcagcactgtagatggacagagtgctgctccaacagcaaacatggctgatacaagagttttagattatgggtcagtttttctgggttcaccatcacagactgatggagatgacacatcttctgctccgagctctgctagccagcctggagttaatgttgctgagcttttgctctcacgaggctttgctaaaacatctaaacacagggattatgaggaaaggtcacactattatgatgctttattagcagctgaatcacgcgctgagaaagcaaagaaaggcgtgcattctcagaaagaatctcctgtgatgcatataacagatttaacaactgtatctgcaaagaaggccaaagattttcttcccttcttgcagcggaacagaaggcattcggccatcgttgaatatgtttttagtggccatcggttcaaactaacaattcccaaggagacttgtagtatcgccttctcattatctggtgtccgttgtcctggtaaaggcgagccatactcagacgaagctattgctttgatgaggagaaggatacttcaacgagatgtggagatagaggttgaagcagttgataggacaggaacgttcataggttctttgtgggagtccaagaccaacatgggctctgtgcttctggaagctggacttgccaagctgagttcatttggcttggataggacctcagatgcttatatcctaacaagagctgaacagtctgcgaagcaacagaagattaagatatgggagaactatgtcgagggtgaaaatgcttccaatggatccacacctgaatctaaacaaaagcaaattctcaaggttgttgtcacggaagttcttggtggtgggaagttttatgttcagacaatgggtgaccagagggtggcttcaattcaacagcagcttgcatctttgaaacttaaagatgcgccggtcattggtgcttttaatcctgtgaagggagagatagtcctcgcacaatttagcgttgacaactcctggaacagagctatgattgttaatggacctcgttctgttgaatctccggacgacaagtttgaagtattctatattgactatggcaaccaagaggtggttacctacagtcgtttacgacctgtagacccatctgtttcctcgtctcctgctcttgctcagctatgcagccttgctttcataaaagtgcccagtcttgaggatgactttggtcaggaagcagcagagtatctaagtgaatgtttgctcagtagctcaaagcaataccgggcaatgatcgaagaacatgatacttctggggggaaatcaaaaggacaaggaaccggaaatgttctcattgttactcttgttgatgcggagacagaaagtagcataaacgctaccatgcttgaggaagggcttgcccggctcgaaagaagcaagagatgggacactagggagaggaagacggctctccagaacctggaacagttccaggacaaggcaaagaaggaaaggctgcggatttggcagtacggagatgttgaatcggacgaggacgagcaggccccgcctgcaaggaagcctggaggtcgtcggtagagactgggcagtgtaaggctgcagtctggcatgctatgaaagttttggacaaccacaaatgttggactctgccgggagttatagatgaggacttactgaggggtaccgtatttatattcggttagaagaagggaacttagcgaggcgaaatcacttttgatattccgtttttacaggcgaaactttctctgttttagcacttttgatattccgtttttacatcgcaagttataaggttaaagatgcattgtttctttttctctcaacttaataaggttgtgtctatgcgctgcggttctttgtagtcagaatataatattgagaagtgcagtgaattaagttaaggattgcatttaattattccagtgtccgtgcagtgacgatttctctcgtacgcatttactgattgttttttttttttggcttgatggtagctttcttcttggacaaaatgtctatttgcagtatatacttagcctgcctctgctggcgctgttgcttgatattccgtttttacaggcgaaacttttgaagctatgcttcgctctgagatagaacatcaatcctttcaagtgctaaacttcacggaggctcgatctcatgaatgaccgaatcactgacctcgacaaactcaaagaggccaagggcttggcggccatgcaagacacgtctgagataaaagttgtgctgttgacgatctagtgctacgcaagatccaaagtatgaaggacaaacataaactgtcacccccttatgagggtcctttcatcatctctgaagtacttcggctcgacgcttattgactccagctagaagatgacacaatcaaccgtttttacgtgtaacttctccattttttgcaataagtccatctcgaacaactccaccgccatgactgagatgttgggggcctaacatcatgtatcaatacattcatatggagctgttacaagaaaattcatatctcg

SEQ ID NO: 39973 - DNA, 4374 bp, Zea Mays
ctccacgcccaattctcagcgagcgagaggccctcgtcgagcccatccatcccatgatgacgcgggcgccgggagcacgcggacgggacggcaaccccagccaaagccaaaacaggcctgcttccttacacctcgcttggtggtctgggcgaccggccgctggcgtcgcgccctcccttataaaccaccacacttcagcacccacagctccctcttgcatcccctcgcccgtcgtctcgccagtcgctacaccccaaaaacctcacgcgcgcgctcgcgacccctcgcgctcgcctcgtcggcacgccggcgagaggggcgcccatccccgtgcctatataaggacgccggattggaggtgcccgtcccttatccgcgcggccagatctacctctgttccacgcctccgtcaccgccgcgtcggggcgatcccaccgaggccacaggtataagctggtaccatggcatccaacacaggagcatcaggatggctcaggggtaaggtgaaggctgtgacatctggagattgtctactaatcatggggagctcaaaagctgagatcccacctgagaagtccatcaccctgtcctaccttatggccccaaggctggctcgccgtggtggagttgacgagccctttgcatgggaaagcagagagtttctaaggaagctttgtatagggaaggaggtcacattcagagtggattatacggctcctaatattggacgagaattcggaactgtttatctaggtgacaagaatgttgcgtactcagtaatttctgctggatgggcaagggtaaaggagcaaggcccaaaggggggcgaacaaaattcgtaccttgccgagctgttgaggttggaggaagttgccaaacaacagggtgttggtcgttggagcaaggaacctggtgctgctgaagagtcaataagagatcttccaccatccgcaattggtgaaggaagtggttttgatgcaaagggttttgcggtttccaataaaggcaagagtttggaggccattgttgaacaagttcgtgatggcagtactgttcgtgtgtatttactccctaatttccagtttgtgcagatatatgttgctggagtacaggctccatcaatgggaagacgtccatcggtacctactgtaattgctgaaactgatgataatgctaatatcgcgaacgctgaagatcctgagggaacacctgcgcaactgactacagcacaaaggctagttgcatctgcagcttctgctgaaattccaccagataggtatggaagagaagccaaacatttcacagagactagagttctcaacagagatgtgcgtattgtggtggaaggcacagacagctttagtaatataattggttctgtgtattaccctgatggagagactgcaaaggacttggcccttgagcttgtcgaaaatgggctggcaaagtatgttgagtggagtgccaatatgcttgatgttgaagtaaaaataaagctgaagaatgcagaacttcaggctaaaaaggatcaattgagaatctggacagggtttaagccaccagcgacaaactcgaagcccattcatgaccagaaatttaatggaaaagtggtagaggttgtaagtggggattgcattattgtggctgatgattctgctccatatggaagtccttcagctgaacgtcgggttaatctgtcaagcattagggctcctaagttgggcaatgctcgtacagatgtgaagcctgaccattttgctcgtgaagctaaggagttcttacgcacgaggttgattggcaaacaagtggctgttgaaatggaatactctcgaaggatcagcactgtagatggacagagtgctgctccaacagcaaacatggctgatacaagagttttagattatgggtcagtttttctgggttcaccatcacagactgatggagatgacacatcttctgctccgagctctgctagccagcctggagttaatgttgctgagcttttgctctcacgaggctttgctaaaacatctaaacacagggattatgaggaaaggtcacactattatgatgctttattagcagctgaatcacgcgctgagaaagcaaagaaaggcgtgcattctcagaaagaatctcctgtgatgcatataacagatttaacaactgtatctgcaaagaaggccaaagattttcttcccttcttgcagcggaacagaaggcattcggccatcgttgaatatgtttttagtggccatcggttcaaactaacaattcccaaggagacttgtagtatcgccttctcattatctggtgtccgttgtcctggtaaaggcgagccatactcagacgaagctattgctttgatgaggagaaggatacttcaacgagatgtggagatagaggttgaagcagttgataggacaggaacgttcataggttctttgtgggagtccaagaccaacatgggctctgtgcttctggaagctggacttgccaagctgagttcatttggcttggataggacctcagatgcttatatcctaacaagagctgaacagtctgcgaagcaacagaagattaagatatgggagaactatgtcgagggtgaaaatgcttccaatggatccacacctgaatctaaacaaaagcaaattctcaagttcttggtggtgggaagttttatgttcagacaatgggtgaccagagggtggcttcaattcaacagcagcttgcatctttgaaacttaaagatgcgccggtcattggtgcttttaatcctgtgaagggagagatagtcctcgcacaatttagcgttgacaactcctggaacagagctatgattgttaatggacctcgttctgttgaatctccggacgacaagtttgaagtattctatattgactatggcaaccaagaggtggttacctacagtcgtttacgacctgtagacccatctgtttcctcgtctcctgctcttgctcagctatgcagccttgctttcataaaagtgcccagtcttgaggatgactttggtcaggaagcagcagagtatctaagtgaatgtttgctcagtagctcaaagcaataccgggcaatgatcgaagaacatgatacttctggggggaaatcaaaaggacaaggaaccggaaatgttctcattgttactcttgttgatgcggagacagaaagtagcataaacgctaccatgcttgaggaagggcttgcccggctcgaaagaagcaagagatgggacactagggagaggaagacggctctccagaacctggaacagttccaggacaaggcaaagaaggaaaggctgcggatttggcagtacggagatgttgaatcggacgaggacgagcaggccccgcctgcaaggaagcctggaggtcgtcggtagagactgggcagtgtaaggctgcagtctggcatgctatgaaagttttggacaaccacaaatgttggactctgccgggagttatagatgaggacttactgaggggtaccgtatttatattcggttagaagaagggaacttagcgaggcgaaatcacttttgatattccgtttttacaggcgaaactttctctgttttagcacttttgatattccgtttttacatcgcaagttataaggttaaagatgcattgtttctttttctctcaacttaataaggttgtgtctatgcgctgcggttctttgtagtcagaatataatattgagaagtgcagtgaattaagttaaggattgcatttaattattccagtgtccgtgcagtgacgatttctctcgtacgcatttactgattgttttttttttttggcttgatggtagctttcttcttggacaaaatgtctatttgcagtatatacttagcctgcctctgctggcgctgttgcttgatattccgtttttacaggcgaaacttttgaagctatgcttcgctctgagatagaacatcaatcctttcaagtgctaaacttcacggaggctcgatctcatgaatgaccgaatcactgacctcgacaaactcaaagaggccaagggcttggcggccatgcaagacacgtctgagataaaagttgtgctgttgacgatctagtgctacgcaagatccaaagtatgaaggacaaacataaactgtcacccccttatgagggtcctttcatcatctctgaagtacttcggctcgacgcttattgactccagctagaagatgacacaatcaaccgtttttacgtgtaacttctccattttttgcaataagtccatctcgaacaactccaccgccatgactgagatgttgggggcctaacatcatgtatcaatacattcatatggagctgttacaagaaaattcatatctcg

SEQ ID NO: 39974 - DNA, 3673 bp, Zea Mays
cttaagtgtcccatatattttccatttccatcatttctttagctacctatggaaggtaaaatgcaaatattggcaaaatgcgagttgctaaatatgataggaaacaagacataggttacactatctaataaatgacggtctttctttttgattgcaggtataagctggtaccatggcatccaacacaggagcatcaggatggctcaggggtaaggtgaaggctgtgacatctggagattgtctactaatcatggggagctcaaaagctgagatcccacctgagaagtccatcaccctgtcctaccttatggccccaaggctggctcgccgtggtggagttgacgagccctttgcatgggaaagcagagagtttctaaggaagctttgtatagggaaggaggtcacattcagagtggattatacggctcctaatattggacgagaattcggaactgtttatctaggtgacaagaatgttgcgtactcagtaatttctgctggatgggcaagggtaaaggagcaaggcccaaaggggggcgaacaaaattcgtaccttgccgagctgttgaggttggaggaagttgccaaacaacagggtgttggtcgttggagcaaggaacctggtgctgctgaagagtcaataagagatcttccaccatccgcaattggtgaaggaagtggttttgatgcaaagggttttgcggtttccaataaaggcaagagtttggaggccattgttgaacaagttcgtgatggcagtactgttcgtgtgtatttactccctaatttccagtttgtgcagatatatgttgctggagtacaggctccatcaatgggaagacgtccatcggtacctactgtaattgctgaaactgatgataatgctaatatcgcgaacgctgaagatcctgagggaacacctgcgcaactgactacagcacaaaggctagttgcatctgcagcttctgctgaaattccaccagataggtatggaagagaagccaaacatttcacagagactagagttctcaacagagatgtgcgtattgtggtggaaggcacagacagctttagtaatataattggttctgtgtattaccctgatggagagactgcaaaggacttggcccttgagcttgtcgaaaatgggctggcaaagtatgttgagtggagtgccaatatgcttgatgttgaagtaaaaataaagctgaagaatgcagaacttcaggctaaaaaggatcaattgagaatctggacagggtttaagccaccagcgacaaactcgaagcccattcatgaccagaaaggtggtagaggttgtaagtggggattgcattattgtggctgatgattctgctccatatggaagtccttcagctgaacgtcgggttaatctgtcaagcattagggctcctaagttgggcaatgctcgtacagatgtgaagcctgaccattttgctcgtgaagctaaggagttcttacgcacgaggttgattggcaaacaagtggctgttgaaatggaatactctcgaaggatcagcactgtagatggacagagtgctgctccaacagcaaacatggctgatacaagagttttagattatgggtcagtttttctgggttcaccatcacagactgatggagatgacacatcttctgctccgagctctgctagccagcctggagttaatgttgctgagcttttgctctcacgaggctttgctaaaacatctaaacacagggattatgaggaaaggtcacactattatgatgctttattagcagctgaatcacgcgctgagaaagcaaagaaaggcgtgcattctcagaaagaatctcctgtgatgcatataacagatttaacaactgtatctgcaaagaaggccaaagattttcttcccttcttgcagcggaacagaaggcattcggccatcgttgaatatgtttttagtggccatcggttcaaactaacaattcccaaggagacttgtagtatcgccttctcattatctggtgtccgttgtcctggtaaaggcgagccatactcagacgaagctattgctttgatgaggagaaggatacttcaacgagatgtggagatagaggttgaagcagttgataggacaggaacgttcataggttctttgtgggagtccaagaccaacatgggctctgtgcttctggaagctggacttgccaagctgagttcatttggcttggataggacctcagatgcttatatcctaacaagagctgaacagtctgcgaagcaacagaagattaagatatgggagaactatgtcgagggtgaaaatgcttccaatggatccacacctgaatctaaacaaaagcaaattctcaaggttgttgtcacggaagttcttggtggtgggaagttttatgttcagacaatgggtgaccagagggtggcttcaattcaacagcagcttgcatctttgaaacttaaagatgcgccggtcattggtgcttttaatcctgtgaagggagagatagtcctcgcacaatttagcgttgacaactcctggaacagagctatgattgttaatggacctcgttctgttgaatctccggacgacaagtttgaagtattctatattgactatggcaaccaagaggtggttacctacagtcgtttacgacctgtagacccatctgtttcctcgtctcctgctcttgctcagctatgcagccttgctttcataaaagtgcccagtcttgaggatgactttggtcaggaagcagcagagtatctaagtgaatgtttgctcagtagctcaaagcaataccgggcaatgatcgaagaacatgatacttctggggggaaatcaaaaggacaaggaaccggaaatgttctcattgttactcttgttgatgcggagacagaaagtagcataaacgctaccatgcttgaggaagggcttgcccggctcgaaagaagcaagagatgggacactagggagaggaagacggctctccagaacctggaacagttccaggacaaggcaaagaaggaaaggctgcggatttggcagtacggagatgttgaatcggacgaggacgagcaggccccgcctgcaaggaagcctggaggtcgtcggtagagactgggcagtgtaaggctgcagtctggcatgctatgaaagttttggacaaccacaaatgttggactctgccgggagttatagatgaggacttactgaggggcgaaacttttgaagctatgcttcgctctgagatagaacatcaatcctttcaagtgctaaacttcacggaggctcgatctcatgaatgaccgaatcactgacctcgacaaactcaaagaggccaagggcttggcggccatgcaagacacgtctgagataaaagttgtgctgttgacgatctagtgctacgcaagatccaaagtatgaaggacaaacataaactgtcacccccttatgagggtcctttcatcatctctgaagtacttcggctcgacgcttattgactccagctagaagatgacacaatcaaccgtttttacgtgtaacttctccattttttgcaataagtccatctcgaacaactccaccgccatgactgagatgttgggggcctaacatcatgtatcaatacattcatatggagctgttacaagaaaattcatatctcg

SEQ ID NO: 39975 - DNA, 917 bp, Zea Mays
atgaaacctaccagtgaacagacccgctcattttggtcaggcaaacagaaacagccacagtaaaacaaacataactggagtttcttaattcatatgaatgcactttttaacaatctggaaagattatgaaattatctacaacttttcttacaaacccaaggttgaattctgttgataaaattccctaaatcttaagagaacagattctacacagaattatgagacagaaaaactgctataataaaactgcaataactttctgatctaatgtccgattgaggtgttcttcgcggccacggaaagatctacaaattatctacgactcatatacagacttttcatttttttgaggccactaagactacggaaaacaggcatgaacagaaacggtcgaatctgccattccgcagaaaactaaattcgagatcaaaacctaaccccacatctaatccaacctctaatcctttaatccccatgatccacaacctccaaaagcacataattacagggaggaacaaggatttcaacatacctagggttttccccaagaaaatcttcaagaagagatggggaagaacatctccttgatcctctcttcctcttcaattcaacgtgcccctcctcttctcgatccttgctgcgtgggggggggatctagagggaggagggagccatggagagggtagggggcggctgcccatggggaggagagcaagagagggagggggcggctgcccatggggaggagagcaagagagggagggggcggctgcaacccaattggggagagggagagggggcggctagggttggggaggagaggggggctcccatccaccggatcgagatcaatggcccaaactcgctctcccctttgagctcccaaccccagcggaaaaaatgccaaaagatctact

SEQ ID NO: 39976 - DNA, 809 bp, Zea Mays
ccacttctttcccgccggcccagtccatacacctcatggcaccgacatgtggacccgtttgggtagtgacagctgggcaccaagtctcacgcctggctcatccagtcatccttgcgtcgacatgcggggctcgggtggcagccactcatcctcacacctttctatcacctcactggcccatgggcccagcctcctgggggcggtcatccgcaggcgcagacgcgcgcacttcatctgcgtgtgggtccccctaggcaggaccatctcccacgctgacctcaaacatcaatagttccaccgtgtcgccgccgtgtatctgggctgattccgctggcgtcgcgcgaactcgtggacacgcatctcacgcctatatatgtggccgccaatgtccggtttcttcaaacgacaaaccaagcaagccaccagcaatgggtggaatttggggtgaaactgagaggattaccgccgttgttgatcacgtgcttcgcctcgctctgacccctggaaccagcccctggagcttctccatgtggcgtggatggcgcaccgggcttcacctgatggaattgcggtccaggggacctgtaatttctcgccgaagcttcttcctcaccgctgggtcgccctgcatgtggtcagtacttccacagccttaatcgtcggcttatatcctgaagatgaagcttcctgtaatagcttatgctaaaaacaaatggttagttatgtttttgaggaccttcggaaggagaaggcccccaacagtagcccctcgcagtgttgatttgtttctttgtaacaaatttaagatg

SEQ ID NO: 39977 - DNA, 5956 bp, Zea Mays
ccacttctttcccgccggcccagtccatacacctcatggcaccgacatgtggacccgtttgggtagtgacagctgggcaccaagtctcacgcctggctcatccagtcatccttgcgtcgacatgcggggctcgggtggcagccactcatcctcacacctttctatcacctcactggcccatgggcccagcctcctgggggcggtcatccgcaggcgcagacgcgcgcacttcatctgcgtgtgggtccccctaggcaggaccatctcccacgctgacctcaaacatcaatagttccaccgtgtcgccgccgtgtatctgggctgattccgctggcgtcgcgcgaactcgtggacacgcatctcacgcctatatatgtggccgccaatgtccggtttcttcaaacgacaaaccaagcaagccaccagcaatgggtggaatttggggtgaaactgagaggattaccgccgttgttgatcacgtgcttcgcctcgctctgacccctggaaccagcccctggagcttctccatgtggcgtggatggcgcaccgggcttcacctgatggaattgcggtccaggggacctgtaatttctcgccgaagcttcttcctcaccgctgggtcgccctgcatgtggtcagtacttccacagccttaatcgtcggtgagtcttgcctcctgtggttcgccttgtcctgctatatgtgacgcaccgatgggtggcgagtttaggcgctgggagcactgagttgtcgcgctttggccatggccaccgtcgtgcgggttttgtgcgtggtcgtggttgggcgccagggggaaagatggagcgaccaccgtggatcctccaatcgacggccagaaattgatgtgcgcttaccccttcacggggttgatctgtgccatgggatcgataatggagggtgtagattggtgcaatgtgtggttgctaatcggtcgtcgatcgacaatctggcagtcaaggtggctgaccggttttgtgatttgtgtgatctagtctgatccgtggaagcagatcggacggctggggtcagacgataccccttcgcatgcaccattttgcatatgaacccctaaggaaatgttgaatcaacctgcaatcctctcctagtgttaaactaatttcagtcgagtcctgagttttataaaacaacccctggccttctgcgtttatagtgtccacggtccagagtctttaaagaaattcagaattaaaataaaaaatgttttctagtatataaataattctagaaacttgtttatatcatatttaattcatcttaatttcttttttatccattccagttgcattaatctcatattaatattgtttatcacctagtaactttatattgttatgaaacctaggataaaattgtgcacttaatttcttttgtacccaacatttaaatcttcagaaaatcataactctttatctgtaacttcaaatttagtggttctcgaacctgcgatctcgttacgacgttgttggtcacttgttctcaaatgatgtgagtcaagaacaaggaaacacaattgttaatcattaaggacctttgtccttcgaatcattatttccttacgaatataatgctccttaaacgaaggtcaagaaagacataccttcatcgcatcaattacaaggataggaatgcgaaggaacaagtatgataattatatcttaataattcatttattcttgcatcccacaaaacatatatgaataacaataatgttaatattacattgataccttcggcttgctcgaaggtgaggatgcgagagtgaaaacaatccagcatgaacagtacggtgctactgttcatctatttataggcacgggatgcaaaccgaggaaaagtacatttatgtcctcagtgtttactcatgatcgtaatacaagttataaaagactaagtggtcttttcctcctttggccatcatcattattcctccgcttcgttgcgagccggatcttttctgtatggtgctagcttcggtgtttactcttatcttctttggatatgtcttcattttgcatgtcttcatcataagaggcttatatcctgaagatgaagcttcctgtaatagcttatgctaaaaacaaatggttagttatgtttttgaggaccttcggaaggagaaggcccccaacagtagcccctcgcagtgttgatttgtttctttgtaacaaatttaagatgtgacgtgaatgaaggcctttagccgaaggtttgaaaaaacaccttcccttcgctagaatagcgaatgacacagacatgcgggacccaccaaactttagggtgctagacatgtaaatattgaaagcatttcttgtgccatttcagttgcttacattgtgctcgtctttttaaattttcttgctttggcgagtttaattgggtttcaagcttcggtatttcaacaaccatcagtttgatggctgacgagaagaagattgttgacccagcgttgttcgggttttacgaagctatggaaaaaaccaacgtagagaagattgcacatgagaagttagctgggatatctgagggttccagtgatagtgaaagttttgatgcagagagcaggaatgaagatgccaaagatcggccctagagaccaagccatgttgtcttcgggaaatcaactatcaagcaagggcaaattgatgcaatgaggggaaggtacttctgtgatatctcaattgtgagggttggaggggaaaataatgtccctctgccaaaagctaacgaattggtggtttatagaagcttcatggaggcagggctttggttccctttgcataattgatggtcgaagtccttaaaactttcaaaatttaccttcatcagcttactcccgaagctatcattaaggtggggatgtttatatgggccacgaggagccacagactagaaccagatgcaaagtgtttctataacatccatgagctgtcttatgagacgaaggccactagaatagaacaatatcacaacaacttcggttgttacagcttcgtgcctcgctctgaggtgagctacctagttccgacatttcagaagagatggcctggggcctggatgcaggagtggttctacatgaagaacgacctggctgaaagggaggatattaaggggattattcaacgtcttatatggtctcacttaggcattaggaggccatccactgcccttggtaatgacatacaagcatgccagatggccttcaatacaatatgtacttacataggcacaagggacttaatccaggagcatattgcttatagggtgtggccactcacaaatggatgggagatgccaaaggaagctcctcctgagtccagccaaggcgatttagtttaactgaagtacaccttcaggtacaggaaccaattcgatgagccgaatgatgattggtcggatgccattgaagaaactagtgatgaattgcttgaggcatatatgaaggctgaagatgacgccatgacgactgccttcggggctcgtggcaaaaagaggctgaacagggtatttgatgttattggatttgtatatccagattatagttatccttcacggaaacaaggaaagaagaggaagattgctacttcggtgacttccagcacgccaaagttgaaaaagtaaagttttaacacaccgacctaggcgcattgaaacggccgaagtaccgaagctaattgaagggtctgcttctatatctgagactagtcgctctatgcctgacgaagctaagtcaagcccggctgaagagctgaaactgaagaaggtggtagagcaaccgaaggccttgagtccactgcgcgagacagaattgacgaaggcctcaaggatccctgcagtgactccaaagaagaagagaatgaccagtgtgctggatgctgtcatggaatacgtaaaggcatcaactcctgcttctactgaagcacctagtgcagaatgcgaattttaaaggaatctatcgaagttggttcagcgccaagctatttctgaagctggacctttagtttctgctgaggcaaaaccttcaaaaaaatgcaccactagtcttggaaagagaaggtccctctgagaaatcaaagtctcctggccccagagcatctattgaagaattagagttcattgtgcgacatgcttcggggaagtaattgtcggaggagcagattgccgaagctaggcaatatgccaaggatctgaagtacccccgagggtccttggtgtacagcagcaatgatgaggatgatttcctttattttttgccagacaataaagagatttccgtctaccgagaaatgatgagaaatatggggtacccaaagcttgaactcggcctatctgcgatgtcgaaggatgaccttgcagacaaccttgcttacaatagcttgaagggcttaattctaattaaggctttaagggctcaaaagggagcagacgatgagagctgtcagatagctcttgggaatcatcggtcagaggtcatttcactaaggaatgaagttctcaagaaagataaaatattgttttccttagtggacaagattaaaactagagaagtcaagcttagtgcacaaaccgaagcccacaaagctgaagtcgaaagtttgaagaaaaagcttgcagaaatgagtgaaaattttgaagttgaaaaggcgaagcaggaaataagtgaaatggtaacatcaagggtgcaaaagaatgttgaagagctttgggattccaaggagagatgctacgaaacaaccttggaatgcgccaaaaagctagaaaatagttttgcaagggtgggtgcatactctttggaacagaagtttattcgtggtgatcccgaaggggttatccagtggatcggcgaggaggccgaagcttttgatgaaatactcagcgatcgtggggatttttgcgctttcgccggtgcacgaggggtcgcggcaattttagagaaggccggttgtgaacatgttaaggccacagcccagccagaatctattttctcagcagatgacaccaaggacccctcagccgaagcctctttgctaggcgggaggttttactctgatgtttggatgaagggtggtcatgagatggctaatgaagccattaaaaagaatgagagagaatctcacaacgcccgagaagaggctaaacgagctgaagaagttgctgaacatgccaggatcatagctggcctttcaccaccatggagccatacaatcctgaagccgacccggctatgaaagaagctttggatataatgaagtgggatgaagtcttcctcgaaagcctctagtcatttcagaaaacctattgtaacctcgctgacggagaatacgtactcattccgaacaaggagttgctcaggagggagtccaggagccagcaccagagcctgccactaaggatctccccgccgcagcttttgaaggcaagcccggttttatgcataaccgttatatatgctattttactacacttaatgactgtaggcttgtactgtgcacttaagtgtaggagttgtctgaaaccctagttccatgaactcaggattcctttgagatggatactagtatgctaggtcgagtagctgctttactaattagggatctcagtagaagtcgattgatttttctagcactcacgtgaggccaggaattgattgtatccatttttatattggaatgatgatggtctgtggacaaccttccatggggatgcgttgtctacgagatgaaaaattgaaataaggattaaaatgtggtaccatgtgtcaagtgtttgaacgtactaaacacatgccgagaaatgtggtaaattggcaagcctagtacttgagtgaacctacccgcagattgtcctcctcacgtgacctgagacgtggtctcccattctggttatggtgggtacaagtgtggtcactacacgacgg

SEQ ID NO: 39978 - DNA, 1827 bp, Zea Mays
cccatggcgctcgtctgactgagttccctagcgcgtgtgcctgttcttcgctcctctgcgcgcgcttcttcttgctgcgcacctcgatctccagctcgcctagtctcagcgccgcggcactcactctggtccgtgcttcctttagctcggccaggcggaacatcgttccctgctgtgctcgcccttggtgctggccgcgtgctcctcgtacggctcggccgcgacctcgccgtcgttccgcagctcgtcccaacgccgagctcggccctgccctctgctccagctcgaagtcgctgcgttgccgagtccctggccgcgtctgtgtggttgtgttctttcgtgggaacgctcactttgccatggtcatgcactcatgcgctttctactcggtccggcgtgggttttagttgtcggtcaagcgtgcccctgtttcctcagtcgcgtcgggtctccatgccggttgtcgtcgttcgtcatcgcgtcgtgtgtgcagcaacgtcgctgattcctccatgatgcttgtcgacgaacttcgcttcattggtttctcgccttcggttcggctcatgtatgcacaccgaacgcgttcgccacttaaccctgtgtcgctagagctcgtgacctcgctgtcgtcggagtcctcactgaattcgtgtcctcgccagagctcgcgctaacctgctcaaccacacctcgccagctcgctctagactcgatctcgtcgtcgttccgtgcgtcgtcaagaaatcccaagagtcgggcgaagacgaagttagcagcgtgatattcaccaagtgctcgacacaagggctgaaccagaatccttgccgtactcgcggatagcgcgtcagatttagtaggtacgtgaattaaccaagtgatgcggagaaccagaactgagtcgaccacaagatggtgctgatgaacagaactgaaggtggatagacaaaacaaatattagaacaaaagctgattgtcaagcggacgtcgtctaacaacactaacctagtgttatccaggcaagccctggtgcatgcaaccccttccttatgttttaaataatttttacacacttaaagtctagcaaaatgtgcattaggtttataggagttgcttggaaaccctttgatgcattacctaccttgatatccatacctttatagatgcttctgatgaagtatcgaaatgatatacaaaaatgcttagccctactcagatcttgtggatagaggttgtcttttgcattaaggcctagctcaggggttatcctgaggaaggatgacttctacctacaagaatattttcattgggagcgtggtgggatcttactgcaaagttccctataatgctcttttcatcctaaggaacacaaacaatcctaaggatggaagtacttaaatcgggacttgggctaggaacaggtgatgttctacccaggttgattaaggattatagagaatgtaggcttgatgaccgaggaccttttaactggtcacatgcctcatcatgggtaagctttgcctcgggcagactaataccagaataagataacacgcaatgggagtggagatatggcgagagtagcgtgtaccctccgtggcaagaggctggacggtggtgtatctgtgctctcggttggcgtgaacctgatctagtcttaagaaccccagtggcgagttgacatatgaaagtattaagtgctacatatgtcgtgtgattggagatccccagctgggtattaatcgattcaggaacgccgttacttctcggatatgaagacttggtcactgacttgcaatctaagtcatggatggaataataatgagc

SEQ ID NO: 39979 - DNA, 2162 bp, Zea Mays
ctctgctccagctcgaagtcgctgcgttgccgagtccctggccgcgtctgtgtggttgtgttctttcgtgggaacgctcactttgccatggtcatgcactcatgcgctttctactcggtccggcgtgggttttagttgtcggtcaagcgtgcccctgtttcctcagtcgcgtcgggtctccatgccggttgtcgtcgttcgtcatcgcgtcgtgtgtgcagcaacgtcgctgattcctccatgatgcttgtcgacgaacttcgcttcattggtttctcgccttcggttcggctcatgtatgcacaccgaacgcgttcgccacttaaccctgtgtcgctagagctcgtgacctcgctgtcgtcggagtcctcactgaattcgtgtcctcgccagagctcgcgctaacctgctcaaccacacctcgccagctcgctctagactcgatctcgtcgtcgttccgtgcgtcgtcaagaaatcccaagagtcgggcgaagacgaagttagcagcgtgatattcaccaagtgctcgacacaagggctgaaccagaatccttgccgtactcgcggatagcgcgtcagatttagtaggtaagccgattcatatttccgttagcttaattattgaattagttcgatgaatgtgacgtgattattttcgtgattttggagtagtcgtgttgggtaggtttgagatgttaaatatgtgatgtatggtaaattactgaatgaagtttaaatttagtattttaaaatgtctaaacaataatattattagtattacttatgacgaattataattgtttgataaaattaatggtaggctatatatgatagcttagagtggtatgtaatttaatccagtcgcgtggtctaaaaagtgatgtgtttttattctttttctagatttaaattccttagaccactaagtttagaatttaattaattaactgataagttgtgtttaggctaattgtattaaatgtgtatagtttgttgtttcgtgatgtttgcgttaggttcgtttaatttagagaagcgtgattattgcgcttagtcgtacgtcgataattagtgtctccgtatgaaattgttcaacacctcgccgctaggtgtttaattcgctatcgcgtaacactatttaggtttgcaatattcctgtctatatgcattcatgtgcataatgcatttcatttaggtacgtgaattaaccaagtgatgcggagaaccagaactgagtcgaccacaagatggtgctgatgaacagaactgaaggtggatagacaaaacaaatattagaacaaaagctgattgtcaagcggacgtcgtctaacaacactaacctagtgttatccaggcaagccctggtgcatgcaaccccttccttatgttttaaataatttttacacacttaaagtctagcaaaatgtgcattaggtttataggagttgcttggaaaccctttgatgcattacctaccttgatatccatacctttatagatgcttctgatgaagtatcgaaatgatatacaaaaatgcttagccctactcagatcttgtggatagaggttgtcttttgcattaaggcctagctcaggggttatcctgaggaaggatgacttctacctacaagaatattttcattgggagcgtggtgggatcttactgcaaagttccctataatgctcttttcatcctaaggaacacaaacaatcctaaggatggaagtacttaaatcgggacttgggctaggaacaggtgatgttctacccaggttgattaaggattatagagaatgtaggcttgatgaccgaggaccttttaactggtcacatgcctcatcatgggtaagctttgcctcgggcagactaataccagaataagataacacgcaatgggagtggagatatggcgagagtagcgtgtaccctccgtggcaagaggctggacggtggtgtatctgtgctctcggttggcgtgaacctgatctagtcttaagaaccccagtggcgagttgacatatgaaagtattaagtgctacatatgtcgtgtgattggagatccccagctgggtattaatcgattcaggaacgccgttacttctcggatatgaagacttggtcactgacttgcaatctaagtcatggatggaataataatgagc

SEQ ID NO: 39980 - DNA, 1876 bp, Zea Mays
atgaagtcgccgttgcgcaggctcaggggcttcggccaccaccaccccaaggagcggagggggcaccagccgccgccggccaagctcgacgagctcgtctgcgccgcccatgaggtggaagacatgagaaactgctatgatggcttgatttcagctgcagccgctacaacaaatagtgtatatgagttttctgaggctcttgaagaactgggaggctgctttctcgcaaaaactgcactaaatggtgatgacgatgatagtggtagagtgctgatgatgctgggaaaggtccaatttgaattacaaaagtttgttgattcttatcggtcaaatatcatttatactatcacaaccccatcagagtctcttctcaaggagctacagacggtagaggaaatgaagcagcaatgcgacatgaaaagagaggcgtatgaagctacgagggcatcctatagagaaaaaggaaggtcaaggcattccaaaactgaaacatactctgcagaacaactgcaaagtgctctcgctgagtaccaagaagatgcagcgctgttcatatttcgcttaaaatcattgaggcaagggcaattccatagccttttaacacaggcttctcgccatcatgctgctcagttaagctttttcaggagagggctgaagtgtcttgaggcactcgaaccccatgtaaaagctatagctgagagacagcacattgactaccagttcagtggtcttgaggatgatgaatctgacaatgatgattacagctccgaccaggatgattgcagcgaagacggagagcttagtttcgactatgaaataaatgacaaggaccaagattttcttgcttcaggaggttcgatggatttagataaaagagatgtgaagaattccccgcagccagtaaaagaaagcatgcaggaagaggtcaaacaaaccaagggaaatgttttgactccacgagtgaagccagagttgaatgcacactcaggcaatttacaggatccatctgagagattatggcaaatgaagccatcttcagccaagcattcgtacaaacttccaatgccagttgatgacaagcaggatcccagaccagtaggtgctcccagatcacatcattcccagcagttggaaagtaagcctcgtgtctcgatgaatccgtggcactcatctccactgacgaaagacttcaggccgggtggccatgtgaaaacggtatcgagtacggaggcgacatcgacgttctcccagtcggtttctggctacaagaagacgaagagggagtcttggtctggtccaataccaagcagaccagggctaagcaagccatcttctctgaacggccacaggtcaccacccatggcacatcttgtgacgccaggaaatctacagtgccactctcggcagccatccgtgtccccaaaagtctcccccaagatgctgccacatccaacgagatcaccaacgatcagtgagctgcatgagctgcctaggcctccagcaaacgtggagtccctcaggccttctggtttgatcggttactctggtcctctggtacccaagcgtcagactgaaatgcctgcagcatcacaaaccccctcgccacttccgctgccgcccgctaccctcactcgcagctattccataccctcgaatagccagaggataccaatcatcactgtggacagactgttggaggctagaaatagcagggacggcagtgacaacttcttccccaccacttactccgttgtcactggctgatttgtcccaacagcaaggaacaaaaacaagtacaagtcgcacaaggataaagggagccttgtgacagagagcaaccaaatgcagactaatcttagttgattttgcaagtagt

SEQ ID NO: 39981 - DNA, 1168 bp, Zea Mays
gattcgatatggggcccatgctagactgtgagaggatcgttgtgtcaagctactgtggcacctcatcctgctctaccatgcccatgaccccctatgccatctctagcctgccatggtacaacgccgctgttagatccagtctccaacccgccatggcttcgcgtgtgctcgcgtttgtcgtcgagctgttgaacccgtcctcccttgctcgtgacttcatcgtcgccagagtccttactgtattcgtgtcctcgcccgctcgctgtagacttcaatcgaaggtcgtcgtcgttccgtgcgtcgtcaagaaatctcaagtgttgggtgaagacgaagctagcagcgtgatattcaccaagtgctcaacaaaaagctcgaacaagtcgtcaattttgtgggtttaagtcggatttaatggacggtacgtgaattaattgcgtgatacggagaaccagagccaagtcgaccccaagcgcgggctactccgcatgatgatgctgatggatgaatctgaagatggataattgaacgagtaccaagacaaaggatgatcgtcaagtggacttcgcctaacaaacactaatctagtgttattcatgcaagccccggtgcatttgccacctcttgatgttttaaaatatttatcaccttgtttgatgagttaggtgataggagttgtctgctaaaccgttgatgcatttccttccttgaaaattgattacccttccttgatacccattttgaaaagaattttatgatgcttagccttgctttagcaaacaaaaatattttgttttaaaacaaaagtgatgcttcaatgggtgggatgttttcgaaaataaaacttgatggtggatccatcacgaccatgatgggttcaacatcagaaaagatgtacctctgccaggtaccagactttgggtttgaaatgataaagctgagaccgggcggttgacttgcacgagaagggagtctcggtgtagtgtctccgtctgagtcgattaaggaccgtctcgatgtaggcttgatgatcgaggaccttttaactggtcacacgcctcatcatgggtaagctttgcctcgggcagactaataccagaataagacaacacgcaatgtcagtggagagatggcgagagtagcgtgtgccctccatggcaagaggctg

SEQ ID NO: 39982 - DNA, 270 bp, Zea Mays
atgcatgggtggatgtcacgtttctgttcgcttaattgccccctagctgttcccagtaaccgaatccaggctcccctgcccaatctctgcacgccgcttgtcacgccaattttcaccccacatcttcgcctcagccaccatgcgctctcggtcgccccacatcttagcctcggccaccatgcgctcccggtcgccccacatcttcgcctcggccaccatgcgctcccggtcaaggtccttgttcaggatcgctgggaggtccctgggtga

SEQ ID NO: 39983 - DNA, 1759 bp, Zea Mays
caattttcatcctggtgttccagtccaaggcctctttatcaagaggtagatctacatcaagtagaaccatttgggtcaaatgagagatcaacaggtcaaaacaaaatgaactcaccgtttggaggaatatcttatatatttatttatttgaaggaagaaagctaagacattgtagtacactatcacatataaccataatatacagaagacaatcattcagacattaagttcataaagtaagagacactggtcaatttataaattctgacatagcaattgataaagtgaaggagaattagttcaaagaatgcaaaactatgacagcaacaaactaattttgaaaggatcaaatggtacacattttgagcataataaaatctaaaaagtaccaaggccttaagcaacgttcaccaaaacactagtgtccaggttcatagcatttacttcaacaattcagcatttatttgggctacacggccacttaaacttattggaaataatctagtgtctaggtgcatgctagtgtctaggttcaaagcatttacttctaaatttcagcatggaaataataggctgattagttgggtaatattttgcattaattaggaggatatcacagcttgatttgtacctcacgtttggctatattagaagagaaaaacaaaaaaggctaagtgatgccacacaccaaatccacttgtgctcgtgtgcgttctttgcatgttagttactgggtgtcctgttagaggcatatgtgcctctcaatacttttttacatggtcgattaaatgggacaaacggcaaaataaactgatacggctggtcatcatgtggcgtttaaatggcatgtaaacggactacacggccttttacagcaacactggccttaagagagttcaaatagtaggaactcagcctagcttagttggtgggggagctggttcaagtcatcttcaatttacagtggcaacaacctcctcctaggttgggtaaaattcatttacaagtttaaacccaagcacaaaataagatattccggcaagatcatttattcaattggttccagcattttgtaaacatttaaaggtaaactttgggtagaatgcacaaaaaattaattggttgcaatattgtttcaaccacagtgcaaaaagaaaaaggaaaagaaacatctaacttatatatcataaccaatgtcctaactacaccaaatgaacagtaagtaatttgtgtttgattacattaacaacagttaaaatgtgaggcaactataacggaaggatgataaactaccaaagaatgtgtaagtgcctctagatgagttgggttgggagcatctccaagagctaccagaaaatgactccctaaaagtcagttttaagggccaccttaaaaattattggggggtagattttaactcttcagtcttcaggtcctaaattcgactccccgtgggagcgaatttcaggctgggtttaaacaaatatcctcgtcatgtgggctatggtgtcgctcattgtttttaaggccgtaaggtgactgaccagccagcccagccagtctacaaatcagcccaactagcccattaaaattaggttaagcccactccctctctccctctatctccaactgcctcgctctcctagcagtctccctcctcccagccgcctctccctgctctctccccacttcaacctctctcctgtgctgccgtcgccacgccactgcagagcaatcgtgccgccgcaggctgccgcgc

SEQ ID NO: 39984 - DNA, 324 bp, Zea Mays
atccagtccacccacccaccccaaaccgtggaacacgtagctcagcgcggagcacgtcgcgcacctgctgagagcttctcgacgcgcggagccgccatgggcgcctgctgcaggtccgggtaccccctgtccccgtgccggccgatgctgacgccggcgcctgtgccgtttccgtacgccgcgacggcagaggacgtgccgccgtacccaccggcgccaccgaatttggggttaagctgctcatctgccggggagtcgaagcacgggaagcagcccatcgccggccaggaagaaacaccaggtcgccgcgctacttaaaggtgc

SEQ ID NO: 39985 - DNA, 1060 bp, Zea Mays
cttcactttgttaaccattttttatggggcgggacaaggagggtgtttgttataatctgtctagattacctaatttaataaattttgaattaagtattagtttaaaatttattggattatataatctaggtatgttataatcttaaatcaacactctaaaatatatgtatggtcatttcggctcaacttgtttcaattttgtcacaagctaaactaacatctaagctcaatttattaatgaaccgagatcaaaccagatcattagctcgattgggctacatttgtcaagaaaacaaagtcttcacttatgttgaatgaactagtacataataaattatgttaatttggtgttggatttgtttgggacttgttttcaaatgctatgaattaagaacaagacaacccagaatgttaaatgttaatgtccttcgtccttcgaaacattatctcatttaggatataatgattttcagacgaaggtcatgaagggcatactttcatcatcgtagtatgtgttaataagtgaagaagtatatgaaacataaaagacaacatgaacgatcacataacattatcaattcatcctcattatatttgttgggggcttcgtcctccgaaggtcctcaaaaacgtgatttaacaatatctttcaagtgtgacatatgaataggtaccttcggactcgggctaaaagcatgaacgatgtaaagaacatgatcgtgacgaaggttggaattgctccgaagctacacgcaagggagcttcggctaaatggcggaaaaaggaaccgacttaaaggggaaaaggctatctagtccttatagaattgtatataagtcaataataagtgtaaagggcatgtatgtaatttctcacaggccgcgtcctgtgcctataatagatgaacagtacccccgtactgttcacgctgacctgtacttgctcgtgcgtcacgcttgtacttttaccttctgtcaagtcgaaggtacatatgtcattcaatattgtctttactttttcatgataatataatgagatgagaatgaattgataatgttat

SEQ ID NO: 39986 - DNA, 1826 bp, Zea Mays
ctgtatcctaaatccaccgctctctaggagatttttctccttcacgtctccgtatgcctcatctctctagtcgatgtctttatcctattatcttctagctgattttcccttatcctcatttccttggccaccgtcgaagctccctggctgcatcgcttctctgcctccccaagcggatgtgccatctctcagtcgtcgtgctcgtcggagccagcctccaccaccgaccacagctaactggtgctcgcctgccacacctccccatacttgaactccatggtcgttagctccggcctgccatggcgcttgccccagcaactcgcgctcgactccatgtccaggtcccctcatcgcctcgccctcgctctcactagtgaccgagcggccgccctggtgtctttcccaagccacctcgccatgcgctgccgcagggttcagctcagccctggtgtctttcccaagccacctcgctctcactatggatgacttgatcaagtgtcaggatttttgaggctcaccaagcggacatcatctaaccacactaacctagtgttattgcaggcaagcttcggtgcatttgccacctccttctgttttaaaaagttttatcaccttgaatgatgtattaggtgataggagttgtgtgatcaaatagttgatgcatttccttccttgattaaacaaccctaatacccgttttatgaaaatttagtgatgcttagccctgcttattaatttaggattgtttttaaaagatgatgtgtaacacgggatatgggagtttgtgaaataaaataacttgtgatgatgaagccattgtggccgcgataatttcatcattcaagtagggtacctctctgaggtatcaagttttaggaaataatatgtaatgtagaccagacgttgagcaggaaagttcgctcgtctgtgtcgattaaggaccgttcgatgtaggcctgttgtggtggagactttgtaactagccacattctccggtaagcctgaacctggctattccatacgtgaaaagacaatcgcgcactgggcgtgggagatggtggtagtagcgtgtaccctcttggctagaggctggaccgaggagtaccatgctcccgggtagcgcgggccggttcacgttgtggaggatctgtgggaacggttgacatatgcaagggttaagtgctacatatgtcgtgtggttagggatccccagctaggtataattggttcgaatcgtcgttgctcctcggtcatggagactctaccacccgaccactcatcgtagttaataagtaaaataagagtttggtaaaagaaagctagaccaggacaagtgaatgctctagattaggcaaatctagattcaaaaaaactacttaaccgataaagtaaaagtttggcataaggatctactactagtaagcttttctgccaaaacgagtctttgaaacttgattagccttaccttgaatccttttaaaaccagcatacccttgagagtcttttctttagttgggtaagtcttgctgagtacttgcgtacttaggttttattcccattgttgctgcaggttacgagtcactttgattgtgattgttgttaagttccggtgagctcggccttcttatataagtatatcccatccttagcttatgtattgaggattgtcacttaagctagcatgtattttcaaagttacaaatattttataatacttcaaattgtaattcttttgaaccattttttaatcactccgatgatgtataatgaaatcttgatgtaacttgtaatcattttgtaataaagaatttatttccgctgcaagt

SEQ ID NO: 39987 - DNA, 787 bp, Zea Mays
aaatgcatttcgaaataaataaaaaaaaccctccctaaccctaacgcccactagaggtccatctacctaacactagcagccgcgctccctgcttctctcccagccgccgccgactctatctctcccttccctctcaccacctcctcgtcatcctcagcgtgcacgctgcgcgtggccgtagtggggggtggccccgcggcgcgtcggctgccgaggcgctggcctcgccgagggcccggatgcagtaaagaagtctacataattgccaagaatcatcttcatccatggggatccggtaaagcagcagccccttggctgggtaacctactgtgaagcatcaggatgcaaacatgtccagtgacactgatatgagtaaggtgtttgaagacagaacgtttgtgtcatctatccttaattcgcttcctggtgttgatcccaatgatccatctattaaagatttgctggcatcattgcacagccagggagaggaagagaagaaggaagacaagttagacaaaacagaagacgagaagaactgcttcaagctggagtgatgtcgctgtggtgcttttgtgactgatcatctctggagcttttgtgaatgatctagctagctatctgtaattgatctagttgtgaatgatattataattgtgatacttttgtgaatatataattgtggtgcttttgtgtttatgtgatggatctatgactgtggtatactgattaattgtgtatgtctttatgattcgtgtataaaaatctgtgatttgtggtgcttaattaa

SEQ ID NO: 39988 - DNA, 941 bp, Zea Mays
aaatgcatttcgaaataaataaaaaaaaccctccctaaccctaacgcccactagaggtccatctacctaacactagcagccgcgctccctgcttctctcccagccgccgccgactctatctctcccttccctctcaccacctcctcgtcatcctcagcgtgcacgctgcgcgtggccgtagtggggggtggccccgcggcgcgtcggctgccgaggcgctggcctcgccgagggcccggatgcagtaaagaagtctacataattgccaagaatcatcttcatccatggggatccggtaaagcagcagccccttggctgggtaacctactgtgaagcatcaggtcagcagtgaaggagatctgagttcgaagcaaatttgccgcgaattctctccggaaatcattcgagtggctggattttgaagcgcagccatgggatcggaggattttgtctgtaaaatgatgtgattcggcggctcttcaaatgtctgtccaggatgcaaacatgtccagtgacactgatatgagtaaggtgtttgaagacagaacgtttgtgtcatctatccttaattcgcttcctggtgttgatcccaatgatccatctattaaagatttgctggcatcattgcacagccagggagaggaagagaagaaggaagacaagttagacaaaacagaagacgagaagaactgcttcaagctggagtgatgtcgctgtggtgcttttgtgactgatcatctctggagcttttgtgaatgatctagctagctatctgtaattgatctagttgtgaatgatattataattgtgatacttttgtgaatatataattgtggtgcttttgtgtttatgtgatggatctatgactgtggtatactgattaattgtgtatgtctttatgattcgtgtataaaaatctgtgatttgtggtgcttaattaa

SEQ ID NO: 39989 - DNA, 789 bp, Zea Mays
aaatgcatttcgaaataaataaaaaaaaccctccctaaccctaacgcccactagaggtccatctacctaacactagcagccgcgctccctgcttctctcccagccgccgccgactctatctctcccttccctctcaccacctcctcgtcatcctcagcgtgcacgctgcgcgtggccgtagtggggggtggccccgcggcgcgtcggctgccgaggcgctggcctcgccgagggcccggatgcagtaaagaagtctacataattgccaagaatcatcttcatccatggggatccggtaaagcagcagccccttggctgggtaacctactgtgaagcatcagaggatgcaaacatgtccagtgacactgatatgagtaaggtgtttgaagacagaacgtttgtgtcatctatccttaattcgcttcctggtgttgatcccaatgatccatctattaaagatttgctggcatcattgcacagccagggagaggaagagaagaaggaagacaagttagacaaaacagaagacgagaagaactgcttcaagctggagtgatgtcgctgtggtgcttttgtgactgatcatctctggagcttttgtgaatgatctagctagctatctgtaattgatctagttgtgaatgatattataattgtgatacttttgtgaatatataattgtggtgcttttgtgtttatgtgatggatctatgactgtggtatactgattaattgtgtatgtctttatgattcgtgtataaaaatctgtgatttgtggtgcttaattaa

SEQ ID NO: 39990 - DNA, 2049 bp, Zea Mays
atcacgaattccgttacgcctacctgcatcgtcccctccgtaagctcaagcgtacatatatacaacatgctagactagtcctcttctagtcaccttaccccgtcgcttgcatctccccgccgccgccacgcgcccacgcttccttccgaacaaagctgtcgtgctgcctttcttgccgtccaactcaggcagccgtcctagtcctcgttggtcctcatctgctgcccttctacggtggaggagagaagaggagaggagcggagcggagatccagccgctttccggctgctttcttcttctaattgcggagcaagttccgtcaatactgcttgtggtgttgcgccaatttaagttcctgctgtccgcaaaaggagagcttccgcagctcctatggcaaagcctcccaatagcattggccgtagcagcatgccaagatcgaatgagggtttgaggctcatattttcggcagttataggtatcatgctgggttacctgtttgggatctccttccctacagtcaacataaccaagcttcacttcccttcgagtatcatatcctatattgaagacaggaactctggcatcacaacccagacattgttgaaccatgcttgggcatctgcaaacaatcgtaaaaagaatagctctgaatctaacactgatgaaattcccaagatttatgttcctacaaacccaaaaggtgctgagagacttccaccaggcattgtagtgtctgaaacagatctttatccccgaagactatggggtgatcctagtgaggaccttactagcgagccgaggtatcttgttacatttactgttggtattgggcaaaaggcaaatattgatgcagcagtcaaaaagttttcagacaaattcactattatgctgttccattatgatggtcggactactgagtgggatgaatttgagtggtctaaaagagcaatccatgtgagtgtcaggaagcaaacaaaatggtggtacgcaaaacgatttttgcatcccgacgttgttgccagatatgattacattttcatctgggatgaggatctaggtgtagaacatttcaatgcagagaagtacattgagcttgttcgaaagcatgggttggaaatctctcagcctggtttacaacctgataaaggactaacatggcaaatgactaaacggcgtggtgaccaagaagttcacaaagtaactgaggagagaccaggctggtgcactgatccacatctaccaccatgtgcagcatttgttgaaattatggcaacggtgttctctagaaatgcatggcgctgtgtatggcatatgattcagaatgacttggtccatggatggggtcttgactttgctcttaggaaatgtgtggagccggctcatgagaagattggagttgttgatgctcaatggattgttcatcaagcagttccttcacttgggaaccagggcaagtcagataatggaagagcaccatgggaaggggtaaggtaagagcacgctgcagaaaagaatgggggatatttcagacaaggctggctgatgcagagaaggcttattacttggagagaggcatcacgcccccgaattcaacagtagtttagatgaatacatgctcctcacatgccacggcaaggtttctgttgcgggaatctgctgcaaactggcatgttcatcgaagctgctgcaacccagggctacattaggggtcccacgaatcgccatgattgatcttagtgtcattcactttgttttaatgtcatttttttggttagtgagactagatgggatgtaagtaggagatataacagggactgtgatgacacccatttgtgtattgatgacctgatgcaatatggatgctgatagtccgtttctcagtaatcagtatgtaaattgtttgctgtataccagctgtgtgcaactgggtcaaatgatgtgttgtgctagtccatatgaagaaatatcaaggctagtttgggagcaaggaaactgaggggactaaaattttcttcctattcaaaattggatagggagattggaggggct

SEQ ID NO: 39991 - DNA, 1993 bp, Zea Mays
ctcaagcgtacatatatacaacatgctagactagtcctcttctagtcaccttaccccgtcgcttgcatctccccgccgccgccacgcgcccacgcttccttccgaacaaagctgtcgtgctgcctttcttgccgtccaactcaggcagccgtcctagtcctcgttggtcctcatctgctgcccttctacggtggaggagagaagaggagaggagcggagcggagatccagccgctttccggctgctttcttcttctaattgcggagcaagttccgtcaatactgcttgtggtgttgcgccaatttaagttcctgctgtccgcaaaaggagagcttccgcagctcctatggcaaagcctcccaatagcattggccgtagcagcatgccaagatcgaatgagggtttgaggctcatattttcggcagttataggtatcatgctgggttacctgtttgggatctccttccctacagtcaacataaccaagcttcacttcccttcgagtatcatatcctatattgaagacaggaactctggcatcacaacccagacattgttgaaccatgcttgggcatctgcaaacaatcgtaaaaagaatagctctgaatctaacactgatgaaattcccaagatttatgttcctacaaacccaaaaggtgctgagagacttccaccaggcattgtagtgtctgaaacagatctttatccccgaagactatggggtgatcctagtgaggaccttactagcgagccgaggtatcttgttacatttactgttggtattgggcaaaaggcaaatattgatgcagcagtcaaaaagacaaattcactattatgctgttccattatgatggtcggactactgagtgggatgaatttgagtggtctaaaagagcaatccatgtgagtgtcaggaagcaaacaaaatggtggtacgcaaaacgatttttgcatcccgacgttgttgccagatatgattacattttcatctgggatgaggatctaggtgtagaacatttcaatgcagagaagtacattgagcttgttcgaaagcatgggttggaaatctctcagcctggtttacaacctgataaaggactaacatggcaaatgactaaacggcgtggtgaccaagaagttcacaaagtaactgaggagagaccaggctggtgcactgatccacatctaccaccatgtgcagcatttgttgaaattatggcaacggtgttctctagaaatgcatggcgctgtgtatggcatatgattcagaatgacttggtccatggatggggtcttgactttgctcttaggaaatgtgtggagccggctcatgagaagattggagttgttgatgctcaatggattgttcatcaagcagttccttcacttgggaaccagggcaagtcagataatggaagagcaccatgggaaggggtaagagcacgctgcagaaaagaatgggggatatttcagacaaggctggctgatgcagagaaggcttattacttggagagaggcatcacgcccccgaattcaacagtagtttagatgaatacatgctcctcacatgccacggcaaggtttctgttgcgggaatctgctgcaaactggcatgttcatcgaagctgctgcaacccagggctacattaggggtcccacgaatcgccatgattgatcttagtgtcattcactttgttttaatgtcatttttttggttagtgagactagatgggatgtaagtaggagatataacagggactgtgatgacacccatttgtgtattgatgacctgatgcaatatggatgctgatagtccgtttctcagtaatcagtatgtaaattgtttgctgtataccagctgtgtgcaactgggtcaaatgatgtgttgtgctagtccatatgaagaaatatcaaggctagtttgggagcaaggaaactgaggggactaaaattttcttcctattcaaaattggatagggagattggaggggct

SEQ ID NO: 39992 - DNA, 2184 bp, Zea Mays
aacatgctagactagtcctcttctagtcaccttaccccgtcgcttgcatctccccgccgccgccacgcgcccacgcttccttccgaacaaagctgtcgtgctgcctttcttgccgtccaactcaggcagccgtcctagtcctcgttggtcctcatctgctgcccttctacggtggaggagagaagaggagaggagcggagcggagatccagccgctttccggctgctttcttcttctaattgcggagcaagttccgtcaatactgcttgtggtgttgcgccaatttaagttcctgctgtccgcaaaaggagagcttccgcagctcctatggcaaagcctcccaatagcattggccgtagcagcatgccaagatcgaatgagggtttgaggctcatattttcggcagttataggtatcatgctgggttacctgtttgggatctccttccctacagtcaacataaccaagcttcacttcccttcgagtatcatatcctatattgaagacaggaactctggcatcacaacccagacattgttgaaccatgcttgggcatctgcaaacaatcgtaaaaagaatagctctgaatctaacactgatgaaattcccaagatttatgttcctacaaacccaaaaggtgctgagagacttccaccaggcattgtagtgtctgaaacagatctttatccccgaagactatggggtgatcctagtgaggaccttactagcgagccgaggtatcttgttacatttactgttggtattgggcaaaaggcaaatattgatgcagcagtcaaaaagttttcagacaaattcactattatgctgttccattatgatggtcggactactgagtgggatgaatttgagtggtctaaaagagcaatccatgtgagtgtcaggaagcaaacaaaatggtggtacgcaaaacgatttttgcatcccgacgttgttgccagatatgattacattttcatctgggatgaggatctaggtgtagaacatttcaatgcagagaagtacattgagcttgttcgaaagcatgggttggaaatctctcagcctggtttacaacctgataaaggactaacatggcaaatgactaaacggcgtggtgaccaagaagttcacaaagtaactgaggagagaccaggctggtgcactgatccacatctaccaccatgtgcagcatttgttgaaattatggcaacggtgttctctagaaatgcatggcgctgtgtatggcatatgattcagaatgacttggtccatggatggggtcttgactttgctcttaggaaatgtgtggaggtattccctgccattatcatgcataatacttcacctccccatttctttgctaatccaaggactagccacacagttcataccttccctctcacaagagagcacatagcagcatcaacagttatatgattaccatctttattaatgtgatttcgactttagagctatatgcactactctcttttactctctatttaattatatagccggctcatgagaagattggagttgttgatgctcaatggattgttcatcaagcagttccttcacttgggaaccagggcaagtcagataatggaagagcaccatgggaaggggtaagagcacgctgcagaaaagaatgggggatatttcagacaaggctggctgatgcagagaaggcttattacttggagagaggcatcacgcccccgaattcaacagtagtttagatgaatacatgctcctcacatgccacggcaaggtttctgttgcgggaatctgctgcaaactggcatgttcatcgaagctgctgcaacccagggctacattaggggtcccacgaatcgccatgattgatcttagtgtcattcactttgttttaatgtcatttttttggttagtgagactagatgggatgtaagtaggagatataacagggactgtgatgacacccatttgtgtattgatgacctgatgcaatatggatgctgatagtccgtttctcagtaatcagtatgtaaattgtttgctgtataccagctgtgtgcaactgggtcaaatgatgtgttgtgctagtccatatgaagaaatatcaaggctagtttgggagcaaggaaactgaggggactaaaattttcttcctattcaaaattggatagggagattggaggggct

SEQ ID NO: 39993 - DNA, 2164 bp, Zea Mays
ctcttctagtcaccttaccccgtcgcttgcatctccccgccgccgccacgcgcccacgcttccttccgaacaaagctgtcgtgctgcctttcttgccgtccaactcaggcagccgtcctagtcctcgttggtcctcatctgctgcccttctacggtggaggagagaagaggagaggagcggagcggagatccagccgctttccggctgctttcttcttctaattgcggagcaagttccgtcaatactgcttgtggtgttgcgccaatttaagttcctgctgtccgcaaaaggagagcttccgcagctcctatggcaaagcctcccaatagcattggccgtagcatgccaagatcgaatgagggtttgaggctcatattttcggcagttataggtatcatgctgggttacctgtttgggatctccttccctacagtcaacataaccaagcttcacttcccttcgagtatcatatcctatattgaagacaggaactctggcatcacaacccagacattgttgaaccatgcttgggcatctgcaaacaatcgtaaaaagaatagctctgaatctaacactgatgaaattcccaagatttatgttcctacaaacccaaaaggtgctgagagacttccaccaggcattgtagtgtctgaaacagatctttatccccgaagactatggggtgatcctagtgaggaccttactagcgagccgaggtatcttgttacatttactgttggtattgggcaaaaggcaaatattgatgcagcagtcaaaaagttttcagacaaattcactattatgctgttccattatgatggtcggactactgagtgggatgaatttgagtggtctaaaagagcaatccatgtgagtgtcaggaagcaaacaaaatggtggtacgcaaaacgatttttgcatcccgacgttgttgccagatatgattacattttcatctgggatgaggatctaggtgtagaacatttcaatgcagagaagtacattgagcttgttcgaaagcatgggttggaaatctctcagcctggtttacaacctgataaaggactaacatggcaaatgactaaacggcgtggtgaccaagaagttcacaaagtaactgaggagagaccaggctggtgcactgatccacatctaccaccatgtgcagcatttgttgaaattatggcaacggtgttctctagaaatgcatggcgctgtgtatggcatatgattcagaatgacttggtccatggatggggtcttgactttgctcttaggaaatgtgtggaggtattccctgccattatcatgcataatacttcacctccccatttctttgctaatccaaggactagccacacagttcataccttccctctcacaagagagcacatagcagcatcaacagttatatgattaccatctttattaatgtgatttcgactttagagctatatgcactactctcttttactctctatttaattatatagccggctcatgagaagattggagttgttgatgctcaatggattgttcatcaagcagttccttcacttgggaaccagggcaagtcagataatggaagagcaccatgggaaggggtaagagcacgctgcagaaaagaatgggggatatttcagacaaggctggctgatgcagagaaggcttattacttggagagaggcatcacgcccccgaattcaacagtagtttagatgaatacatgctcctcacatgccacggcaaggtttctgttgcgggaatctgctgcaaactggcatgttcatcgaagctgctgcaacccagggctacattaggggtcccacgaatcgccatgattgatcttagtgtcattcactttgttttaatgtcatttttttggttagtgagactagatgggatgtaagtaggagatataacagggactgtgatgacacccatttgtgtattgatgacctgatgcaatatggatgctgatagtccgtttctcagtaatcagtatgtaaattgtttgctgtataccagctgtgtgcaactgggtcaaatgatgtgttgtgctagtccatatgaagaaatatcaaggctagtttgggagcaaggaaactgaggggactaaaattttcttcctattcaaaattggatagggagattggaggggct

SEQ ID NO: 39994 - DNA, 1946 bp, Zea Mays
cgtcgcttgcatctccccgccgccgccacgcgcccacgcttccttccgaacaaagctgtcgtgctgcctttcttgccgtccaactcaggcagccgtcctagtcctcgttggtcctcatctgctgcccttctacggtggaggagagaagaggagaggagcggagcggagatccagccgctttccggctgctttcttcttctaattgcggagcaagttccgtcaatactgcttgtggtgttgcgccaatttaagttcctgctgtccgcaaaaggagagcttccgcagctcctatggcaaagcctcccaatagcattggccgtagcatgccaagatcgaatgagggtttgaggctcatattttcggcagttataggtatcatgctgggttacctgtttgggatctccttccctacagtcaacataaccaagcttcacttcccttcgagtatcatatcctatattgaagacaggaactctggcatcacaacccagacattgttgaaccatgcttgggcatctgcaaacaatcgtaaaaagaatagctctgaatctaacactgatgaaattcccaagatttatgttcctacaaacccaaaaggtgctgagagacttccaccaggcattgtagtgtctgaaacagatctttatccccgaagactatggggtgatcctagtgaggaccttactagcgagccgaggtatcttgttacatttactgttggtattgggcaaaaggcaaatattgatgcagcagtcaaaaagttttcagacaaattcactattatgctgttccattatgatggtcggactactgagtgggatgaatttgagtggtctaaaagagcaatccatgtgagtgtcaggaagcaaacaaaatggtggtacgcaaaacgatttttgcatcccgacgttgttgccagatatgattacattttcatctgggatgaggatctaggtgtagaacatttcaatgcagagaagtacattgagcttgttcgaaagcatgggttggaaatctctcagcctggtttacaacctgataaaggactaacatggcaaatgactaaacggcgtggtgaccaagaagttcacaaagtaactgaggagagaccaggctggtgcactgatccacatctaccaccatgtgcagcatttgttgaaattatggcaacggtgttctctagaaatgcatggcgctgtgtatggcatatgattcagaatgacttggtccatggatggggtcttgactttgctcttaggaaatgtgtggagccggctcatgagaagattggagttgttgatgctcaatggattgttcatcaagcagttccttcacttgggaaccagggcaagtcagataatggaagagcaccatgggaaggggtaaggtaagagcacgctgcagaaaagaatgggggatatttcagacaaggctggctgatgcagagaaggcttattacttggagagaggcatcacgcccccgaattcaacagtagtttagatgaatacatgctcctcacatgccacggcaaggtttctgttgcgggaatctgctgcaaactggcatgttcatcgaagctgctgcaacccagggctacattaggggtcccacgaatcgccatgattgatcttagtgtcattcactttgttttaatgtcatttttttggttagtgagactagatgggatgtaagtaggagatataacagggactgtgatgacacccatttgtgtattgatgacctgatgcaatatggatgctgatagtccgtttctcagtaatcagtatgtaaattgtttgctgtataccagctgtgtgcaactgggtcaaatgatgtgttgtgctagtccatatgaagaaatatcaaggctagtttgggagcaaggaaactgaggggactaaaattttcttcctattcaaaattggatagggagattggaggggct

SEQ ID NO: 39995 - DNA, 1775 bp, Zea Mays
aatctttccttgccacccaattcaaattcaatctttgctcggagcaagttccgtcaatactgcttgtggtgttgcgccaatttaagttcctgctgtccgcaaaaggagagcttccgcagctcctatggcaaagcctcccaatagcattggccgtagcatgccaagatcgaatgagggtttgaggctcatattttcggcagttataggtatcatgctgggttacctgtttgggatctccttccctacagtcaacataaccaagcttcacttcccttcgagtatcatatcctatattgaagacaggaactctggcatcacaacccagacattgttgaaccatgcttgggcatctgcaaacaatcgtaaaaagaatagctctgaatctaacactgatgaaattcccaagatttatgttcctacaaacccaaaaggtgctgagagacttccaccaggcattgtagtgtctgaaacagatctttatccccgaagactatggggtgatcctagtgaggaccttactagcgagccgaggtatcttgttacatttactgttggtattgggcaaaaggcaaatattgatgcagcagtcaaaaagttttcagacaaattcactattatgctgttccattatgatggtcggactactgagtgggatgaatttgagtggtctaaaagagcaatccatgtgagtgtcaggaagcaaacaaaatggtggtacgcaaaacgatttttgcatcccgacgttgttgccagatatgattacattttcatctgggatgaggatctaggtgtagaacatttcaatgcagagaagtacattgagcttgttcgaaagcatgggttggaaatctctcagcctggtttacaacctgataaaggactaacatggcaaatgactaaacggcgtggtgaccaagaagttcacaaagtaactgaggagagaccaggctggtgcactgatccacatctaccaccatgtgcagcatttgttgaaattatggcaacggtgttctctagaaatgcatggcgctgtgtatggcatatgattcagaatgacttggtccatggatggggtcttgactttgctcttaggaaatgtgtggagccggctcatgagaagattggagttgttgatgctcaatggattgttcatcaagcagttccttcacttgggaaccagggcaagtcagataatggaagagcaccatgggaaggggtaagagcacgctgcagaaaagaatgggggatatttcagacaaggctggctgatgcagagaaggcttattacttggagagaggcatcacgcccccgaattcaacagtagtttagatgaatacatgctcctcacatgccacggcaaggtttctgttgcgggaatctgctgcaaactggcatgttcatcgaagctgctgcaacccagggctacattaggggtcccacgaatcgccatgattgatcttagtgtcattcactttgttttaatgtcatttttttggttagtgagactagatgggatgtaagtaggagatataacagggactgtgatgacacccatttgtgtattgatgacctgatgcaatatggatgctgatagtccgtttctcagtaatcagtatgtaaattgtttgctgtataccagctgtgtgcaactgggtcaaatgatgtgttgtgctagtccatatgaagaaatatcaaggctagtttgggagcaaggaaactgaggggactaaaattttcttcctattcaaaattggatagggagattggaggggct

SEQ ID NO: 39996 - DNA, 743 bp, Zea Mays
ctgcgtgttcatcgaatattcgccccgatttcattaggggtccaaataaagctgctatgttatttggagtactcatacaaatggttttagcacatggggaattcgaggtaccttgctaaaatactccataagcgcatacgtacagagcgcttgacaacgcgccgccagacagagctctgtcgcgtccgcgtgcctgccttcctgttccggcgaccgttcaggcgacggagacgaggcgacgtgagcagagggagcagtagaagcggcgtcggatgcggaagcagagcggaacgaagcagagccgcggcgtgctctccacgtcggccgctaccaccacgccgccgcagtacgggcaccgcccgggcacctgaaagcttcggctttaggatgaaggcgtgtaatatgaggatacaacccgaaggtaacatggatgaacgccgaagctatggttaaaggagcttcgacttggcatgttaacgaagatgaaggacgaaaccgacctaagggagaaaagactacttagtccttgatagtttgcattatgattaagtgtagatatcaggggcatgggtgtaatcttatccaggctgcgtccagtgcctataaatagatgaacagtaacaccgtactgttcacgctgagctgtaatcgcacttgtgtcactcttgcattttcaccttctgacaagtcgaaggtaccaatgtaatataagtaatatgaatatttactcatatttatgaaat

SEQ ID NO: 39997 - DNA, 5730 bp, Zea Mays
atcatttgccgcacctttgctagtgcggacacacgctggcgcttggcctccagtatctctttctgcctctggagattgcggttcttgaggcgcagggcgcgcagctgtagctgttcttctgttgagacgccgaggacctcgccgtcctcggtgagatccgcgccttccagtggggcgaagcctgggggcggctgcgattgtccttcgggcccgcaggtgcggaaggtgtcgtcttcgcaggtgcgggcaacattgtcttcagtgggctcttggtgggtggattgggtgaggacgagggccttgccctttcttgcggcaagcagtgctgccttcgcagcctcgtcagccttcgggttagctctcttgggtgccatcgtgggtggttttgtcgtagcacgaacggtgggcgccaaatgttggaacttgctatcagtcgcaagaaagccaacaggggtgaacagtgtggacagtagggttacgcgtgagatggcaaatagctctatcaaccaggcctctcacgggcactgtgcgggggtatttataggtacctgaacgcccagcgccttgtgttaaggacgcatgtgccctcagctaccttggttatccccagaatattcccataaagcagggttacagactgtaattacagggatgcttttacaaattaggcccgtaacaagcggcggccacacagggcccgttacaatgggccggatcgcacgtgggcctctgagctggacgaggccgcactgtgggatgccttcgtcgccggtcttcgtctggtgccgatcaagcgaagggtgtccctgcctgctttgtctctgtcagagcagcggctaagcagcggagacttcgagcgaagggtggcgtttctgccttcgctccaacacaaagtaacatgttttcttcctttactaccagcaacctgatacttagcattagcagcagcaatgttttggtgtgtttgttcatggaggtcactcatttgttcaacatgtgcaacagcctcgatatgtggggcatcctcagcatcaatagaaaacaaatcaataggtgtccgaggaatgtaaccataaacaatctgaaaggggcacatctttgtagaagaatgtgttgcacgattataagcaaattcaatatgaagcaagcagtcctccccacgtctcaaatttttgtctaaaacagccctaagcatggttgataaagttctattcaccacatcagtttgcctatcagtttgagggtgacaagttgtactaaacagcaatttagttcccaatttattccaaagagatctccaaaaatgactgagaaacttagcatcacgatcagagactattgtattcggaataccatgcaaacgaataatctctcgaaagaacaattcagcaaccttgctagcatcatcagttttatgacagggtataaaatgagccattttggagaatctatcaacaaccacaaaaatgctatctctccccttcttagttctaggcaaacccaaaacgaagtccatagaaatatcaagccaagggaacgtagggataggcaaaggcatatacaaaccatggttgctcaatcgtgacttggctttctgacaagtagtgcagcgtgcaacaaggcgctcgacatcacggcgcatctggggccaaaagaagtgtgcggccagcacctcgtacgtcttgtagacggcaaagtgtcccatgagaccacctccatgcgcttcctataacaacaaaagatgaaccgagcttgctggaatacacagcttgttagcgcgaaacaggaacccatcctgcatgtggaaatggccccatggtctgccatgcatgcaatgtattaaaacatctttaaaatcagcatcgctgacatattgatccttcacagtttgaaagccaaaaactttaaaatcttattgtgaaagcatggtatatctacgagacaacgcatcagcaatgacattttcctttctgttcttgtgtttaataatgtaagggaaagactcgatgaattctacccaattagcatgacgacggtttagatttgtttgggtacgaatatgtttcaaagcctcatgatcagaatgaattataaactcgcgatgccaaatatagtgctgccatgtttgcaaagtgcaaactaaagcataaagctccttatcataagtagaatatctcaggctagcaccgcttaatttttcactaaaataagcaaccgactttccatcttgcaacaaaacagcacctagtccaataccgctagcatcacattcaagctcaaacactttattaaaatcaggcaattgcaagaggggagcatgtgttaacttatctttcaaagtgttgaacgctacctcctgcgagtcgccccaagcaaacggcacacctttctttgtaagctcatgtagaggggctgcaatggagctaaaatcacggacgaacctgcggtagaagcatgcaagtccaagaaaactctgaatctgtgtgaccgtcgtcggtgtaggccagtcccgaatggcaacaatcttgctactatccacctctatgccctatggagtaacaacataaccaagaaacgagacacgttgtgtgcaaaagatgcatttgtccacgttaccaaataagcaggcagcacgcaacgcatcaaaaacagcactcaaatgttcgaaatgctcttccatagtcttgctgtaaataagaatatcatcaaaatagacaacgacaaacaatcctatgaagggccttagaacttcgttcatcaaacgcataaaggtgcttggagcattagtcaatccaaacggcataaccaaccattcatataacccaaacttcgttttaaaagccattttccattcatcacccagtttcattcgaatctgatggtatccactacgcaaatcaatcttagtgaaaataatggcaccactaagctcatctagcatatcatcaaggcgtggtataggatatcgataacgaattgtgatgttattaatagcgcgacagtcgacacacatacaccatgacccatctttctttggaacaagtaaaacaggaactgagcaaggactaagagattcacaaatgtaacctttatcaagcaaacgcctgcacctggcgccggatctcctttgtctcatccggattcgtacggtacggggcgcggtttggaagctaggcaccggggatgaggtcgatctggtgttcaatgccacgaagcgggggaagacccggtggctagtccatagggaaaacattagcgtactcctgcaaaaggttagaaacagcaaggggaatatccaaaggcggggcatcatcaaatgaaacgagcatactagaacatacaagtgcaatgcagggcaagtgagtatcatgtaggtcatcaaaatcagcacgtgtagcaagtaaaacaggagcatgcaacttgatttcagcattaacaggggtggatggcttaggtgcatgttgctttgcagtttttgtagcccgagcaagatcatcttttataatttggtcaggggtcatgggatggataattattttctgacccttaaacatgaaagaataatgattcgaacgaccatgatgtaaactatcagtatcatatttccacggtctaccaagtaacaaagagcatgcttccataggaataacatcgcaatcagcataatcagaataagagcccaaggaaaagggaacacgtaccgaacgtgtaactttgattttgccaccatcattaagccattgaatgtgatatgggttcgggtgcttacgagtgggcaaggataacttctctaccaaagttgtactcgccaaattgttgcagctgccactgtcgatgatgatgtgaatcgaccgttcttgtacaatgcctttagtatggaatagagtgtgtcgctgattgttctcaggttgggcaacatgtgtactaagaacacgttgtgcaacaagactctcatacctctcagcatcgccaggagcgacatgtacctcctcattatctgcatggtcagtggaaagcatagcatgtcgagtgtcttcagaatcactagcggaagagtactcaccattgtcacgtatgagtaaggtacgcttgctggggtagtcccgaattacgttcccaaatcctttgcaacgatggcactgaatatcccgtgtacatcctgtggaaggaacagcgcctgtagctgggggcgctgcaggtttggccgtcctctcgcgcggtgtagtgctagtggtggatggcgcgggaagagcaggagctgagttggatgtcaggctttgtcctgcaaaagagttagtatatgtcttgaatcggcgcccctacacttcacgttcagctttgcaagcatattcaaacaatgtggtcatatcaaaatattctttataatcaagtatatcctgaatttctcagttcaaaccaccgcgaaaacgtgccatagcagcgtcatcctattcaaacaaaccacaacgaatcatacccttttgtagttcctagtaatattcctaaacagattgttgaccttgctgaaaacgctgcattttattaagcaaatctcaggcataataggaaggcacaagactgtgtcgcatagcagcttttaattgagtccaagtggtgggagtggcagtgggatgtttttgtttatattcatgccaccaaattaaagcaaaatcagtaaattaactaatagtagctttaacttgagaagaagcatgaatatcatggcatgaaaatttctgttcgacctctaattcccaatcaagatatgcagcatgatcatatttgccattaaaagatggaatttaaatttaattttagcaaatgagtcattagatggtcgaagtaccatatggcgggcacgccctcggtgatctccatcttcctgctccatgtcaccgccataatccttctgcaactccgtgagcgtcgtagtcaacgcatcgagttgtgacacgatgtcgtcgagcgtggtcgtagtggtcgtctgagcgaggtctagctggtcgaaccgctcgttcaatgaagtgatcgatgaatcaagttgttcatgcatcgtcttcatgtccgcgtcaagtccatcaacttgtgtccgcacgtcccgcagctgtgcatccgtcgtgtcgtcatctcctgccatagttagcgcaaacacaaagcaaagcctatgacaacaagggtgtgggttaggcgctcacagtagtgctgttatcaaattcttatccgttcttaccaagcacacaggattgagctgcaaccaacaggtagaaccggcgaaagattggaggagcgattgcctggagaaacaaagtctgctcgtcatagaactatgtggagttctgggtaggctgcactcaaagcaaggattaacacaatcaaacaataatgcaaggttgaattatagtgccaaacacgtaatcaaagctgctggaaacaaagtgcaaagttggaccaagagtagggggcaaaggaaaatagaaaagaggagaacaagtagtagcgggtgggcaaccctaggcgtcctgcgtgacgcgcccacacaaggtaacctccggtttgtgtccccttttttcctttttttgttttttgtttcttttttcggagaaactcacaaattgattatatgggcaaaggaatacaaaagcaagttaccacacacactttttctgaaagggtaggggtattccggtaattaaaagatcaggattaggaaattaggaggcgagatctttt

SEQ ID NO: 39998 - DNA, 2665 bp, Zea Mays
aaacagagaaaccctaaacctagccctctgataccatgtgagaataggaacccatgcccctaaccagggatggggagtagtattaatagacttagtaactgggccaggcccattacagtgaggggtgagacggtaattacatggggaataccccaaaccctagaatcctagacgggtagtctaacacaatagagttggaattacatctcatttcaataccatggttgatttggtattgaactcaattcaatttcatgccctccaatatcgacatccaaacggagcattaaaataattctgagcatagatctacacgcaagagtccgttctccattgtttacacaaaagttccaagacatgtggttgatttattaaagctaccctcaagagagaattcaaggtcagcaacaatctttgctaacaactattctgatttgtttaaagaagttcatgacgtcctagaagcctcaaatcagaaatacaaacagctagcagacaagagaagaagaccaatgtcatttgaagttggtgatagggactaatggtgtatctcagaaaggagagactaccagcaggagttcatggaaaattaaggcaaagaaaatatgggccattttctattttgaagataagtgataatgcatatgtagttgatctgccaagagaaatgaatatttcaaatactttcaatgtggctgatatatcactctatcatccagaacaagcactttatgaagaaaactcgaggtctagtttcaatcaagtaggggagaatgatgagggacatcacatgcaaggttcatgaacatccaagtatcaaaactcaaactcaattttaatataaagaattagaagagaaatctgattttgctacaaagagtgagaagtcaacttgagtttgatctctaatacatatttcatgaaggttacctaaacatagaagatgatgtcactgcttaagtcattgtattactagaatatacttgcatctcctagaagttatatcctaaggtaatattgagttatacatgagttgtgtttgagttgttatctagttgtcaagtatgagagttatacatgagttgtatttgagttgttatctagttgtcaagtatgagttgtctaaggcttcaagtctataaatagaaacaatgccctctagttttgtaacttgacttgtatccaccactatatgaatggaacttgatgttcttctttagatcttggactagatctttgctttgagctttggattgagctctcgctgtctgtggattcagactagcctttagggctgtacctactagcacgttgaagctgttccttcaacattttgtgatatctacctatcagcaccttggagaggttcctccaatatagtgtgttgcaccactcacagttggagtggccttatgaagattaaggacctattcatcattaaaggcacctttcaagtacatgatgggtcccaagtgcgtttctgggaggagaattggctggagttgggggcgcttaaatttcgattccctcttctgtataacctagcaaggaggaagaattcaagtattcaacagttgcttttgtcttttcctcggtacccttaaggctgtctccagcaacgtcctctatattcatcctctatatttgtcttttacagtctcttctaaaagatttcatcctctatatctcatttctctccaacaacgtcctctaaatcacgtcctctatactcaaatatccatattaaagacattttaaaattttattttttgtacatacgtaattatcactctcaaatgtattgtacatattttagttttgctaaaccggttatttaaagtagtcaaatggatagaggaccgtttagagaaactctatatatagagaatccagcagtgtcctctaaatttagaggaccgtttaaaggacgttgctggagagcgtagaggaccatttaatcctctatatttagggtacagaaccctttagaggaccttgttggagccagcctaaacatatcctttcgtaggggtttggtacaccagttgcgggtccaatggtttcaactagtggcattggtggtgcatactaatttgaatactaatagagattcattcagatgggacctgactgctaacgaggtgtatactgttaagtccttgtaccaatcaattatgaacaatagagcgggagttaataacaaggatctctggaaactcaagaagtcaagatacttctgaatataaaagttttttgtagtacctcaaaagaggtgtaaccttaacaaaggataacttggctaagagaaattggcagggtaatcagagctgcagctgctgcttttgtagcagactggagacaataaatcacttgtttttcaggtgcacttatgcggctttcatttggcgtttggttcagattagcacaggattcagacctccccgggatgcaaatgaaatgtttgggtgtaagtagagggagtccctctgagggactctaacagtgtctaactctcatccagaggatgacactacgagctagggcaattttcgtttatttctcacacactactcaaatgtcatacccatctaagggttggagacacatatttatagccctagaggctgcactaccacactttctcacacacactacacaacaggat

SEQ ID NO: 39999 - DNA, 1192 bp, Zea Mays
gttcatgtgatgttcatgagcatgatgtatgtcttcagtatcatgtcaaagtcatgaaagaagtttcattgcctgctcctgcacctcctactaggactgcaccgcccaaaccagagaagcagtctcctgctcttgctcctgtcaaagatgtgctgccttttagttccaaccctgagaacggcaatatccaagagcctgaagatgacgcgcatgcaatctatgtgaggaatttacctctaaatgccactgaaactcaactggaggatgagttcaagaagtttggtaccatcaagcaaaatggcattcaagtcagaagcaataagatccaagggttctgttacggatttgttgagtttgaggattctacatctgtccagagtgctatagaggcttcccctgtgatgattggtggtcgtcaatgttacattgaggaaaagaggacacctggttcacgaggtcagtctatatacaaattgatacttaatcttatgcagtgtctatgccaatcatagttcttaaggcggtaaggtgagacaaggcgttgggccaccgcctggacgcctaggcgacgcctaggcgcttactaaggcgagcaaggcgacgccttaccaattaaacaaaagacagaacaacaacatatatgaggaagaaaaagaaaaagggagaaagaaaaaaaagaaggaaggggtagaaggagatggcccagcccaccaggcaggcaggcagcccatatatcctccggttagggttgctgagttgctcccatctcactgtcgccgctcgtccacaaccatgcatcgctgctcctgctcccccaagctcggcggcgctcccctgagtctcagcggcggcgcttccccgagctctgcaccgccgctcccccgagctctgcgccgccgctcgcccgagctcggcactccctgcgccgccgctcccccgagctcggcactctctgcgccgccgctccctcgatcccgctccccaaagtcgtctctgctaggcttcttccccctcccctcttgccgactcttggctaggcgacggggacgcctagactttttggccgcctggacgcctaggcgtcgcctaggcgacgcctttgaaaccatgatgccaattatatcattgaatcatatgaatctgatgactcactaaatgactgatgatcctgctgatcctaggagaatggaga

SEQ ID NO: 40000 - DNA, 1781 bp, Zea Mays
aagaagaaaagaaagtagcgtgtgggaggaaggagcgcgagaaggagatcctcgtcccctcccgcccccgtacgtctcccctccatcttccattcttccacatatccccacacaattgccgtctcgctccacattcccttcgcaccacctttcccctctctctctccctctctctccctctctcactcgctctttctccggggccgccattcctgctccgtccactcccaccacatgcggcggcgcgggcgcctccccgcggcgctgtggctcgttgtcgtgacgttggcggcgctggtggcgcgacctgcgtgtgcggcgtggtgcatcgcgcggagcgaggcctcggacaaggcgctgcagtcggcgctggactatgcgtgcggccccgcgaggggtgccgactgcgcgcccatccaggccagcggcctctgctacctgcccaacaccctcgccgcgcatgcctcttacgccttcaactccatcttccagcgctcccgcgccgcgccgggggcctgcgacttcgccggcaccgccaccgtcacggtcacggaccctagttatggatcatgcacctacccttcatctccaaggtaaatgcatcagaattttactagtatccatttgaagtagtgcagaaatgattcaggcagtgtggaagaaatggtcgtaaactgtaaactctattgctccttatggaactcccagataatgtgagttttatgactttggatatgctgcgtacagatctgtacgtgagtgtcttacgcatggagaatttgttaggttcttagattacactaaacaccatgagttcacatgatttttcttccactggagctgatttcatgcatctctgcttgcttcatgtaaacttcaccgtgccaaaaaaaatggtttgctggatggcacttagagaacgtttatacaaaagaggataagaaaatgaaggtattagagtatgcatcatgttttcatggctatatatttagtttcagttgagaccacattgctcgaacagctagttaggtagcttgaatgttacacattgtgaatgtaagtatgtaactgctgcactattgatctaaaaaatatactgcattacccgtggtgttacaaaaataaattttgaaaagtaaatgaagccttccaatgaagatttgattgctggctttgtctgtgctttagttttattaattaattaatctgatgaccacacataaatagtttgtgtagcttttacagtttagtatgctttatttatgtaccagaacttataccgcgtttctgaaacagggtcatattgatcatggaatcttgtttttcttttgaagattcatggtaattcttgtttgcagcactgccgggcaaacaggatcacctggttcaacgtccatgccagggactcccacgtccttgtcgccaaaaggcaccgggagcactggaggattaaatccacctgacgtcgattcgaccgactccaatgctaaacctctggcgaccacatccctcccatctcttgctctgtcctgtttcatgtatattttcttgcagttgtggtgatgcatggatgatctagttaggttcagtagagcattgagatgcagcattgttgcatcgtgatctaagagacaccacaacagttttgtttcagggaattggttggttggtggtagccgttgtaacctgccgttcaagtgaaaggcaagagtgcccgtcagttggattctctcaacacattatgcttcttttggtctaaaaaaatcattatgcttcttttt

SEQ ID NO: 40001 - DNA, 466 bp, Zea Mays
gcacttagagaacgtttatacaaaagaggataagaaaatgaagcactgccgggcaaacaggatcacctggttcaacgtccatgccagggactcccacgtccttgtcgccaaaaggcaccgggagcactggaggattaaatccacctgacgtcgattcgaccgactccaatgctaaacctctggcgaccacatccctcccatctcttgctctgtcctgtttcatgtatattttcttgcagttgtggtgatgcatggatgatctagttaggttcagtagagcattgagatgcagcattgttgcatcgtgatctaagagacaccacaacagttttgtttcagggaattggttggttggtggtagccgttgtaacctgccgttcaagtgaaaggcaagagtgcccgtcagttggattctctcaacacattatgcttcttttggtctaaaaaaatcattatgcttcttttt

SEQ ID NO: 40002 - DNA, 1679 bp, Zea Mays
aaaaaaaaaacgaattcgccttcttcaaaaacctcttcgacgtcgcacccgcaacgcacgctggcgggcggcggccatggcgtacctccctccccacaagcgccaacccagcaccacagcctccacgcccatccccgcacccaacccgccacctccgtccctctcctcctccctccgctccctctccctctcctccccgcgcggccgcggccgcggccgcggcgcagtcggacgccacccgctcgcttctacaaagattttccgcgctgccggctgcatctcacgttggttccctctacctcccttctcccctgccggcgacggcgaggagtacatcctacgcctcgagcccttcccttgtccccccatcgagcacaggaccggtgccaaaccccttgcccttgtcgtcgcctccaccccaggacaaggctcttccggctccactgcggcggcagtcacctccatcgccgagcagtttcttcccgatctccttgccgccgcggagagggtcaaggcagaaggcgcgcctaaggatgagttggtgaaactgagtctcgttgcaagactgggaacggtgctcttcgagtgccagcccggtggatcgcccgtttcactggacgaactccgtcaggccgctaaagcaggggaagatggttccaggagccagttgcgtaaaacgttctacaccagtttgtctagtgagtgtctggatgatatggagcgaaccatggtaaagaggattgggctggattttgattcgtccaagaagcactatcatgtgaaggtttctgacaagaatcgaagtgattctacaatatcttgcaaatgcaccgtggaggaagatgggagtcttgctatccataaggttgaattgaatcaggtacggcacttggtggaagacatatcctgtcttttcaaaggtcttgatctaaggttgatgttgagtaagaaaaggatcctgaaaaacctagattctgaagtggaaaatgcagtaaagagcttggtgtctactgctattattgatcctaatgtgaaagggggagttagatggccacttggaaaggaatcaattggcgagaggttcagcatagttggggtgtggcacacggactacaaagctttcagaaacgagaccatgaggctcaagctaaggcatgctgacagattcgatcaccgtacctcgactgggggagtttctgatgaagttacattcaaactaactgctatatcttgcaaactggagatgatctggcggagagcgctgtgaaagagatgctggagtctgcggtccaaatgctatgggacaatgcgctcaactaccgggtcgtgccttgagctccggttatgcagacaatagttcttccttgaagatgcaaagcgacatgatttctttgagcccctcctgtcctgtactagtactgaacaagagaactcctaaacacaactgacgctggggctgcccacgcacgccatcaaaaaaataaaaataaagtagcgttgggttagcttggctggttcccggtcattcggtccaacgtagttcggttgtcgagttctgattggttcggatggagtcgtcctggaaaatatccccatcctcatcctcgctcttctgccctaatgagcggatgcgccaaagcgacacacagttcttccatgcaagggcggcgcggatctag

SEQ ID NO: 40003 - DNA, 793 bp, Zea Mays
aaaacgtggcgggcttcaccgggcccgggccgggctgccggtttggccatctctacccacatctgctgcagactcgaggcgatcgaagcgtcattggcggcggctgcggcaatggcggggctgtcgctactgtgcggtgactgcggcgcgcagctgcgtagtgtggaggaggcgcaggcgcacgccgaggccaccaaccacgccaacttcgtcgagtccaccgaggccgtcctcaacttcgtctgctccgactgcggcaagccatgccgctcccagaccgaggtggacctgcacaccaagcgcacgggccatacggagttcgcggacaagaccgcggaggcagccaaacccatcgatctcgaggcgccgcttaagccggcctccgaggatgtcatggacgtagacacgtcggcttcggcgagtggggagccacaagagatggttgtcccggaggtgaacaaggagatgctcacggaccttgagggcatgggtttctcgacagcgcgcgccaccagggtgcttcacttctccggtaatagcaccattgaaggtgctattaactggctttctgagcaccaagaggacatagatattgatgagatgcctctggtaccagccaactcaaaaacggaggataacaagcccagcctgactcctgaggaaatgaagattaaagcacaggagctaagggatcgtgctcgtaaaaagaaagaggaagaagagagaagaatggaaagagaaagggagaagatgttaagtagtgtgatgtgcggccgcacatacaccaggcgcg

SEQ ID NO: 40004 - DNA, 3136 bp, Zea Mays
aaaacgtggcgggcttcaccgggcccgggccgggctgccggtttggccatctctacccacatctgctgcagactcgaggcgatcgaagcgtcattggcggcggctgcggcaatggcggggctgtcgctactgtgcggtgactgcggcgcgcagctgcgtagtgtggaggaggcgcaggcgcacgccgaggccaccaaccacgccaacttcgtcgagtccaccgaggccgtcctcaacttcgtctgctccgactgcggcaagccatgccgctcccagaccgaggtggacctgcacaccaagcgcacgggccatacggagttcgcggacaagaccgcggaggcagccaaacccatcgatctcgaggcgccgcttaagccggcctccgaggatgtcatggacgtagacacgtcggcttcggcgagtggggagccacaagagatggttgtcccggaggtgaacaaggagatgctcacggaccttgagggcatgggtttctcgacagcgcgcgccaccagggtgcttcacttctccggtaccagccaactcaaaaacggaggataacaagcccagcctgactcctgaggaaatgaagattaaagcacaggagctaagggatcgtgctcgtaaaaagaaagaggaagaagagagaagaatggaaagagaaagggagaaggaaagaatacgaattggaaaagaacttctggaagccaaaagaattgaggagcaaaatgaaaggaaacgcatgatagaactgcgaaaacttgagaaagaggaggagaaaagagctagagaaaaaatccgccagaagttagaagaagataaggctgaaaggagaaggaaactaggactgccaccagaagacccagcagctgccaaaccaagtgcaccgcttcctgttgaagagaagaagagtgcattgcctgtccggccagctacaaaggctgagaggatgagggattgcctaagaaatcttaagcaacagaacaaggatgatgatgccaaagtgaagagggcatttcaaacactccttacttacattggaaacgttgctaaaaatcctgacgaggagaaatttagaaagatcaggctaaccaatgctacatttcaggagagggttggaaatttgcatgtgggcatagagttcctggagctctgcggatttgagaaacttgaagggaacgagtacttgtttttggcaagggaaaaagtcgacaaggctatcctgaacacagctggagccgagctgaattctgccatcaccaatcctttctttggggtcctttgagtcgtaaaaaaccagtacaatgtatactcaaaactcttggtttctcactttgtttgacatcaactgggcgccaactgtagatttgtaagtctgtggtcggtatctgatttcatgaattattattgttgcatacagactagtacttgcgtgcatcgctgaggcaatatatcttccattctgttttcatcgctctcccggcctccctgcattttacaatgctctagcaccaaaaacaagagcggatgtactttgatgcattttacagcaacttcaatcaattcttagttatatgctagtacagtacaacatatcatctgaggacggagagagtcggcgaatcccccagtcatcatctttaatcaaagctgaacctggcgcccgtgaatccagctgaatggcgcgaactccggatccttggccttgttgtcgtgcgccctctcctccagcctcctgaaccggggccccagctcgcacacgaactcctgcgcgcggcggccttccccggacagccccgtgagttcctggacgccccaccggcggaccaggaactcgaggatgtcgacgtagtccctggccgtgtagacaccgatgcgctgcgcgacagcgctgaagcgcgcgaacagcccgtcgtcctggccgtcgtacatgaggtgggcgggcatggccaccttcttcctcatggtgtccgcgaaggcgcgcaccgtgtagtccgggtccacctcgaacagcttctcgacgatccgctcgtacgccgactcgtggcgcttctcgtcggcggcgattgtgccgcagatctgcgccagcttggtgtcgccgtaccgcctggcgtggcgcgccgtgttgccgtgggagatgaaggtggcgcgctcctggaacgacgtgtagacgaagcccatgtacgggttcgtctccgtcttgggatcctgcatttgtttgtacgtacgtcatgcgtgcgtacgttcatgcatcaaccacccatcatttaaaggtaaataattactcaccatccctgaggcgatgaggtactggacggtcttctcgatctgcctcatgtccaccctccccgtcaggaagaggtatttgttcatgaggtcgccgtgcctgttctcctcggcggcccacgccctggtccacaccgcccagctggtcgagctggcgccggtctcgtcgcggacgccgccgtccagggtgttgagcatggtctggtacgtcggcagcgcctcctcggtgaccatgtcgcccacgaagcagacgaagtagtcgtcggggatctcccgggcgcgctctcgcagctcccggacctcgtcgtcgaaggactcggaggcggcgtccggcaggtagtcctgcggctgccaggacctctccacgggcttgaggagcaccaggatgttgtccgccgcccacgactcgagcgactcgaagatctcccgcttctgcgggggcagcgagtgcgccacggggcggtgtacctcgcgaggaggggcgaagggcttcctgctgggagctctcacccttcattcatcatcagcatcatcgcaagattatcacaaagctaaaggaaattcaattgaggcaccgcaagattcagaggaggacaaggcagagctcacggggctgcggaagccatggccaccaccgaggagaaggctctccttgtactcactaggcaaggaggggcgaaggcgccgcaggaagggaacgccgccaccgccatgcccgccgccacttgtaatctccgcgatgctctagctagctacagtacataacaatgcaatgagcgagcgaccggcaattcaaactccaatgccgtatgtaatcggtaagtaaagtacctgatcattaagtagctga

SEQ ID NO: 40005 - DNA, 3124 bp, Zea Mays
aaaacgtggcgggcttcaccgggcccgggccgggctgccggtttggccatctctacccacatctgctgcagactcgaggcgatcgaagcgtcattggcggcggctgcggcaatggcggggctgtcgctactgtgcggtgactgcggcgcgcagctgcgtagtgtggaggaggcgcaggcgcacgccgaggccaccaaccacgccaacttcgtcgagtccaccgaggccgtcctcaacttcgtctgctccgactgcggcaagccatgccgctcccagaccgaggtggacctgcacaccaagcgcacgggccatacggagttcgcggacaagaccgcggaggcagccaaacccatcgatctcgaggcgccgcttaagccggcctccgaggatgtcatggacgtagacacgtcggcttcggcgagtggggagccacaagagatggttgtcccggaggtgaacaaggagatgctcacggaccttgagggcatgggtttctcgacagcgcgcgccaccagggtgcttcacttctccggtaatagcaccattgaaggtgctattaactggctttctgagcaccaagaggacatagatattgatgagatgcctctgccaactcaaaaacggaggataacaagcccagcctgactcctgaggaaatgaagattaaagcacaggagctaagggatcgtgctcgtaaaaagaaagaggaagaagagagaagaatggaaagagaaagggagaaggaaagaatacgaattggaaaagaacttctggaagccaaaagaattgaggagcaaaatgaaaggaaacgcatgatagaactgcgaaaacttgagaaagaggaggagaaaagagctagagaaaaaatccgccagaagttagaagaagataaggctgaaaggagaaggaaactaggactgccaccagaagacccagcagctgccaaaccaagtgcaccgcttcctgttgaagagaagaagagtgcattgcctgtccggccagctacaaaggctgagaggatgagggattgcctaagaaatcttaagcaacagaacaaggatgatgatgccaaagtgaagagggcatttcaaacactccttacttacattggaaacgttgctaaaaatcctgacgaggagaaatttagaaagatcaggctaaccaatgctacatttcaggagagggttggaaatttgcatgtgggcatagagttcctggagctctgcggatttgagaaacttgaagggaacgagtacttgtttttggcaagggaaaaagtcgacaaggctatcctgaacacagctggagccgagctgaattctgccatcaccaatcctttctttggggtcctttgagtcgtaaaaaaccagtacaatgtatactcaaaactcttggtttctcactttgtttgacatcaactgggcgccaactgtagatttgtaagtctgtggtcggtatctgatttcatgaattattattgttgcatacagactagtacttgcgtgcatcgctgaggcaatatatcttccattctgttttcatcgctctcccggcctccctgcattttacaatgctctagcaccaaaaacaagagcggatgtactttgatgcattttacagcaacttcaatcaattcttagttatatgctagtacagtacaacatatcatctgaggacggagagagtcggcgaatcccccagtcatcatctttaatcaaagctgaacctggcgcccgtgaatccagctgaatggcgcgaactccggatccttggccttgttgtcgtgcgccctctcctccagcctcctgaaccggggccccagctcgcacacgaactcctgcgcgcggcggccttccccggacagccccgtgagttcctggacgccccaccggcggaccaggaactcgaggatgtcgacgtagtccctggccgtgtagacaccgatgcgctgcgcgacagcgctgaagcgcgcgaacagcccgtcgtcctggccgtcgtacatgaggtgggcgggcatggccaccttcttcctcatggtgtccgcgaaggcgcgcaccgtgtagtccgggtccacctcgaacagcttctcgacgatccgctcgtacgccgactcgtggcgcttctcgtcggcggcgattgtgccgcagatctgcgccagcttggtgtcgccgtaccgcctggcgtggcgcgccgtgttgccgtgggagatgaaggtggcgcgctcctggaacgacgtgtagacgaagcccatgtacgggttcgtctccgtcttgggatcctgcatttgtttgtacgtacgtcatgcgtgcgtacgttcatgcatcaaccacccatcatttaaaggaagaggtatttgttcatgaggtcgccgtgcctgttctcctcggcggcccacgccctggtccacaccgcccagctggtcgagctggcgccggtctcgtcgcggacgccgccgtccagggtgttgagcatggtctggtacgtcggcagcgcctcctcggtgaccatgtcgcccacgaagcagacgaagtagtcgtcggggatctcccgggcgcgctctcgcagctcccggacctcgtcgtcgaaggactcggaggcggcgtccggcaggtagtcctgcggctgccaggacctctccacgggcttgaggagcaccaggatgttgtccgccgcccacgactcgagcgactcgaagatctcccgcttctgcgggggcagcgagtgcgccacggggcggtgtacctcgcgaggaggggcgaagggcttcctgctgggagctctcacccttcattcatcatcagcatcatcgcaagattatcacaaagctaaaggaaattcaattgaggcaccgcaagattcagaggaggacaaggcagagctcacggggctgcggaagccatggccaccaccgaggagaaggctctccttgtactcactaggcaaggaggggcgaaggcgccgcaggaagggaacgccgccaccgccatgcccgccgccacttgtaatctccgcgatgctctagctagctacagtacataacaatgcaatgagcgagcgaccggcaattcaaactccaatgccgtatgtaatcggtaagtaaagtacctgatcattaagtagctga

SEQ ID NO: 40006 - DNA, 3130 bp, Zea Mays
aaaacgtggcgggcttcaccgggcccgggccgggctgccggtttggccatctctacccacatctgctgcagactcgaggcgatcgaagcgtcattggcggcggctgcggcaatggcggggctgtcgctactgtgcggtgactgcggcgcgcagctgcgtagtgtggaggaggcgcaggcgcacgccgaggccaccaaccacgccaacttcgtcgagtccaccgaggccgtcctcaacttcgtctgctccgactgcggcaagccatgccgctcccagaccaggtggacctgcacaccaagcgcacgggccatacggagttcgcggacaagaccgcggaggcagccaaacccatcgatctcgaggcgccgcttaagccggcctccgaggatgtcatggacgtagacacgtcggcttcggcgagtggggagccacaagagatggttgtcccggaggtgaacaaggagatgctcacggaccttgagggcatgggtttctcgacagcgcgcgccaccagggtgcttcacttctccggtaatagcaccattgaaggtgctattaactggctttctgagcaccaagaggacatagatattgatgagatgcctctggtaccagccaactcaaaaacggaggataacaagcccagcctgactcctgaggaaatgaagattaaagcacaggagctaagggatcgtgctcgtaaaaagaaagaggaagaagagagaagaatggaaagagaaagggagaaggaaagaatacgaattggaaaagaacttctggaagccaaaagaattgaggagcaaaatgaaaggaaacgcatgatagaactgcgaaaacttgagaaagaggaggagaaaagagctagagaaaaaatccgccagaagttagaagaagataaggctgaaaggagaaggaaactaggactgccaccagaagacccagcagctgccaaaccaagtgcaccgcttcctgttgaagagaagaagagtgcattgcctgtccggccagctacaaaggctgagaggatgagggattgcctaagaaatcttaagcaacagaacaaggatgatgatgccaaagtgaagagggcatttcaaacactccttacttacattggaaacgttgctaaaaatcctgacgaggagaaatttagaaagatcaggctaaccaatgctacatttcaggagagggttggaaatttgcatgtgggcatagagttcctggagctctgcggatttgagaaacttgaagggaacgagtacttgtttttggcaagggaaaaagtcgacaaggctatcctgaacacagctggagccgagctgaattctgccatcaccaatcctttctttggggtcctttgagtcgtaaaaaaccagtacaatgtatactcaaaactcttggtttctcactttgtttgacatcaactgggcgccaactgtagatttgtaagtctgtggtcggtatctgatttcatgaattattattgttgcatacagactagtacttgcgtgcatcgctgaggcaatatatcttccattctgttttcatcgctctcccggcctccctgcattttacaatgctctagcaccaaaaacaagagcggatgtactttgatgcattttacagcaacttcaatcaattcttagttatatgctagtacagtacaacatatcatctgaggacggagagagtcggcgaatcccccagtcatcatctttaatcaaagctgaacctggcgcccgtgaatccagctgaatggcgcgaactccggatccttggccttgttgtcgtgcgccctctcctccagcctcctgaaccggggccccagctcgcacacgaactcctgcgcgcggcggccttccccggacagccccgtgagttcctggacgccccaccggcggaccaggaactcgaggatgtcgacgtagtccctggccgtgtagacaccgatgcgctgcgcgacagcgctgaagcgcgcgaacagcccgtcgtcctggccgtcgtacatgaggtgggcgggcatggccaccttcttcctcatggtgtccgcgaaggcgcgcaccgtgtagtccgggtccacctcgaacagcttctcgacgatccgctcgtacgccgactcgtggcgcttctcgtcggcggcgattgtgccgcagatctgcgccagcttggtgtcgccgtaccgcctggcgtggcgcgccgtgttgccgtgggagatgaaggtggcgcgctcctggaacgacgtgtagacgaagcccatgtacgggttcgtctccgtcttgggatcctgcatttgtttgtacgtacgtcatgcgtgcgtacgttcatgcatcaaccacccatcatttaaaggaagaggtatttgttcatgaggtcgccgtgcctgttctcctcggcggcccacgccctggtccacaccgcccagctggtcgagctggcgccggtctcgtcgcggacgccgccgtccagggtgttgagcatggtctggtacgtcggcagcgcctcctcggtgaccatgtcgcccacgaagcagacgaagtagtcgtcggggatctcccgggcgcgctctcgcagctcccggacctcgtcgtcgaaggactcggaggcggcgtccggcaggtagtcctgcggctgccaggacctctccacgggcttgaggagcaccaggatgttgtccgccgcccacgactcgagcgactcgaagatctcccgcttctgcgggggcagcgagtgcgccacggggcggtgtacctcgcgaggaggggcgaagggcttcctgctgggagctctcacccttcattcatcatcagcatcatcgcaagattatcacaaagctaaaggaaattcaattgaggcaccgcaagattcagaggaggacaaggcagagctcacggggctgcggaagccatggccaccaccgaggagaaggctctccttgtactcactaggcaaggaggggcgaaggcgccgcaggaagggaacgccgccaccgccatgcccgccgccacttgtaatctccgcgatgctctagctagctacagtacataacaatgcaatgagcgagcgaccggcaattcaaactccaatgccgtatgtaatcggtaagtaaagtacctgatcattaagtagctga

SEQ ID NO: 40007 - DNA, 837 bp, Zea Mays
ataaaacgacgcgcccctccttcccggcagctgtagctcctccagtccttctgctacacagaaacgccatcgcctccgcccaaaaaacagcctccacacacgacctaaatcttttcctgcccacgggcgactcccaaacccaacagcagcaagaaagccaaggaaaacactcatttccttcttccttccttctctaccatatagccaagaaccgaaggtagcttgcgacttggcaagctacaagttgggcgattcaagcagcaggatggtggcgccggtggtgatcgcgtcggcggggctgggcatgctggccggcgtggcgatggccaaccggtcccttggggacgggctcccggcggcctacaggtgtgacgcgcgcccgcgctccgccgccgccggccggctacaactgatggaataattaggtatccatatccgtggattgtataattcacgcgggaatatatatatggtgcaacccatccaggaaatcagttcaactgcgagatgattatgcatgtacatgcctcttcttcaagaccggttgtaatatattgtgctgaggacactcggtgtcgctgttgttcagttaatatgcaaattgcacagcacaagaaagaagaagaaaaactgtgttgaaatggtttttttctttagagatctaaggaaaatatatgattgagaagggagagctgtccgtgattctaaacacagttttgttgtatgtagttaattctggtggatgtaatgtatcatacacatgcttagattcgttaatatatagatgcacccacatgaacatgatttactgagattaaatttgttgtgagtgccctt

SEQ ID NO: 40008 - DNA, 1201 bp, Zea Mays
ctggtcgtttgcgcacccctcttgctagtgcttgaacgccgtcaccaaccgaggatttcgccggggagggagtgcgggtcgtgcgcgccgtctggggttgccgccgccgccgcaggtgaatctcggccatgtcgccggcggtgatccgggtccgtgccgaagacgtttgcgtgacaaccatgcgacgattccctgtcggaaattaggcgcggaagcggcggagtgagagcaattcctcgtcggtgaccgcgcgccgccgtgaagccgctcacctccgtggacagtgccctgcgttgcctgaacttcggtgaagagcaggtggtcgaagaggagacaccctataataaggagtacgagttgatctaggtggcgtctcacactcagctttgcggcgtcaaggaataatacttagttcgttttattattatcatttatttctgtcagacttccgctatataataatgatacttgtgacatttatatctatacactttattattatatgtgatgttcttttttgcgcacatatgagatgtacccgattttatctcttaaatctgggtgtgacagtatctgcagatacagtggtgcctcagctggagttggaagaatggctcaaagaacgcgagttgatgactcgcgtcatcaagttacatctgacacgggcacatgagaggatgaagcgacaagcggataaacatcgatctgagcgacattttgagattgaggattgtgtgtatttgaagttacaaccatatattcagtctttagtggctacccaggaaaatcaaaagctggcatttaagttctttggaccatatcaaattctagataaggtgggatccgtggcgtaccgcttacatttaccatcttcgagttttattcatccagtcatgtatgtctctcagttgaagaaagcagtgggaaaaaccaggaagtggtttcatctgtacctaagacttcttgacctgtccaggtgccagttcgggtagtgcagtgtcgcatgatcgaacgtggtggtcagctggtttctcaagtcaaggtggtttggtccggtatggatccaactttagcaacttgggaagacgtcgttgctctatgctccagatttcccgatgcgccggcttgggggcaagcggtcatccaaggaggggggaatgtggacatctcggacggacagactgaagaagctgaaggtggg

SEQ ID NO: 40009 - DNA, 2043 bp, Zea Mays
atcctttttgacccattcgagtggcattaattttgtattaatattgtctatcaactagtaactctatttattcatgaaatttggattaaaattattcacttgagttaatctatactaggcaataaataacttcagaaattcataaatcgataaccgtaactccgaatttagtgattcttattcctacgatctcgttacaacgtgtagaatattatcatgcatcctattctgttgtttgatgtgatgttaatttctgttatactatgcttgtttgtattgttgcgagtagacaagcaagccattgatgacccaggtgttcagtaggtggagactgctgagcaggagctcgttgaatgcaagttgtgcccttgatcacttattttacccaataatgtttcttttaatcattatgatctgcatatgttaattttgatgggacccaatagattaccctagtttgactatctttataccttgtttaccactgaacttttgggtagtacctgctattgctttatgtggttttgggtatggagatacacattattcatgatcaggcttttattatcaattttttatttattgttcatgataagatcatattgttaattggaacatgcagaaccacccagaaaaacagtgctaccataagggtggtatgggacgctcttggctgactaattacgaaagctagtggatgactaccttactcgaaaggggcaagggcagtagggtagtggtcagtgtagggaggtccttgggttgattttgctgcgatggttgtcaggcgagggatccctgcattggagcttcttagaaactatagcgggttttctgaagctagtggaactttgtaaaggcctcgtagtgttaccctgcctcgcttccttggtagaggtgtatgggaagttgcgatctcttggcaaatgggtaacatgacttgtgggtaaatatacgtaacctctgcagagtgtaaaactggtatatcagtcgtgctcacggtcatgagcggctcagacactcgcatgattaatttatagaattaaattcaatttatcatttgcatcatattgtggtttatttttaattttgattattgagttatgatcttttgtgagctcactcttgtgatatataaaacccccacaggtgaagagcaggtggtcgaagaggagacaccctataataaggagtacgagttgatctaggtggcgtctcacactcagctttgcggcgtcaaggaataatacttagttcgttttattattatcatttatttctgtcagacttccgctatataataatgatacttgtgacatttatatctatacactttattattatatgtgatgttcttttttgcgcacatatgagatgtacccgattttatctcttaaatctgggtgtgacagtatctgcagatacagtggtgcctcagctggagttggaagaatggctcaaagaacgcgagttgatgactcgcgtcatcaagttacatctgacacgggcacatgagaggatgaagcgacaagcggataaacatcgatctgagcgacattttgagattgaggattgtgtgtatttgaagttacaaccatatattcagtctttagtggctacccaggaaaatcaaaagctggcatttaagttctttggaccatatcaaattctagataaggtgggatccgtggcgtaccgcttacatttaccatcttcgagttttattcatccagtcatgtatgtctctcagttgaagaaagcagtgggaaaaaccaggaagtggtttcatctgtacctaagacttcttgacctgtccaggtgccagttcgggtagtgcagtgtcgcatgatcgaacgtggtggtcagctggtttctcaagtcaaggtggtttggtccggtatggatccaactttagcaacttgggaagacgtcgttgctctatgctccagatttcccgatgcgccggcttgggggcaagcggtcatccaaggaggggggaatgtggacatctcggacggacagactgaagaagctgaaggtggg

SEQ ID NO: 40010 - DNA, 2972 bp, Zea Mays
aaaacttgcagggcagcaaaacggactaggatttttttactctaccttgctgcaagtcagctaatttttttttccctacaagtacaagtacccccagtaccaaaattttttttgactgaaagtttgagcaaaaatagtgataaaagggtctgtattttaagtccatgattaaattttcgggggaaatacaattttagtgctgttcgtggcttcgaatctccgtcaattcgctccactcctccaaactgatccgcacagatcgagggtctagggtttggggtgccgccactgggataagcttgtgctgcttgcccgcccggagctgctcttcctccgccacgctcgccgtcggccgccagatctcgcccgcaccgacggagatcctcttcctccaccacgctggctcgctccgccgtagttctcagtattcctcttgcggatggctccatccgcactcccatgacacgcggttgtgccgctgaaaatccaaactttgggattgatgcgactgtagtaacttgttgctcagtggatggtcttgagcttttctgttccagccaggagtcaagatcaaccgagtactgtgctgaagatgaaggtgggtgcagacccaagtacccaagatgtgatggaggaggcagccctcaaagcaaagcatgtagcagagcgcaagttccacgcacgtaacaccaagggtgcccggaggatactgtctctcaatgccatggctgatgaagaggaggtgaagaaacagtacaggaagctaactctccagttgcacccagacaagaacaagtcggttggtgcagaggttgccttcagacttatctcggaggcatggagtgtattgtctgacaagagtagaaagatgctttatgatcagaagaggagagaccattgtgtggcgagtgtgtccaacggggctgacacattctggacatcatgcaacagctgcaggatgcagtatgagtacttgagagtttatctgaaccacaaccttctgtgcccaaactgtcaccatgcattcatggctgtggaaactggatttccctgcaatggaaccagttcttcattcacgtggacaaccaagtcacagcagcagcagaaccacgatactgttgctgaccattcatatcaatcagcaagcagaacatcaagcattccagacaccggacatggagcataccagcaagagaacacttacgagttgtacaaaaaccaaagtttccagttcactcagtaccccaagacaacatgtgttgctgctacaaatggttacagtacacatgcctcagagaaatcgaagagaaaacatgaagaaaactacatatacaattatatttcaagtggcaagagcaatgagtatccatcagggcgtggacgacattcaaaaaggaggcagaatttcagtaatggctgtgcatctgtggaagttaatggtcagaatctggctgcaactgcaggtatgtctgggattgccgatggaggaagatttaatggtacatcaggggagaagttcaggtctgcagtgaatgcaagaaaagctaatgtcttgagggagatcttccaacttgacacccgtggtcttcttcttgagaaagccaaagcagaagttcgtgaaaaactacaagtctggaatattttgacatctagccagtttgtcgagaaaaggaaatcagatagaagagagaagcatattcaaaacaatattaaggctaatggcattctctctgacaatccaaccaataaatgcaagaaatgcatttcaaaagatgcagataccgagatccctgtgactgatgtaatgaatccagaacagatgcgtgtacctatgtccattgatgtccctgacccagatttccatgattttgataaagatcgaacagaaagagcctttggcaatgaccagatctgggctacatatgatagtgaagatggtatgcctcgcctatatgcaatggtacagaaagctatttcaatgaaacctttcaggatacgaatgagcttcctcaattctaagtccaacaatgaactggcaccaataaattggatcgcatcaggttttacgaagacatgtggtgattttaggattggaagataccagattactgaaacagtcaacatcttttcccacagagtttgctggagtaaaggtcctcggggaattatcaggattattccccaaaaaggcgatacatgggctgtgtaccggaactggtctcctgattggaatgaacttacaccagatgatgtgatatataaatatgagatagtagaagtgatcgatgatttcactgaagagcaaggtgtgactgttgtcccattgttgaaggtagctggtttcagggcagttttccacaggctcacgggctccagtgtggtcagaagaataccgaaggaagagcttttccgcttctctcatcgggttccttcttgcctgctcactggtgaggaaagaaataatgctccaaaaggttgccatgagctggaccctgctgcaactccagttgaccttctcaagattattacagatgttaaggatgacaccacacgttgaggctccaagtagaaactctacttgtctgtcctacagacttgcaactgcgagctagcatggctgaagtctcaatatgtgcttcactcactcctcagcatcatttggctcacttgccttaatctatcattgaacttctggatgacgatgaggacttaattaggcatttataacatttaattttattgtgatatcgatattgtatagagataagggttattgacaggctgcatattgtgctgagaccagttctccaaaggcaacgtatcttatgcatatgggtatggctgtgcacgtatgcacatctttaatcccatcccttcaatcaagatccagtggctactgtcgttttaacattttaaccctcctgtggcttcctctgtgataagaatccttttttgcaaagccccctttctcc

SEQ ID NO: 40011 - DNA, 2616 bp, Zea Mays
gggtctgtattttaagtccatgattaaattttcgggggaaatacaattttagtgctgttcgtggcttcgaatctccgtcaattcgctccactcctccaaactgatccgcacaggttgtgccgctgaaaatccaaactttgggattgatgcgactgtagtaacttgttgctcagtggatggtcttgagcttttctgttccagccaggagtcaagatcaaccgagtactgtgctgaagatgaaggtgggtgcagacccaagtacccaagatgtgatggaggaggcagccctcaaagcaaagcatgtagcagagcgcaagttccacgcacgtaacaccaagggtgcccggaggatactgtctctcaatgccatggctgatgaagaggaggtgaagaaacagtacaggaagctaactctccagttgcacccagacaagaacaagtcggttggtgcagaggttgccttcagacttatctcggaggcatggagtgtattgtctgacaagagtagaaagatgctttatgatcagaagaggagagaccattgtgtggcgagtgtgtccaacggggctgacacattctggacatcatgcaacagctgcaggatgcagtatgagtacttgagagtttatctgaaccacaaccttctgtgcccaaactgtcaccatgcattcatggctgtggaaactggatttccctgcaatggaaccagttcttcattcacgtggacaaccaagtcacagcagcagcagaaccacgatactgttgctgaccattcatatcaatcagcaagcagaacatcaagcattccagacaccggacatggagcataccagcaagagaacacttacgagttgtacaaaaaccaaagtttccagttcactcagtaccccaagacaacatgtgttgctgctacaaatggttacagtacacatgcctcagagaaatcgaagagaaaacatgaagaaaactacatatacaattatatttcaagtggcaagagcaatgagtatccatcagggcgtggacgacattcaaaaaggaggcagaatttcagtaatggctgtgcatctgtggaagttaatggtcagaatctggctgcaactgcaggtatgtctgggattgccgatggaggaagatttaatggtacatcaggggagaagttcaggtctgcagtgaatgcaagaaaagctaatgtcttgagggagatcttccaacttgacacccgtggtcttcttcttgagaaagccaaagcagaagttcgtgaaaaactacaagtctggaatattttgacatctagccagtttgtcgagaaaaggaaatcagatagaagagagaagcatattcaaaacaatattaaggctaatggcattctctctgacaatccaaccaataaatgcaagaaatgcatttcaaaagatgcagataccgagatccctgtgactgatgtaatgaatccagaacagatgcgtgtacctatgtccattgatgtccctgacccagatttccatgattttgataaagatcgaacagaaagagcctttggcaatgaccagatctgggctacatatgatagtgaagatggtatgcctcgcctatatgcaatggtacagaaagctatttcaatgaaacctttcaggatacgaatgagcttcctcaattctaagtccaacaatgaactggcaccaataaattggatcgcatcaggttttacgaagacatgtggtgattttaggattggaagataccagattactgaaacagtcaacatcttttcccacagagtttgctggagtaaaggtcctcggggaattatcaggattattccccaaaaaggcgatacatgggctgtgtaccggaactggtctcctgattggaatgaacttacaccagatgatgtgatatataaatatgagatagtagaagtgatcgatgatttcactgaagagcaaggtgtgactgttgtcccattgttgaaggtagctggtttcagggcagttttccacaggctcacgggctccagtgtggtcagaagaataccgaaggaagagcttttccgcttctctcatcgggttccttcttgcctgctcactggtgaggaaagaaataatgctccaaaaggttgccatgagctggaccctgctgcaactccagttgaccttctcaagattattacagatgttaaggatgacaccacacgttgaggctccaagtagaaactctacttgtctgtcctacagacttgcaactgcgagctagcatggctgaagtctcaatatgtgcttcactcactcctcagcatcatttggctcacttgccttaatctatcattgaacttctggatgacgatgaggacttaattaggcatttataacatttaattttattgtgatatcgatattgtatagagataagggttattgacaggctgcatattgtgctgagaccagttctccaaaggcaacgtatcttatgcatatgggtatggctgtgcacgtatgcacatctttaatcccatcccttcaatcaagatccagtggctactgtcgttttaacattttaaccctcctgtggcttcctctgtgataagaatccttttttgcaaagccccctttctcc

SEQ ID NO: 40012 - DNA, 372 bp, Zea Mays
cgcgatcggcaccggagtctcaccagaccgccgcagatctcgctgcttgctctagctcggactttgggcgccaccggggtatataacccataccccccatgagccaacaccagggagctttactccaccaccgggagcacctcgccacaacgattcacgccactgctgcagtgagattgcgttcccgtcgtcgcttcaacctcggctcgtggcatatgagcatcgcctgtgcgcaccacacctatccgtggcctcactgagtccggatggggttaatcatgactgggattcatcgctggggcaaggaaatcaccgccaaaccgcttcgcgctgtgggtggtgctacccgcttcatgaaccccggccaaggac

SEQ ID NO: 40013 - DNA, 2508 bp, Zea Mays
aagaccagatcaggttcacgccaactgagagcacatatacaccactgtgcagcctcttgccacggagggtacacgctactctcgccatttctccactcacattgcgtgttatcttatgatggtattagtctgcccgaggcatgtgaccagttaaaaggtcctcgatcagcaagcctacattgacaaggtccttaatcgactcagacagagacactacaccgagactcccgtctcgtgcaagtcaaccgcccggtctcagctttattaatttcaacccaaagtttggtacctggtagaggtacatctttttcgatgttgaacccatcaaggcctttgacggatccaccatcaagttttatttttgaaaacattcccacccactgaagcatcacttttgtttgaaaacaaaacatttttgtttgctaaagcaaggctaagcatcataaaattctttttcaaaaagggtatcaaggaagggtaatcaatttttaaggaaggaaatgcatcaacgctttagcacacaactcctatcacctaatgcatcaaacaaggtgataaaaattttaaaacatcaaggaggtggcaaatgcaccggggcttgcctgaataacactaagttagtgtttgttaggcgatgtccacttgacgatcatcttttatgttggcactcgttcagattatccatcttccagttcgtccatcagcatcaacctgttgattagcccgcgcttggggtcgacatgggtcgtcttccgcgtcacgcgattaattaacgtacctgaatgatatgcataatgcacatttatccatataaggtggaataacggaaacctaaatactacttatatgacagagaattaaacaccaaacctagaataagctgactaattaagcagggcatcaactacatccattaactaaattgacataataaaactagaaattctatttttcattcctagcttttattaattctttaaactgtgtattttaattacttgatttaccgatttgtctaaaccgaacatcacaatatacgtatgtaaattaataacaattatcgcgatcaacaattctatttaatctatttatatacctagttgactgtaatacgaatcaacttacccttattaaatccgacttgaaatcgcgaaaccaacgacgcctttcagctcagcatttcaccggaaatagggtgagtgctgcgtcgaatcacgcttcatcttttttcgcatcgagtatcctccggctgtgtactaatttattttcttctgcgcctaatcttcgtggatctacgcctaatcttcccagatcttggcgtggacgaggatgacgatcgatgacttgttcgagctttctgtcgagcacttgggacatcgaccaggggcttgcttctccacatcttcttgggattcttttgtcggcgcgagcataagtcggagacaacacgtagggaccgacatcgaggtggggtgaccgaacgacgacgagattgagtctggtgcgagctggcgaggacacgaatccagtgagaactctgacgacagtgagatcatgagctctaacaccacggggttaagcagcgaacgcattcggcggccacacatgtgccgaaccgaaggcgacaaaccgatgaagcaaagttcgtcgataggcaccatggaggaatcagcgatgttgctacacacacgacgacgaacgacgcaacgacgggagtgagagatcgcagactgagtaaagactcggcgagcaatgacgtgaggagcaaagcgaggtcatggccgggcaaactcaatggcgcggaatgaaggagcagaggtctgtgcgaacacggctaggcacagggaggagcgccggcgagccggagccagaggccgagcaggtagggacgagcgctatgggaagcaggcagagggagctacgcgagcagagaggaattgggggaaggctgcagcgctgggagctcggctggatgcaacttcaatgagagatggcggccatggcaaggagcttgggggatgggcgcgccgccatgggagagcgccaaagagtttcgtggtccgagcatagggaggtgcagagaaggcagtcgcgcgcgtgtgagagagcttcagagagaagcagcggcgcgagcaggagctagggcgcgcgacccaaggcgcggcgagcttgctgcgccagggagcaaggcgcggcatcaggggcgagctcagccatggggagctgcagggagggagtaggaggagctggatgcgcagggaagaaggactgcgcgctcgttaaaaaggaacaggggcgacgagatttttctccttgagcgacgcatgcagataacgcagagatgatttttctttccccctgcggctggagatcttttctcccctgagcggtggccggatgaagacgagggaatagcggtggctgaaaaaaatcggagaagggttagagattttggctgaaaaaaaatcagaggagagagagaatagcaggagagagaggatatttcca

SEQ ID NO: 40014 - DNA, 1388 bp, Zea Mays
ctaatttattttcttctgcgcctaatcttctcggatcttggcgtggacgaggatgacgatcgacgacttgttcgagctttctgtcgagcacttgggacatcgaccaggggcttgcttctccacatcttcttgggattcttttgtcggcgcgagcataagtcggagacagcatgtagggaccgacatcgaggtggggtgaacgaacgacgacaagatcgagtctggagcgagctggcgaggacacgaatccagtgagaactctgacgacagtgagatcacgagctctaacaccacggggttaagcagcgaacgtattcggcggccacacatgtgtcgaaccgaaggcgacaaaccgatgaagcaaagttcgtcgataggcaccatggaggaatcagcgatgttgctacacacacgacgacgaacgacgcaacgacgggcagtgagagatcgcagactgagtaaagactcggcgagcaatgacgtgaggagcaaagcgaggtcatggccgggcaaactcaatggcgcggactgccccgcagccaggactagagacggacacgcggctagagacccaagcatccgaaaccgacgaacgacaacgcgaggagcaaggcgagctctacagcatgggcaacagcacagcatcgacaagaacaccgtgcataggcatgggcgacttgggcgagctgggcgacgacgcgcagaaacttgaatcagggagcaggagggcgcgctagacagccagacttgggacgcgaagatgaaaaacgacggtgccatggacggggaacaggagcaccgcgagaactccatggctgggcgcgcgtcacgagcagagggagctgggaaccgcgacttccatggtcgagcagagaaccggcagggcgcgacgtgctgacggagagccagagcgcgcgcgggatgaagggatcgagccgcggtgcgcaaagagcttcgcgcgcgcgtgggcacagagaagcaagcgcgtgggatgaaggagcagaggtccgcgcaaacacggctgggcacagggaggagcgccggcgagccggagccggaggctgagcaggtagggacgagcgccatgggaagcaggcagagggagctccgcgagcagagaggaattgggggaaggctgcagcgctgggagctcggctggacgcagcttccatgggagatggcggccatggcaaggagcttgggggatgggcgcgccgccatgggagagcgccaaagagtttcgcggtccgagcacaggaggtgcagagaaggcagtcacgcgcgcgtgagagagcttcagagagaagcagcggccgagtaggagccagggcgcgcgacccagggcgcggtgagcttgctgtgccagggagcaaggcgcggcatcaggg

SEQ ID NO: 40015 - DNA, 1835 bp, Zea Mays
ccaggatcagtgtccttgctttgtgtttgaactagcgtggtacttgagcatggaagccacgtaggtttgtccatgtgctgttggtgccctgggaatatatcttcactgagtttttgacaagtgtagggacacctgcctcctcattcggttgtcttagggcttaaatcaatgaagcttttctccctgcccttgagtttggcttgtgttcatcacaagaaggacatagctcttgagttcaagtcggtgtaaacccactccccagccaccatgcttattctgtccagtttatcacacgccaactcctctgtagtgaccacgccatcagtttgcccacctcgccgtggtcagttgcctggaacgtggtcgcgacgccgcggactggcgccatgtgcagtctctatgccgacctatccacctgcgctttcgcagaagcaacttcgtgcgagcaccataatcctggagggtattgaaaaaggaacaagattactgttgggggtctgcttcgtcgccgaaggtcccataagaagaaacaccttcggaagactgacataaagccgaagctttcaatcaaagagcttcggagtacattttcagatgcaccgacttaaagatgaaatgaccaatcggcctgagatagcttgtactatgattgtaaacatttgtaaagggcatgaatgtaatttctcacaggctgtgtcctgtgcctataaatagatgaacagtacccatgtactgttcacgctatcttgtattcgcttgtgcacaacgctcggatttttgccttctgtcaagccgaaggtacaaatataattaaatattgtatttaaatactcaagtttatataatgaagatatgtgaatgatgttatatgattattcatgttatctttcatgtttcatatgctttgtctttcattatcgcataccatgatcatgaaggtacgtccttcatgaccttcgtccgaagatcgttatatcctaagggaaataatgcttcgaaggatgaaggatattaacatttaatactttgtgttgccttgttcttgactcatagcatttgagaacaagtccccaacattggcgcccacctccggtgaactcacttccactgtcgagttgatggcttcgatcaacaatgaagctgaagtagcttcggctacgaagatggtgctcccgataataggcggttcatgttcagaaccggccaacaagaagcagaagaaggaggcccagagaagggtgtagcatgttggggtgcagggacccttcatcaagtcaaaatggtcccacatcccaatcaccttctcccaggaggaccttcagctcaaggattaccctcacaatgatgctatggttatatcttgtgtcatcaagggatttctggtccataatgttctggttgataaaggcagtgcaatggatatcatatttgctaaggccttcagacaaatgcaagagctagaggacaagattcatgatgctacacaccctctttgtggcttcgaaggaaggtagatcgtagcacttggcaagatcacaatgccagtgaccttcggatttgtccacaacacaaggactgaacatgttgtgtttgatattgttgacatggaatacccctacaatgcaatcattggtcatgggacacttaatgctttcgaagcaattctttatccagcatacatatgcatgaatataccttcggaacaagggcctattgcaattcatggaagtcaggaagctgccagaaaggctgagggaacttggacagactcaaaagccatccacaatatagatggagctaatgcttgtgagcagtacaagtacagaagagagaag

SEQ ID NO: 40016 - DNA, 1720 bp, Zea Mays
ccaggatcagtgtccttgctttgtgtttgaactagcgtggtacttgagcatggaagccacgtaggtttgtccatgtgctgttggtgccctgggaatatatcttcactgagtttttgacaagtgtagggacacctgcctcctcattcggttgtcttagggcttaaatcaatgaagcttttctccctgcccttgagtttggcttgtgttcatcacaagaaggacatagctcttgagttcaagtcggtgtaaacccactccccagccaccatgcttattctgtccagtttatcacacgccaactcctctgtagtgaccacgccatcagtttgcccacctcgccgtggtcaggtattgaaaaaggaacaagattactgttgggggtctgcttcgtcgccgaaggtcccataagaagaaacaccttcggaagactgacataaagccgaagctttcaatcaaagagcttcggagtacattttcagatgcaccgacttaaagatgaaatgaccaatcggcctgagatagcttgtactatgattgtaaacatttgtaaagggcatgaatgtaatttctcacaggctgtgtcctgtgcctataaatagatgaacagtacccatgtactgttcacgctatcttgtattcgcttgtgcacaacgctcggatttttgccttctgtcaagccgaaggtacaaatataattaaatattgtatttaaatactcaagtttatataatgaagatatgtgaatgatgttatatgattattcatgttatctttcatgtttcatatgctttgtctttcattatcgcataccatgatcatgaaggtacgtccttcatgaccttcgtccgaagatcgttatatcctaagggaaataatgcttcgaaggatgaaggatattaacatttaatactttgtgttgccttgttcttgactcatagcatttgagaacaagtccccaacattggcgcccacctccggtgaactcacttccactgtcgagttgatggcttcgatcaacaatgaagctgaagtagcttcggctacgaagatggtgctcccgataataggcggttcatgttcagaaccggccaacaagaagcagaagaaggaggcccagagaagggtgtagcatgttggggtgcagggacccttcatcaagtcaaaatggtcccacatcccaatcaccttctcccaggaggaccttcagctcaaggattaccctcacaatgatgctatggttatatcttgtgtcatcaagggatttctggtccataatgttctggttgataaaggcagtgcaatggatatcatatttgctaaggccttcagacaaatgcaagagctagaggacaagattcatgatgctacacaccctctttgtggcttcgaaggaaggtagatcgtagcacttggcaagatcacaatgccagtgaccttcggatttgtccacaacacaaggactgaacatgttgtgtttgatattgttgacatggaatacccctacaatgcaatcattggtcatgggacacttaatgctttcgaagcaattctttatccagcatacatatgcatgaatataccttcggaacaagggcctattgcaattcatggaagtcaggaagctgccagaaaggctgagggaacttggacagactcaaaagccatccacaatatagatggagctaatgcttgtgagcagtacaagtacagaagagagaag

SEQ ID NO: 40017 - DNA, 1755 bp, Zea Mays
gggaatatatcttcactgagtttttgacaagtgtagggacacctgcctcctcattcggttgtcttagggcttaaatcaatgaagcttttctccctgcccttgagtttggcttgtgttcatcacaagaaggacatagctcttgagttcaagtcggtgtaaacccactccccagccaccatgcttattctgtccagtttatcacacgccaactcctctgtagtgaccacgccatcagtttgcccacctcgccgtggtcagttgcctggaacgtggtcgcgacgccgcggactggcgccatgtgcagtctctatgccgacctatccacctgcgctttcgcagaagcaacttcgtgcgagcaccataatcctggaggatttgtttaggtattgaaaaaggaacaagattactgttgggggtctgcttcgtcgccgaaggtcccataagaagaaacaccttcggaagactgacataaagccgaagctttcaatcaaagagcttcggagtacattttcagatgcaccgacttaaagatgaaatgaccaatcggcctgagatagcttgtactatgattgtaaacatttgtaaagggcatgaatgtaatttctcacaggctgtgtcctgtgcctataaatagatgaacagtacccatgtactgttcacgctatcttgtattcgcttgtgcacaacgctcggatttttgccttctgtcaagccgaaggtacaaatataattaaatattgtatttaaatactcaagtttatataatgaagatatgtgaatgatgttatatgattattcatgttatctttcatgtttcatatgctttgtctttcattatcgcataccatgatcatgaaggtacgtccttcatgaccttcgtccgaagatcgttatatcctaagggaaataatgcttcgaaggatgaaggatattaacatttaatactttgtgttgccttgttcttgactcatagcatttgagaacaagtccccaacattggcgcccacctccggtgaactcacttccactgtcgagttgatggcttcgatcaacaatgaagctgaagtagcttcggctacgaagatggtgctcccgataataggcggttcatgttcagaaccggccaacaagaagcagaagaaggaggcccagagaagggtgtagcatgttggggtgcagggacccttcatcaagtcaaaatggtcccacatcccaatcaccttctcccaggaggaccttcagctcaaggattaccctcacaatgatgctatggttatatcttgtgtcatcaagggatttctggtccataatgttctggttgataaaggcagtgcaatggatatcatatttgctaaggccttcagacaaatgcaagagctagaggacaagattcatgatgctacacaccctctttgtggcttcgaaggaaggtagatcgtagcacttggcaagatcacaatgccagtgaccttcggatttgtccacaacacaaggactgaacatgttgtgtttgatattgttgacatggaatacccctacaatgcaatcattggtcatgggacacttaatgctttcgaagcaattctttatccagcatacatatgcatgaatataccttcggaacaagggcctattgcaattcatggaagtcaggaagctgccagaaaggctgagggaacttggacagactcaaaagccatccacaatatagatggagctaatgcttgtgagcagtacaagtacagaagagagaag

SEQ ID NO: 40018 - DNA, 1911 bp, Zea Mays
gaatcgttgccgggattttgtgaaagcattgaaatcgagggtcctaagtgcagtggtcaatgacacaggataatagtggcttgggctcatattagttgtgtccaagcgtcgagggtctccacacaaaagcaccggtgcgggcacggggcctcggtcgcaggccaagtatgtctgggttgggccggataagtgagtttgggcccatcactattcactgctttgcctttttcttttatttgaaagcttggatattgtcccaaaaattgtagaaaattccaaaaatcgtgggacaaattttattaaatgtctaaaatcaaaagctctttgataaagttggttttaggattttagggatagtttccaaattaaaatggatttaaaagtactcctagagggcctatttaaattttagaaataaaaagtaagtgccaaaaattctgaaaatttttgggtagttttgttttggttagtggagcactatgtttagtgctatttggaagccttttgaccaaaaagccttgcaaggtccataatagataagataaatccctaatcaagtggatcaggtgctttgggaaaaataggcaagcttgttaagtgaaatcaggtctttggataaaatataatatgcactagtcctctgatagttcaagcttgtatggttccttacaagagaagattaatccctaagtaaagatttgtttaggtattgaaaaaggaacaagattactgttgggggtctgcttcgtcgccgaaggtcccataagaagaaacaccttcggaagactgacataaagccgaagctttcaatcaaagagcttcggagtacattttcagatgcaccgacttaaagatgaaatgaccaatcggcctgagatagcttgtactatgattgtaaacatttgtaaagggcatgaatgtaatttctcacaggctgtgtcctgtgcctataaatagatgaacagtacccatgtactgttcacgctatcttgtattcgcttgtgcacaacgctcggatttttgccttctgtcaagccgaaggtacaaatataattaaatattgtatttaaatactcaagtttatataatgaagatatgtgaatgatgttatatgattattcatgttatctttcatgtttcatatgctttgtctttcattatcgcataccatgatcatgaaggtacgtccttcatgaccttcgtccgaagatcgttatatcctaagggaaataatgcttcgaaggatgaaggatattaacatttaatactttgtgttgccttgttcttgactcatagcatttgagaacaagtccccaacattggcgcccacctccggtgaactcacttccactgtcgagttgatggcttcgatcaacaatgaagctgaagtagcttcggctacgaagatggtgctcccgataataggcggttcatgttcagaaccggccaacaagaagcagaagaaggaggcccagagaagggtgtagcatgttggggtgcagggacccttcatcaagtcaaaatggtcccacatcccaatcaccttctcccaggaggaccttcagctcaaggattaccctcacaatgatgctatggttatatcttgtgtcatcaagggatttctggtccataatgttctggttgataaaggcagtgcaatggatatcatatttgctaaggccttcagacaaatgcaagagctagaggacaagattcatgatgctacacaccctctttgtggcttcgaaggaaggtagatcgtagcacttggcaagatcacaatgccagtgaccttcggatttgtccacaacacaaggactgaacatgttgtgtttgatattgttgacatggaatacccctacaatgcaatcattggtcatgggacacttaatgctttcgaagcaattcttt

SEQ ID NO: 40019 - DNA, 2554 bp, Zea Mays
gttgaaggtcctataggtctcactccccactaaaatatctaatttggactgcatggggggcagtgggcagtagaaatcttatctattttgtctactacctacagatttggacaaagtgatatttatgtgtgggagctgagccaacgaggtgtagtgcttgtatgccacgtttttgaacctttggtgtgctagcactctaggaatcctccttcatcaagcgtggatgagctccactgcacctgcccctatatttagtaccttgggctgccgtattgagtgaagatttcttccttgccctcaaattctagccaaagttcactgcttgagtgtgcagtccttatgtactgctggtataaccccctccctagcccaggtttgcccccttctccccatggactggatgcgctcagtgacccctccccctgcctatttattcagtgtgttccacgactgagttcagaaaagcttttctcccttgttctcgagctgtagtcccagtccactacaaaggtgttggagtcctggtattcttgctggtgtgcatcctctctttcagccaccaagtttgttttactctagagctgaatgccaacctcttgcctgtggtgaccaaacccaaccgtttctcacctccccgtggataaggtttcccacaagtattcttggccgtgtactacttgttccatgctcggcaaaggtcagtgaagctcaccatttactacttgtactctaccactgtctgttgctgggaactaggtgtaaagttcgctcaaaaaataggctgttggatttttggatcggagacttagtgcagaaggctgaaactaggttctagtatgttgagctccactttggtgcttcctaaaaaaattgttctgaatgttttcaacctaggggtgctataccaaagtagtagagctatatctaaggaataactttggtaatgtgagcttggtcttttgttgtgtaaaagttggagaaaaggttggctaaagttggactgttaggctggacacaactgaatttttttattcagttctgtgaactgaattacagcagtatgcctagtttagaattcatttgtgactgattcatggggttttagattaaaggttccatagaaaagttgtagaccatagtaaagtgaacaagtttgctaaagtgagatggacctggttccacataaatttgggagtaaaagtggccaaaagatggactgtcaggtgttgggattcagacttagaataatatttaagtctgaatatgtgtgtttttacccaactttgggggccttgtggtaataaatccaaagggatttgggttaagagtctgtagcaaaatgagagaccagatatagatgaacaagttttgtgcaaagagtgggcttggtactgtatggaatttagagaaatagcctgctgcaaaaccctctatctgactcagtattgtgctgtttcagaaattagaaactgaattttcagtgttttgctttactttggattgccataactcttgctctaaatattttcaacctgtgatttctataccaagttggtagagctatgtctagagaataactttgagtaaatgagttgggtttgtagttgagggaatttgtgagttacaaagcactgaacagagggagaggaatggagcactagaagatgaattcagagaaacgaaaacaggttcagtgaattgtagctgattcttggacactataacttgtagtacatgcagtgtggatccttgcttaatgcataaatgaagtacttggttggttatggaggcaagcttttctagtttggttggtaaattgagctgtgatattagagtatttagctctcttaaggttttgttagcttttgtgtacacctttagagaggtgtaagtcttgcgatgcttcttagtattttcttttcaagttgcataagcataaacatccatgatcatgttatttcatatagaactcctactagaaggagtgaatattcaagctgaagtggtgactgaagaggaatctactccagtggctgctgatcaagtggaggagccatctaactgaggtttaatagagggatagagtacctcttcactgcaataagaactcctaccagaaggagtgaatattcaagctgaagtggtgactgaagaggaatctactccagtggctgctgatcaagtggaggagccatctaactgaggtttaatagagggatagagtacctcttcactgcaataaggcaagccccggtgcatttacccctttccttgtatttttaaaagacttttatacactttaagtctagtgaaatgtgcattaagttataggagttgcttgaaaactatttgatgcattgactaccttgatatccattcctgttatagatacttctttggaagtgttggacaccaaaatgagcggacggtccggcccttaggcccggacggtccgcgtgtcccgagattagattacctcggatgtttatccttatctcgtgcgtggttatccatctaatcacgtgggagtttgttggctatctcttaggaaaag

SEQ ID NO: 40020 - DNA, 851 bp, Zea Mays
gatttcttccttgccctcaaattctagccaaagttcactacttgagtgtgcagtctaagtactgctggtataaccccctccgtagcccaggtttgcctccttctccccatggactggatgcgctcagtgacccctccccctgcctatttattcagtgtgttccacgactgagttcagaaaagcttttctcccttgttctcgagctgtagtcccagtccactacaaaggtgttggagtcctggtattcttgctggtgtgcaccctctctttcagccaccaagtttgttttactctagagctgaatgccaacctcttgcctgtggtgaccaaacccaaccgtttttcacctccccgtggataaggtttcccacaagtattcttggccgtctactacttgttccatgctcggcaaagaaggagtgaatattcaagctgaagtggtgactgaagaggaatctactccagtggctgctgatcaagtggaggagccatctaactgaggtttaatagagggatagagtacctcttcactgcaataaggcaagccccggtgcatttacccctttccttgtatttttaaaagacttttatacactttaagtctagtgaaatgtgcattaagttataggagttgcttgaaaactatttgatgcattgactaccttgatatccattcctgttatagatacttctttggaagtgttggacaccaaaatgagcggacggtccggcccttaggcccggacggtccgcgtgtcccgagattagattacctcggatgtttatccttatctcgtgcgtggttatccatctaatcacgtgggagtttgttggctatctcttaggaaaag

SEQ ID NO: 40021 - DNA, 1307 bp, Zea Mays
ggagaagctcgaaagtcgtccctaaggggatgcagagcatgacaaagctacaaaaagccgttcctaagggagcgcagtgcaagttttttgctcaaaagtcgttcctaagggaatgcagagccaaataccgccgaaatataaggcgaagcgcgaaaagtcaacgcgaataccgccgaaatagaaggcgaagaagttcaaaagacgttcctaagggaatgcagaacttacacaaaaaaataagcggtgcagccaaaaaataaacggcaaagagatttaagttattcctaagggaatgaaggttgtggatgaagtttcgaatgtgtgtgtttggacattcatttgcacgatacattacatcatacattgcattcataaacattcatttagacatacataggatcatcatcatatcatacaaatacagacagttgcttcggctctaagcatacagcttgaaaagcagattcatgcttcgttgtgtacgaaaagaagggaaggtgtttttcgccttcggctcaaaaaatacagatttcgaccacatcaaagcatttcatacatcgatggaaaggtaaaatggaaataaaaatatattacaaggtatggacaaatttacagagtagaatctgattcttaagttacaatactctttataaaggttaatacaagagttttcttagaattcttccacagctaggtattcgagcttcatcaccatctgttgagcttcgaattgtctgctaagcttcgactctgtgttcttcggcttcgtcatcctgtacatatcaaagcattataaggaaaattcaagtttcaaggaaaaggtaagtacaaggtatgattttattaccggcttgaggtgacttcgagcttcgtcaccagctaggcttcgcccaccctttgcccatatttgctttataaatctgtttcctatgcttcaagctaggctggggatataaatcagatctgctagtgataagctgaagtttggtctattaacaatctttccatgcgtgcaaccagatttcatgaaggcaacagccgtgcctcgagaagctagcagggcacagaaatcaccgtgtccggctataacttcatcaggagcatcaacttcgcccttaatgtgtttgaaggtccctggcaagtcctcaatcgaaggaatgaatttctcagagctggctccaaccgagttgaagatctgccttaaccgctgcacgcatcggttgctgaactctagacatttatcttgaagttctttcaatgatttttgcaaatttgaactttttttgacctcagcctcaaacttcatt

SEQ ID NO: 40022 - DNA, 10090 bp, Zea Mays
cttttatttgctttctaaaccttcaattatgatctcatgttttttgtctttaaggtcctgttgcatcctcaaagctttgcttaatagcatactctgagtagaagcaagcttcgtcagcaaacaccttcgtcgttaaaaacaatgaaaagtcgaagaaaagtttttaccttgaagttagaatagaataaactaccgacgatatgctgtcgtcggtagcggctgatatcggtctcaagcttcgggaaaccaatactcttcgacagagtaccgacgaccttcgctgcagtccggtatcgaagacaacctaagctttcatcgtcaataccgccgaagagcattgcctctgactgatacccgcaggatatggcatagtctcttaattcttctttctcagccattgacaattcttgtccaattaagttttgaaaattgaagttttcttcttctgaagtatctttggctatatccttctctttcccaggcactgtggccatggtctcttcagtggctgcagcagcttcttctgcggccatatccagaagtattttatctatatcagggaatgtgctttctaagtttgcatccttggccgttgcagcttcggtaatcgtggcttcagaaggtgcagcttcggtagctgtagcgctctctacatctggtgcctttgatgccgaaggtggtggtggtgtctcttcaatagcttctgtcacagtaataatccttcgttttttcggcccaacagacttcttcgctgccgagggctccttcttcttctgtaaaagcttcggcagatgtggccctagtggacttagcttgataggcaaggatgcagtcattacctttagaatttcttccacgtcggcagcagaaggtgttgaaggagtctcttcttccatatcagttgccttctgctttagagccgaagcttttctcctcttcggagcaactgccttcggctcagggctcaattttcttttctttaggatttcttcgtcttctttcaccattctagcagcttgtctgcccacaacactaacaattatttttcttttttgcccttcgacgcccttgttcaatcgctcatagtctggatattcataattcagggcatccattacccgatccaatcttcgcttcggtcgggcgccgaaggctgcagtcatcaactgatcttcttttctcgtataattgcccaaaatctcgttgcacataacctcaattgtatccaaccattcttggcagggttctttgaagtgttttttgaacttgaaatgatagggtagccgaacaagttcattcttcttcttcttctctttttcaagcttcggcataccccattcccttagcgttggaaatactcggttggccaagtaatcttgaactaaatctctagttccaatgtgttcagatacaactctaaactcatacacaacatctgggcatggtgcccccggcgtcatgttgcactgaggcctagtcagcccgaaggttaactccagcgggctctgtactagcttctcctttttctcatcaatcttaacataaaaccattcagattcccaaccggtcggccatttagagcgatagctgaccactggtgtcttcttgcgataagcaaaattatagcaaccgaagttctcatgcaatccgtcttccctagccttcatctgataatgaagttcatgtactcggcagaaggcttcggcgagcggctccaacccttgacttcggagagcccagatatacacgctgagcctaacaatggcgttaggggtcagttgatgaaggtaaatctcaaaattttccaagacatccgcaatcatcctgtgcagaggaaatctcaaccctgctttgaagaagctcttaaaaaccaccacttcatcattttctggcttcgggatagtctcttccccgcctaaatgaatcaaccccttatcggcttctctgaagtagcctaacttcgtcatcatagccatatcagcttcagacacagttgacttcccaaaatccaaatggctgggctttgatggcatagcagtgttatagtcaatctcttcaccagtatcgccctcttcaatatctgcctgctcggcttcagtagcaggggtgccttcgtcaggagcgccctccatcacaactagtcccgaccgcctcaacttcggagatcgaagtggttttagtagcttcggtttcctctctgtcgtgtgtaatcttagctgttgagcgcaccctggccatttgatgttgaatttcttgcattttgacgaagttgattattttttgacgaagctccctcttatcatgaagctagagcaaagtgatcctttgattgggaatacgatgaacaagcttcggcggtggtcaaattttttggcagcacaacagtgcaatagcagtaaatgctgtggtaacttcacaactacccgtctgtttatatagtgctgcaggtaggaaggtgaatcgtcaagtcgctcgcacccgctgaacagtcgctcgcacccgctgaatagtcacccgcactcgctgaacggtggaccatagcgcccaagaagctgaatcaccagatcgcgtgtacccgttgaatggtggggaccacccttcactcggaatatttaaatcgtttctcggcaacgagataagggaaggtgtttttcggaccttcggcattccgaagcctgagagagtttttcacgggtcgagctcgttacgaaaaatgatctagcaccgtgaaggggctattgttgggggtctgcttcgtcgccgaaggtcccataagaagaaacaccttcggaagactggcacaaagccgaagctatcaatcaaagtgcttcggagtacatttccaaatgcaccgacttaaagacgaaatgaccaatcggcccgtgataacttgtattatgattgtaaacctttgtaaaggacatgaatgtaatttctcacaggctgtgtcctgtgcctataaataggtgaacagtacccctgtactgttcacacgatcctgcattcgcttgtgcgtaatgcttggattcttgctttctgttgagccgaaggtataaatgtaattagatactgtatctaagtattcaatttcatataatgaagacgtgtgaatgatattatatgcttattcgtgtcatctttcacattttatatatttcatatgtttcgcctttcattttcttataccatggtgatgaaggtacgtccttcatgaccttcgtccgaagatcgttatatcctaagggaaataatgcttcgaaggatgaaggatgttaacatttaatgctttgtgttgccttgttcttgactcatagcatttgagaacaagtccccaacaccagcgcctcagcgactggcgtacccagctagaggagcgcaccaaggcggcgtcccgccagttcgcctccgagcggtccgagcttgagcgggaccgcaaggactacaagaaggacctctagaaggtgtacgcccgggagctggaggtgggtcggaaggagaagaggctggccaagaaggaggaggccttgaaccagagggaggaagtcgtcatagagctccaggccaagctaagtgccttcaacgaaatcctggaggagcagcgggtccagcagatcgttgctatggagagcctgcaaaagctgcagcgagagcttgatggcaaggcccgcgacagtgccctcgccgaggagaagcttaaagcgaaaggagaatccttggacaggcgggagacagacctcgccaggcgggagaaggatctcgccttcaaggaggaaatgcttgaaaggcgggagaagttgctggccgagcatgagctcgaggcggaggagaaggagcggacgttggaggagcgggtccgccggttccaggcggcgcaggcggtacaggtagcaccgagccccaggcggtggaggcgatgaagaaaacacttgaagatctccaggcggagcattgcgccagggtccagcgcatcgccgcatgggctggcgaggcaagcacgacactggtgccgctaggggtgagtcccatcccggtgtcggagctgccgacgtccatctctgacgcactcccggtgctggactccgccgcagaccgcctccgacgcctggaccagatccttggcgtccgcttggaggccgagagcggcaggctctgccgggcggtaatcgagtacatcttgacgtgcttccagagccacgacatgaccatctccttggagccggtgatcgctggttcgatggccgacactgaagatgccaccccgggaggccgtacaagatgtcgtggaactggtggccgaacgtttccagcgggatcctgctgatgatgagtagctagatctgcagagagaaggcaagggtctcgctgggaagcagctttgtaatattttttggtctttgtaagatacttttgagtactattcagtattagcacttatctgtatactatttgtccttgttgtgtgtggcgttaccaactcctccctggtacttggccccttgggatgtaggctctacgtgtcgaggctggataccagtatacctaagaaagagttggcaacggcccccacgaggtagcctcgactgggacctggacctgtacatagcttcggctaggaagtgtaagtagcacacccataggacccatcgtctggtatcagctgttggggactttttctcaacatgctatgagataagaacaaggcaacacaaagtattaatggttaaagaccttcgtccttcgaagcattatctcccttaggatataatgatcttcagacgaaggttatgaaggacgtaccttcatcatctcattattataataatgaaagtagaagcatatgaaacatggaaaataacatgaataatcatatgacatcattaagatagttttattatattatcatgaacaaatatgaacaatatcgaattacatttgtaccttcggcttgatagaaggtgaaaatccaggtgacgtgcgagtgaatacaagtcagcgtgaacagtacgaggtactgttcatctatttataggcacaagacgcaacctgtgtggatttacattcatgtcctttataactgattacaatcatgacacagattaacatgggctaatcggtcttttcatctttaagtcggtgccacccttcgtctcaaggcgtgtcattatgccgaagctccctggatggtagctttggctttgcttctgtgttgatcttccgaaggtgtttcttcttataggaccttcggcgacgaagcaaacccccaacagtagccccttcacggtaccagatcgtttttcgtgatgagctcgacccgtgaaaaattctcttaggcttcagaacgccgaaggtccgaaaaacaccttccgtgagctcattgtcgagaaacgattggatattccaagtgcgaggtggtcccaccatacggcgggtacgagcgatctggtgattcaccttctcgtgcattgtggtccaccgttcagtgggtgcgggcgactgttcagcgtgtgcgagcggcttgacgattcaccttcccacctgcagcactatataaatagatgggtaggtgtgaagttaccacaacatttattactattgcactgttgtgctgctaaaaaatttgaccatagccgaagcttattcatcgtattctcaatcaaagcatcgtcttgttttagcttcgtcataagagggagcttcggcaaaactgcaaaaagtcatcaacttcgttaaaaccgtgagaaatttagtatcaaatggctagagtgcgttcaacagctagaattacacgcaacagagaggaggccgaagctgctgagactgccccttgtccgaagtaatgaggcaatcgggactggttgtgacagagggtgcttctgaggaaggtgcacctgctaccgaagctgaacaggctgacattgaagagggtaatgctgatgaagaagagatagattataacaccgtcatgccatccaaacccagccacttggactttggaaagtctactgtctctgaggctgatatgcccatgatgttaaagctaggctacttcggggaagccgagaagaagctgattcgttttggtagggaagaaaccactccgaagccagaaaatgatgaggtggtagttttcagaagttacttcaaagcaggattgaggtttcctttgcatgaaatgattggggatgttttggaagatttcgaaatttatcttcatcagctgactcctaacgccatcgttaggctcagtgtctttatctgggctcttcgaagccaaggagtggagccgcttgtcaaagctttgtgccgggtgcacgagcttcattatcagacgaaggctagagaagatgggctacacaagaatttcggctattacaactttgcttaccgcaaagatatgaagactccggtgatcagctatcgcaccaaatggccaaccggttggaagaatgagtggttttatgttaaggttgatgagaagaatgagaagatagttcagagcccactggacctaaccttcgggttaactaggcccctgtgcgacatgttgcaagggtcaccatgccgagaagctgtgggcgaattccgagttgtgtctgagcatatcggtaatagagatttggtgtaggaatacttagctaatagagtatttccgacgttaaaggaatggaataagccgaagcttaaaggagaaaagaaaaagaatgaacttgttcgactgccctatcacttcaagttcaagaaacatttcaaagagccttgccaagaatggttggaaacgattgaagctatgtgcaatgaaattctgggcaactatactaagaaagaagatcaattgatgaccgcggccttcggcacccgaccgaaacgaaggctgaaccgagtaatggatgccctgaaatttgaataccctgactatgaactgttacgcaagggtgccgaagggccaaagcgaaaaagagctgtcagtgttatgaagaggcaagttgctagaatgatagaagaagatgagaaagctttaaaaaagaaaaaaatccagccctaagccgaaggtggctgttccgaagaaaagaaaagttgcggctgcgaagccaagaacaactgatatagaggaagaagttccttcaacgcctcccgctgctgacgtggaggaaattttaaaggtaatgaccaaatctttacctctcaagctaagtccactagggccacaactgatgaagcttttatagaagaaggaggagcctgcagcaatcaagaagcctgctgaaaaaaggcgaaggattattactgttattgatgctattgaagaaacgccaccgtcggcttcagcgtaaaaaacaccagctgccgaagctgctcccgccgaagctacaactaccgaaggtgcgacggccaaagccacaaatcttgagggcgtattttctgatattgataagatgattttggatatggccatggaagaaactgttgcaactgccgaggcaaccctggccacggtgcctagaaaaggggagaaggtgtttaacaaagagaagaagattgccgaagatatttcggaggaaggggacttcaattttcgaaacatgattgtcaggagttatccaaggctaaaaaagaagaactaagagattatgctatatcttgcggctaccagccaggagcattgctcttcggtggcgttgacgaagagagcttaggatgcctccgggaccggactggagcgaaggttgtcagcactctatcaaagagtgttggctttccgaagcttgaggccgacctcagcagataccggcggcaacatatcgccggtagcttgttttattctaactttaaggtaaagttcttaccttaactttttgttgttttcaagatgaaggttttttttccagagtctactactaagtaaaaccttaaggatgcaacaagatctcgaggacaagaaaaatgagattataattgagggcttagagggcaaaattaaagatcacaaagctgctctggagaagaaggattccgtgattcaaacaatggagggttcgctggcagaagctcaagccaagattgctagattaaacagtgaactctccatgaaatcaaaaagcttcgaacaagagaagaaggattttgatgcaaagcttgaagctgaagttggaaagagtttgaacttgcaaaagtcattgaaggaacttcaagataaatgtctgaacttcgacaactgttgcgtgcaacgactgaagcaggtcttcaactctgttggagccagttctgaaaagtttaaaccttcagctgaagacctgccaggcatcttcgatcatattaaaggcgaagttgatgctcttgatgaagtcatagctgggcatggtgatttctgtgctctgctagcttctcgtggcacagctgttgcttttatgaaggctggttgcatgcacgggaatattgtaaacaggccgaacttcagcttatcaccagcggacttgaatgacatccttagcctggcccgaagcattgggaacagattcataactcaaatttgggcaaagggtggacgaagattggctagtgacgaagctcgaagtcacctcaaaccggtaataaactcatacatttgcttaccttttccttgaaacttgaatttaccttataacgctttgttatgtactggatgacaaagccgaagagcagtgatccgaagcttggtggatgatctgaatcttagcggatggtgatgaagccaaagacattgctattagctagggtggtgaagttcagtctgccttgcctcacttgtactttctgcctcttgccttggttctgattggaattctgcccctgcctctgctggttcttggggcaattcttggcgtagtgtccagtgctgccacaagtgaaacatctgttgtcattggtctgacgatactgctgctgttgtggctaggtgttgttcctctgaactgggggctgagagcggttgggtgcctgctgctgctgttgtagtcggatcacccaccggccttactgctgaggtcccctaccctgagtgtcggacacaatcctgaaacgctgaggctgagctgaaggtccttccataggggtcttcctgttcttttctgcctggcaggctgtgatgcagtcttcctgagaaatggccatgttgactaactcattatagctattggccctgactgtattgagacagtcgcggagcttagtactgaggccctcctgaacctatccctcttcttctcatctgtgtcagcaagatagcctacgtactgacacaggtcattgaaggcctgagtgtaatgcaacacagtacgattcccctgagtaagtgccagaaactcattgagcttgcggtccatgatgcctgccggtatgtgatgtcctctgaatgctgccttgaattctccccattccactgcgtgatcaactggctgcatagcgagaaagtggatccaccatgttcgcgcgggtccgcgaagctgctgggtggcgaaacagaccttagccacatctgaacaaactccagtaagcagtgggaatttggattccactaccctaagccacacatcagcatcaagtggatcctctgcccgagtgaacaaaggcggctgagtgctgaggaactcctgataagtggccgctgctgggggacgctgatggtgatcaccaccaccatagtgctgaggtggtggctgacgttgagccaactgtcgcagaatctcattctgctgagccatcagttcttggatggtaggaggcggcggtggtggtggaggaatgcactcattctgtccacggcgcgctcttcctgccatctgaaaattttggacgttcttaatatcatacttctgaaatcaaggctcgcacatagtaaaagatttgaaaggacaaggtttgtaaaaagccaaacatttccttgcatttttcataaaagacactacataacataaatttccttcataacttaaaatcgacatcatccatcattcataaatccaaaagagtttctaacggttacaacagtgcttaaaagactcaactcttcctagcctagtaccccaaaggtgcaaaagctaagctagctttgagg

SEQ ID NO: 40023 - DNA, 2660 bp, Zea Mays
aattctccccattccactgcgtgatcaactggctgcatagcgagaaagtggatccaccatgttcgcgcgggtccgcgaagctgctgggtggcgaaacagaccttagccacatctgaacaaactccagtaagcagtgggaatttggattccactaccctaagccacacatcagcatcaagtggatcctctgcccgagtgaacaaaggcggctgagtgctgaggaactcctgataagtggccgctgctgggggacgctgatggtgatcaccaccaccatagtgctgaggtggtggctgacgttgagccaactgtcgcagaatctcattctgctgagccatcagttcttgcatggtaggaggcggcggtggtggtggaggaatgcactcattctgtccacggcgcgctcttcctgccatctgaaaattttggacgttcttaatatcatacttctgaaatcaaggctcgcacatagtaaaagatttgaaaggacaaggtttgtaaaaagccaaacatttccttgcatttttcataaaagacactacataacataaatttccttcataacttaaaatcgacatcatccatcattcataaatccaaaagagttttctaacggttacaacagtgcttaaaagactcaactcttcctagcctagtaccccaaaggtgcaaaagctaagctagctttgaggagttctactgctgcacacttctatccaaatttctgaaacctaatggacaaacaaggcaacactggacttgggggaaggtggtcttcctgagccagcagtgtccaagctggatacaggctccggctcctctcctccctcgatgtcaacatcctcgtcggccccttcggcctccatgtcctggatctcctgatggtgcatatccaggtgctggttggcttcctcaagttgctgctgagtgttcagaagttgatcctcgagaacctcgatggtgttctccctggctcctactagctactcaagctcttggatctgggtggccatctgctccaccaggaggtccttctccaccagctcagtggataggtctaccataaggtcctccctgttatccagggtgatcttggtagcctccaccaagctcatcagctaggacattgcctcacctcgcactgcttgcagacggtacatggcattcatgcatcgcaccgtcaggtgagcagtctgctctgggtaaagagcccacacatccttggcatgcaccactcgatccttccacattggcttgtcctccttttcagcggggaacaagccaatgggatgagtggacagctccaaggggtgaaagccataaaaggtcgttagcccgaggagagcaatggcctcaatagtgtcttcagcccggtatccgaaagactcggagtccaacgaacgccagcccagctgcaagggatgaggctccaaggtcatcctcaccctacagcggggtacccggtgctcctcgaacaactgcaccagataaccggctccctgcagcacctcccacaaaatgcagggaaaaccctcttgcgcaagtccgtccgtgtgggaatgtgcgttccctccttccgaggactcgtgagaagtcatctgtgtaagggtaagcgtaagcgaaaaagaaaaagaattaagaaaataaaagtggattggggcttggctttcccaaggttattgatgaggacatcacctgcaacatgagtacgactacaccagcagcacctccacatcaagcgccacttccttcattagccgggctagtcactcgggcctgtgccagagatcttaacttcgtcatgctactgaagaatgagggcccagaagaatagatgaccagcccaactacgacccatagtggacgacctagggttggccgccactaggggctgcaccccctctctctatttatccaggagctgcgcctcctttgttctttgagttttgttttacgttagctttagctactctagaacacgcgcaaataagcgctgtctttgtgtattcagaactccaccctcgagtaatagattagattgcttgcatctttttcttgttcgttcttcgattgcgcacaggaaacgatcttcgtgatcaggccgatctcacatcagcaaggtcggtaaccacagggagttggttcagcgattgcattggcgcctcgggctttctcgtcgtagtcggatcgcaagggctgtggtagaacctcccaaggtatcgggcccacatgcacctgtccttgtcttaaagaactcagacggccatgcatgtgcaccagataacttaacaggatccgtccgattgccccacagacaccggataaaccacttacaaccagaaccgcgggattaagtaatacaaatcacacacaccaatattttgcagcggaaatcttattaccaaattttacaaattacaaaaattttacttcgtacatgatcagagtgattactacattgattcaaagaaagaaactttgaacggttataaattatttatagttttgaaatatatgctagctcaagtgaccatcctcaataagaagataaaggcggggtatacttatataagaaggccgagcccaccggcacttaacaccatcaacagcagcacaaaactataacctgaaaaacaacagggaataaaaccctgagtatg

SEQ ID NO: 40024 - DNA, 664 bp, Zea Mays
tcgcagccttcatatatacatatgtggaacatgtatataatcaagcgctacaattaagcacttccctagaccgacggttgttcggtcatgctctcacatctcaccttaccttgagcgtcgatccattcaaaactgaatggccttaaaaataacaatacacatgtatgcaatacccccggttgtgggttagtggtttttaaataagccacctaatagtccttaatttagggcttaacagaggatgtcgctagcattataatttttcaaaactgtttttcaaagccaaacaatgtgtttagttgaaaataagtttttcaaaaccaaaacttttgttttgaaaatacgtatgtgaccgtatatacttaatcctgctccgataccagctgtggcagaacctcccaaggtatcgggcccacatgcacctgtccttgtcttaaagaactcagacggccatgcatgtgcaccagataacttaacaggatccgtccgattgccccacggacaccggataaaccacttacaaccagaaccgcgggattaagtaatacaaatcacacacaccaatattttgcagcggaaatcttattaccaaattttacaaattacaaaaattttacttcgtacatgatcagagtgattactacattgattcaaagaaagaaac

SEQ ID NO: 40025 - DNA, 1847 bp, Zea Mays
gaccggttcgacttcagaacttccagcatcctatcagataccgaaatctccaactcccgcatcgcatcgaaccttcggcctgcaagcgaattcgtcctcccctctcctaccggcgcgaattcaaccgcccgcaaagccctaggccgatgcgtccgatccggctacccgagccgccgggtgtcgacggcatggagacgcccgagatcttctctggcagcggcactggtggcgccgccgtcgttcgccgcgccgtcctcataggcaacggctcccccggcgcagaaaaccagtgtctcggcctcgcccgcgccctcggccttgccgacaacctcacattctaccgtgtcacgaggccgagaggagggatcaatgagtggctgcactttctccccatttccatgcacaagtttatagaccaaatactcaggcagttcttccggaacacaaggttcgcaatagtggttcaggggaggaagccgcgtgtgctgaatggtgcatcagttgggttgtctgcagttctggaagcaaacgtcaagaagattgttactgtagcacgcgatacgtatgagaaggaaggtccgacgttagtcgttgcttgtggctgggacaccatatcatattcaagcttgataaggaaagtagcttcagataatgtgttcgtcatccagatccaacacccacgatctcgccttgataggtttgatttagtggtgactcctcgccatgattactatgctttaaccgctagtggacaacaagaagttccacacctgttccgcagatggattactccacaggaaccacccaggagtaatgtggctgattctgctgcgctacggcttgctgctatagcctggcatgatgaactcgcccctttgcctaagccgttgctaattgtcagcattgggggccccaccaggaattgtaaatatggtgtagatcttgccaggcagctcataacttctctgtataatgtgctagatagctgtgggagtgtcagaatctcattctctccgagaacaccatggaaggttgctgatactatatttaaagaatttgctggacatcccaaggtctatatttggaatggtgaagaacctaaccctcacatgggacatcttgcatgggctgatgcttttgtcataacagcagactcgataagtatgttaagtgaggcaggtagcacagggaaacctgtttatgttattgggaccgaacactgtaaatggaagttttcggcttttcacaagactctacgggagcgaggggttgttcgcccgttcactggattggaagatatttcaaatagctggagctaccctcccctaaatgacgccattgaagtagctactcgtgttcgtgaagtgattgcagaacgagggtggacagtgggatgatgtgatcataagtagctctctgttattctgtctaactttggtccagatatgatatatacggtaaactatagagtttggttagcatcactgtggattcagtttgtgtcgtttggaaaaaaaaaggagagaataacatagccatggaatggcctgtacaaaaggtgaccctctctttcatggtacacccccaagccaaaattttgagtaactgcacagctccgggagatttttttggctactggcaacatgttgcctgatgtaaatttaagctgctagaaggaattggagtaaatagagttgataatgagaaaatttgaagctgatgcaacgtttcgggttttgtatggttgtatgcttatgactttaccctgttttgattaaatttgtgtatgatgaaacatgcagaacccatcagcttttaccccttttgtggattttttttttttgcat

SEQ ID NO: 40026 - DNA, 974 bp, Zea Mays
tcatcaatagaatctaatcagccatcttctgcctattcaaatatttagattctaactaccagtttctcactacaactatattatcaagcattcagttttttactataatttttctctacatccaacttctcctcgtagtcatcttttcagaaaagtttcttagacccacaagctagagccagccagccgctcagccccagccctcggaaacccatcgcaaattcgcaaactaaccccaaaccccaatccaccccatcccctcctcatccactccgggcggccatggcctgctccttctccgccgccatcaccgtctcttccgcccctaccccggccgccagacccctcgctgctgccacgcagtccgtctgcatcgctcgctccgcggtcgccaccactgccaggccgctccgcctcgccgcctcaaggtccgcgcgggctaccagactcgttgcccgcgccagcgtagtcgatgacttgccgctggtcgggaacaaggcgccagacttcgaagccgaggctgtgttcgaccaggagttcatcaacgtgaagctctctgattacattgggaagaagtacgtcattctgttcttctaccccttggatttcaccttcgtctgcccgaccgagattactgcgtttagtgacagatacgaggaatttgagaagttgaacactgaggttcttggtgtttccattgacagtgtgttctcccaccttgcatgggtgcagacagacaggaagtcgggtgggctcggcgatcttaaatacccacttgtttctgatgtgaccaaatcaatttcaaaggcctttggtgttctgatccctgaccagggtattgctttgagaggactgttcatcattgacaaggagggagtgattcagcactctaccattaacaaccttgccattggtcgtagtgtggatgagaccatgaggacccttcaggaactaaatggagtatttccatcctt

SEQ ID NO: 40027 - DNA, 2387 bp, Zea Mays
cccctccgccggcaagcctccatagccccatcggtcgctcctcacccgtcttcgcttcgccccccaccccgcgggccaaccatcgccatgcgcatcctcacagtggcgtatgtgacgcgccactgcagggagcgagggtgggacgggctctcgtgggacgctccagggactctggcccttcaccaaactctccatccgctggaggaggaccgccgcaagattgaggagctcaagaacaaggccgcagactggcagctcgacctcctccagtttggctccaacacctccgagggacaggactatgtggagggtgaaaacttccaaaggatccacatcagaatcgaaacaaaaggaaattctcgaggttcttcagtccagtggggatgactgcaggggttgtgctattcggatttggcctttccaaaagggttttccctatggctgggttttccctatggtaccgtcggcttgcaggaggggttcgccagcttgctgttcgccaccgctgtcgtcttcgccttcgtggttggttcccctccccgctcccctctccctttcgacaccaaaaaaacatgctgaccatctttggcaggcggtggatctgataggcagccttatcatcttcagaaaatacagtattaacctttatattcacttatggtttccaaagatcgtgattcttctgtcctacatattagattgacatccacttactaaaatctaaattttattatcctaaaggtgtacttccatattttttatttgaacccaacatgtgcacaaagaaaacacttaatctaaggggaaaataatagaaaatgactacacattttcctatttgatatgtttttttcttaaagggaaaataccaacctgaatactttttttacagggatgtggagtggagttattgcagtcattgcacttcgttttttcttaaaaaatatacaaacatttttgtgatggacaaatattttgagacactgcttcctgaagatttgagttttgacaaaattgtacagagtagattttgtagttcatttcaatcaaactatgaacttgtgaagcataagctaaagtaatttttctaagtaaatctgaatgaaatctctacagttctatgaagtacttattgtttcactttgttttgctatttttgcacatggcttcaggtgaaataatgtttgtctttggaggatatgacttatggacatagatagccgtttcacatttttttcttggatctgttacttatttagtgcatctagtctgctgtggataaatatagtgaaacagaggtagggatattgtagattaggttccagaacatgctgctgtcttggtgtcgtgatcttctgttgcaccttccaaattggcgcttaaatttacaaagcagccttatttacaaagcaaccttctgagacgacgtggctgtacttatttgtcttgcaggcatacattctcatcttttgcattgaaagaactgaaccataaaaaaaataaagacaggagcacttctctagattcaatgccaatgaaaaaacttatagttattgcacaagctagaatgttttctcgatcaacttcctttccagataacttcctaaatgccaagtatattcctgaaacatcaataaatataccttctaaggaaggtccacataggcagttgtcaccctcaaatcggataatcaggtctacttctggaaatgataatgtcaattctaggagtctgtttgataatattcagcagaagaaattagcagcgcatggagccaatgcagcgagaaggtctttcaaagatttcctcagtacattaacaagaaccaaagaaagtatatcgcgtgcgacacgtcttgctatggaatgtgctaaatttggcattgctggtgaggtgatgtatgatgcctttggtgttaggctacaagcaggaaagcaagcaaaggtcttgaaccagattgtgtatgagcttccatcagaacatccactggctgaaacaagaccgctgcgagagctactagggcacacacctccacaggtatttgctggcgaagtgcttggatttgcagtagccacatttatagcgatgatcgctgggcttggtagttgactccgcatttgaagaaatggtcaacattcacattgaagttctagaattcaaattggacacatgtttcctagctagcttatgatagataatgtgttgtgtataggtgtatttaatatgcaaattgctgtcaatttgttgaagagaaacttgcgtcattcttttgtagttaatcgacgagtgaactatatgttgtattcgttcctgtccaaagtatttggactgattgaaagtacctcttgataaagcattcatgagatttccgcacagccattgcgat

SEQ ID NO: 40028 - DNA, 2429 bp, Zea Mays
ctcacccgtcttcgcttcgccccccaccccgcgggccaaccatcgccatgcgcatcctcacagtgtgccccctctcctccaccactgttggccccaggtggcgtatgtgacgcgccactgcagggagcgagggtgggacgggctctcgtgggacgctccagggactctggcccttcaccaaactctccatccgctggaggaggaccgccgcaagattgaggagctcaagaacaaggccgcagactggcagctcgacctcctccagtttggctccaacacctccgagggacaggactatgtggagggtgaaaacttccaaaggatccacatcagaatcgaaacaaaaggaaattctcgaggttgtcgtcacggaagttcttggttatgggaagttttatgttagactgttcttcagtccagtggggatgactgcaggggttgtgctattcggatttggcctttccaaaagggttttccctatggctgggttttccctatggtaccgtcggcttgcaggaggggttcgccagcttgctgttcgccaccgctgtcgtcttcgccttcgtggttggttcccctccccgctcccctctccctttcgacaccaaaaaaacatgctgaccatctttggcaggcggtggatctgataggcagccttatcatcttcagaaaatacagtattaacctttatattcacttatggtttccaaagatcgtgattcttctgtcctacatattagattgacatccacttactaaaatctaaattttattatcctaaaggtgtacttccatattttttatttgaacccaacatgtgcacaaagaaaacacttaatctaaggggaaaataatagaaaatgactacacattttcctatttgatatgtttttttcttaaagggaaaataccaacctgaatactttttttacagggatgtggagtggagttattgcagtcattgcacttcgttttttcttaaaaaatatacaaacatttttgtgatggacaaatattttgagacactgcttcctgaagatttgagttttgacaaaattgtacagagtagattttgtagttcatttcaatcaaactatgaacttgtgaagcataagctaaagtaatttttctaagtaaatctgaatgaaatctctacagttctatgaagtacttattgtttcactttgttttgctatttttgcacatggcttcaggtgaaataatgtttgtctttggaggatatgacttatggacatagatagccgtttcacatttttttcttggatctgttacttatttagtgcatctagtctgctgtggataaatatagtgaaacagaggtagggatattgtagattaggttccagaacatgctgctgtcttggtgtcgtgatcttctgttgcaccttccaaattggcgcttaaatttacaaagcagccttatttacaaagcaaccttctgagacgacgtggctgtacttatttgtcttgcaggcatacattctcatcttttgcattgaaagaactgaaccataaaaaaaataaagacaggagcacttctctagattcaatgccaatgaaaaaacttatagttattgcacaagctagaatgttttctcgatcaacttcctttccagataacttcctaaatgccaagtatattcctgaaacatcaataaatataccttctaaggaaggtccacataggcagttgtcaccctcaaatcggataatcaggtctacttctggaaatgataatgtcaattctaggagtctgtttgataatattcagcagaagaaattagcagcgcatggagccaatgcagcgagaaggtctttcaaagatttcctcagtacattaacaagaaccaaagaaagtatatcgcgtgcgacacgtcttgctatggaatgtgctaaatttggcattgctggtgaggtgatgtatgatgcctttggtgttaggctacaagcaggaaagcaagcaaaggtcttgaaccagattgtgtatgagcttccatcagaacatccactggctgaaacaagaccgctgcgagagctactagggcacacacctccacaggtatttgctggcgaagtgcttggatttgcagtagccacatttatagcgatgatcgctgggcttggtagttgactccgcatttgaagaaatggtcaacattcacattgaagttctagaattcaaattggacacatgtttcctagctagcttatgatagataatgtgttgtgtataggtgtatttaatatgcaaattgctgtcaatttgttgaagagaaacttgcgtcattcttttgtagttaatcgacgagtgaactatatgttgtattcgttcctgtccaaagtatttggactgattgaaagtacctcttgataaagcattcatgagatttccgcacagccattgcgat

SEQ ID NO: 40029 - DNA, 2020 bp, Zea Mays
atgcgcatcctcacagtggcgtatgtgacgcgccactgcagggagcgagggtgggacgggctctcgtgggacgctccagggactctggcccttcaccaaactctccatccgctggaggaggaccgccgcaagattgaggagctcaagaacaaggccgcagactggcagctcgacctcctccagtttggctccaacacctccgagggacaggactatgtggagggtgaaaacttccaaaggatccacatcagaatcgaaacaaaaggaaattctcgaggttcttcagtccagtggggatgactgcaggggttgtgctattcggatttggcctttccaaaagggttttccctatggctgggttttccctatggtaccgtcggcttgcaggaggggttcgccagcttgctgttcgccaccgctgtcgtcttcgccttcgtggttggttcccctccccgctcccctctccctttcgacaccaaaaaaacatgctgaccatctttggcaggcggtggatctgataggcagccttatcatcttcagaaaatacagtattaacctttatattcacttatggtttccaaagatcgtgattcttctgtcctacatattagattgacatccacttactaaaatctaaattttattatcctaaaggtgtacttccatattttttatttgaacccaacatgtgcacaaagaaaacacttaatctaaggggaaaataatagaaaatgactacacattttcctatttgatatgtttttttcttaaagggaaaataccaacctgaatactttttttacagggatgtggagtggagttattgcagtcattgcacttcgttttttcttaaaaaatatacaaacatttttgtgatggacaaatattttgagacactgcttcctgaagatttgagttttgacaaaattgtacagagtagattttgtagttcatttcaatcaaactatgaacttgtgaagcataagctaaagtaatttttctaagtaaatctgaatgaaatctctacagttctatgaagtacttattgtttcactttgttttgctatttttgcacatggcttcaggcatacattctcatcttttgcattgaaagaactgaaccataaaaaaaataaagacaggagcacttctctagattcaatgccaatgaaaaaacttatagttattgcacaagctagaatgttttctcgatcaacttcctttccagataacttcctaaatgccaagtatattcctgaaacatcaataaatataccttctaaggaaggtccacataggcagttgtcaccctcaaatcggataatcaggtctacttctggaaatgataatgtcaattctaggagtctgtttgataatattcagcagaagaaattagcagcgcatggagccaatgcagcgagaaggtctttcaaagatttcctcagtacattaacaagaaccaaagaaagtatatcgcgtgcgacacgtcttgctatggaatgtgctaaatttggcattgctggtgaggtgatgtatgatgcctttggtgttaggctacaagcaggaaagcaagcaaaggtcttgaaccagattgtgtatgagcttccatcagaacatccactggctgaaacaagaccgctgcgagagctactagggcacacacctccacaggtatttgctggcgaagtgcttggatttgcagtagccacatttatagcgatgatcgctgggcttggtagttgactccgcatttgaagaaatggtcaacattcacattgaagttctagaattcaaattggacacatgtttcctagctagcttatgatagataatgtgttgtgtataggtgtatttaatatgcaaattgctgtcaatttgttgaagagaaacttgcgtcattcttttgtagttaatcgacgagtgaactatatgttgtattcgttcctgtccaaagtatttggactgattgaaagtacctcttgataaagcattcatgagatttccgcacagccattgcgat

SEQ ID NO: 40030 - DNA, 2227 bp, Zea Mays
atgcgcatcctcacagtggcgtatgtgacgcgccactgcagggagcgagggtgggacgggctctcgtgggacgctccagggactctggcccttcaccaaactctccatccgctggaggaggaccgccgcaagattgaggagctcaagaacaaggccgcagactggcagctcgacctcctccagtttggctccaacacctccgaggttcttcagtccagtggggatgactgcaggggttgtgctattcggatttggcctttccaaaagggttttccctatggctgggttttccctatggtaccgtcggcttgcaggaggggttcgccagcttgctgttcgccaccgctgtcgtcttcgccttcgtggttggttcccctccccgctcccctctccctttcgacaccaaaaaaacatgctgaccatctttggcaggcggtggatctgataggcagccttatcatcttcagaaaatacagtattaacctttatattcacttatggtttccaaagatcgtgattcttctgtcctacatattagattgacatccacttactaaaatctaaattttattatcctaaaggtgtacttccatattttttatttgaacccaacatgtgcacaaagaaaacacttaatctaaggggaaaataatagaaaatgactacacattttcctatttgatatgtttttttcttaaagggaaaataccaacctgaatactttttttacagggatgtggagtggagttattgcagtcattgcacttcgttttttcttaaaaaatatacaaacatttttgtgatggacaaatattttgagacactgcttcctgaagatttgagttttgacaaaattgtacagagtagattttgtagttcatttcaatcaaactatgaacttgtgaagcataagctaaagtaatttttctaagtaaatctgaatgaaatctctacagttctatgaagtacttattgtttcactttgttttgctatttttgcacatggcttcaggtgaaataatgtttgtctttggaggatatgacttatggacatagatagccgtttcacatttttttcttggatctgttacttatttagtgcatctagtctgctgtggataaatatagtgaaacagaggtagggatattgtagattaggttccagaacatgctgctgtcttggtgtcgtgatcttctgttgcaccttccaaattggcgcttaaatttacaaagcagccttatttacaaagcaaccttctgagacgacgtggctgtacttatttgtcttgcaggcatacattctcatcttttgcattgaaagaactgaaccataaaaaaaataaagacaggagcacttctctagattcaatgccaatgaaaaaacttatagttattgcacaagctagaatgttttctcgatcaacttcctttccagataacttcctaaatgccaagtatattcctgaaacatcaataaatataccttctaaggaaggtccacataggcagttgtcaccctcaaatcggataatcaggtctacttctggaaatgataatgtcaattctaggagtctgtttgataatattcagcagaagaaattagcagcgcatggagccaatgcagcgagaaggtctttcaaagatttcctcagtacattaacaagaaccaaagaaagtatatcgcgtgcgacacgtcttgctatggaatgtgctaaatttggcattgctggtgaggtgatgtatgatgcctttggtgttaggctacaagcaggaaagcaagcaaaggtcttgaaccagattgtgtatgagcttccatcagaacatccactggctgaaacaagaccgctgcgagagctactagggcacacacctccacaggtatttgctggcgaagtgcttggatttgcagtagccacatttatagcgatgatcgctgggcttggtagttgactccgcatttgaagaaatggtcaacattcacattgaagttctagaattcaaattggacacatgtttcctagctagcttatgatagataatgtgttgtgtataggtgtatttaatatgcaaattgctgtcaatttgttgaagagaaacttgcgtcattcttttgtagttaatcgacgagtgaactatatgttgtattcgttcctgtccaaagtatttggactgattgaaagtacctcttgataaagcattcatgagatttccgcacagccattgcgat

SEQ ID NO: 40031 - DNA, 1980 bp, Zea Mays
atgcgcatcctcacagtggcgtatgtgacgcgccactgcagggagcgagggtgggacgggctctcgtgggacgctccagggactctggcccttcaccaaactctccatccgctggaggaggaccgccgcaagattgaggagctcaagaacaaggccgcagactggcagctcgacctcctccagtttggctccaacacctccgagggacaggactatgtggagggtgaaaacttccaaaggatccacatcagaatcgaaacaaaaggaaattctcgaggttgtcgtcacggaagttcttggttatgggaagttttatgttagactgttcttcagtccagtggggatgactgcaggggttgtgctattcggatttggcctttccaaaagggttttccctatggctgggttttccctatggtaccgtcggcttgcaggaggggttcgccagcttgctgttcgccaccgctgtcgtcttcgccttcgtgggatgtggagtggagttattgcagtcattgcacttcgttttttcttaaaaaatatacaaacatttttgtgatggacaaatattttgagacactgcttcctgaagatttgagttttgacaaaattgtacagagtagattttgtagttcatttcaatcaaactatgaacttgtgaagcataagctaaagtaatttttctaagtaaatctgaatgaaatctctacagttctatgaagtacttattgtttcactttgttttgctatttttgcacatggcttcaggtgaaataatgtttgtctttggaggatatgacttatggacatagatagccgtttcacatttttttcttggatctgttacttatttagtgcatctagtctgctgtggataaatatagtgaaacagaggtagggatattgtagattaggttccagaacatgctgctgtcttggtgtcgtgatcttctgttgcaccttccaaattggcgcttaaatttacaaagcagccttatttacaaagcaaccttctgagacgacgtggctgtacttatttgtcttgcaggcatacattctcatcttttgcattgaaagaactgaaccataaaaaaaataaagacaggagcacttctctagattcaatgccaatgaaaaaacttatagttattgcacaagctagaatgttttctcgatcaacttcctttccagataacttcctaaatgccaagtatattcctgaaacatcaataaatataccttctaaggaaggtccacataggcagttgtcaccctcaaatcggataatcaggtctacttctggaaatgataatgtcaattctaggagtctgtttgataatattcagcagaagaaattagcagcgcatggagccaatgcagcgagaaggtctttcaaagatttcctcagtacattaacaagaaccaaagaaagtatatcgcgtgcgacacgtcttgctatggaatgtgctaaatttggcattgctggtgaggtgatgtatgatgcctttggtgttaggctacaagcaggaaagcaagcaaaggtcttgaaccagattgtgtatgagcttccatcagaacatccactggctgaaacaagaccgctgcgagagctactagggcacacacctccacaggtatttgctggcgaagtgcttggatttgcagtagccacatttatagcgatgatcgctgggcttggtagttgactccgcatttgaagaaatggtcaacattcacattgaagttctagaattcaaattggacacatgtttcctagctagcttatgatagataatgtgttgtgtataggtgtatttaatatgcaaattgctgtcaatttgttgaagagaaacttgcgtcattcttttgtagttaatcgacgagtgaactatatgttgtattcgttcctgtccaaagtatttggactgattgaaagtacctcttgataaagcattcatgagatttccgcacagccattgcgat

SEQ ID NO: 40032 - DNA, 1504 bp, Zea Mays
aagagagccacctctaatatttttctacttgcttagacatagtatgagcaaccatatcatacataaactggaggacttgataatgagtattgggtagatgatatttagggtgaaatgtcctttggagctttatgggaatatcttgagttgtgggatactgggataccctttctacgtgaatctccagcagggcatccaagatagccatatctggagactatcttcatcaagacagtacacaaataattctgcctatgatgctttgtttcatggcaccatcttgtttgagccttgtgaacggatttggaaatctagggcccctcccaaatgtaattttttcatgtggttggtggcgcacaatcgttgttggacagcagatcggctagataaacgtggcctcccacacccagctcgatcactctttgatcaggtggatgagaatctccaacacctactcatcaagtgtgtatttgccaggcagctctggttctccattctacaacactcaggcctctcagcccttgccccacaaccacctgatctttctttggggtgtttgtttcggcttatttccagcttctgtccgccagaagctgctgcaaactgccaaacacctagcttttcagctcgcttttgtgagaatcgttttggtaaaaacgtccaaaatcaacgtgaacataaaatcgattcagtcgtcacaaaagtaggaatctgtcactttctagattctaaaccctattgacccctttatctttctttgcacgtaatccccacgatactcaggttctccccacaaccagattctcataaaagctcgtccgaaaaccctaaacaaacatgtgggattggtgcgcgagagtataaaatgttgtagctggtgttgtgtgaaaagccttgaaaactcttgtcatacttggcatcgtaatgattgtgtgtttaatggggcttcccccatggttgctacagctctgccccttgacaaatatgacacccaactatggagcatgtcaggtgatgtatgatgcctttggtgttaggctacaagcaggaaagcaagcaaaggtcttgaaccagattgtgtatgagcttccatcagaacatccactggctgaaacaagaccgctgcgagagctactagggcacacacctccacaggtatttgctggcgaagtgcttggatttgcagtagccacatttatagcgatgatcgctgggcttggtagttgactccgcatttgaagaaatggtcaacattcacattgaagttctagaattcaaattggacacatgtttcctagctagcttatgatagataatgtgttgtgtataggtgtatttaatatgcaaattgctgtcaatttgttgaagagaaacttgcgtcattcttttgtagttaatcgacgagtgaactatatgttgtattcgttcctgtccaaagtatttggactgattgaaagtacctcttgataaagcattcatgagatttccgcacagccattgcgat

SEQ ID NO: 40033 - DNA, 784 bp, Zea Mays
tcgacaccaaccgcagcagcgtgcgcggggccacgacggcgcctgggcatgtgtccgtggaccaccacccatacccgatgaccaccgcctccatccgcgcgccctagcaagatcgataagtccataactgccatgtacatgaggttgccgaagacactcgcattcgatgtatttcattcgctatgggacaagtgcaaggatagccacttgaccatcatattatcatgaatgcttatttcactattggccccaggagccatttcttcagatgaatatacaagttccatttaagttggttgcctaatctgctcaacacttgcaggatgagttcttggacaaatacaagagctttgtttagatggtaacacggatatatgggaatgagccaatcatgtcagtcaacaaaatgaaagatatccttgctggttattagatacaagtacaacaccatgtatcatttcagagaaatagctatgcattccattcattccattgaattttacacccacttgtgttaccgtgttaggtgcccttttggttatgtgtgtatcatggaatggaataggttagcacaatgttcgcaaggagaaaattacacagagtgatcctaaaactggtgatattgtgctgatctaggttgcctgttgaaaggcatgagtaaaagcatgaaattttattgagatgcatcaaagaagatttaggagataaggacggcaaaccacaacatctatcatttacaaatgtattcttgcactggcctgcttttaaatccaagcagactgct

SEQ ID NO: 40034 - DNA, 635 bp, Zea Mays
ggcatctaccagagattccctactagggatacggagacgcccccattccatcctcatctgctcgctccgtctcccggttcatgccatccccatacggccactaactcctacattccacagatgtgtttccgtagcaattccttgcctggtgggaaactcagggcagatttgaagactgccggcaaagatccagcgaggaggtggcgtatccatcccaaaatcgcaacatctggactaagtgaaggagctgaataagcacgtatcaccctcgtcgtcctcgccgccaatgcctccacggccgaggcgccactcgtcgtcgcgcacaagaatgcttcgctctactgccagatccgatccgcgcgcttttgccgagatagtggacgaagaaaaatgccagtccacgaaccctatccatccgccgtcctcgatgagcaggtccaccagatgcttcacaactcgcgtgccgagctcgacgccccatcagcagcttcctctctccagggtgtagccatttgcctcttaatgaggtttcagcttcagaattggtggtgccattttctcatggacaacccaaagcagccaggcgcctatggtgggtctcagtgtagttcatcagttcaaaaggcagtttgcac

SEQ ID NO: 40035 - DNA, 1099 bp, Zea Mays
ggcatctaccagagattccctactagggatacggagacgcccccattccatcctcatctgctcgctccgtctcccggttcatgccatccccatacggccactaactcctacattccacagatgtgtttccgtagcaattccttgcctggtgggaaactcagggcagatttgaagactgccggcaaagatccagcgaggaggtggcgtatccatcccaaaatcgcaacatctggactaagtgaaggagctgaataagcacgtatcaccctcgtcgtcctcgccgccaatgcctccacggccgaggcgccactcgtcgtcgcgcacaagaatgcttcgctctactgccagatccgatccgcgcgcttttgccgagatagtggacgaagaaaaatgccagtccacgaaccctatccatccgccgtcctcgatgagcaggtccaccagatgcttcacaactcgcgtgccgagctcgacgccccatcagcagcttcctctctccagggtgtagccatttgcctcttaatgaggtttcagcttcagaattggtggtgccattttctcatggacaacccaaagcagccaggcgcctatggtgggtctcagttcatcagttcaaaaggcagtttgcacatcttgaggagcatcatagtgagaaggagaaagaggttctacactgcaaagagagcatgcttctttaccaaggtacaacagccataaaactgaatattatttggctagaacctgaaatggcggaaactctcaggaatcatgtgcaaaccgtctaaagctaactgttggatggggttggcgaaggtgtgcttgaataaggatcacctgaaggcgtggagtccctggctgctggttgttgtgtgtcctggcgggcggtagtttgagtccactgcaggcagtggcggctgtaatatgtactagtataggcatgcagacaacaattggaaattgtatgattcatgtgatcattttccttgtattcttttctattgttggttatatatcagattttagaagattcttgtgatccttttccttgtattcttttctattgttggttatatatcagattttagaagattcttgtgat

SEQ ID NO: 40036 - DNA, 528 bp, Zea Mays
gtcccctccccaccccagccttctctctcgctgcgcggcgcctcctcacgcctccgcacttccgcagtctgtccccaaatctgtgcaagacctctcggcaaatcccctcgcggcgacgagacatggttgggagcgtgggcaacgggctggcggatttggacgcaggggccatctccatgaacggggtggggaaggctctgtatcctgccaaggcggcggcggcggccgccgcggagacgctccctgtggagctggagccgccggaggccgtagtggcgccgacgggggaggaggctgccaacgggaagagggagatagtgatggggaggaacgtgcacacctcctgcttcgccgtgaaggagcccgacgcggacgacgaggaaaccggcgagagggaggcgacgatggccagcatcctcgcgctctaccgccgctcgctcgttgaacgcaccaagcaccaccttgaatatgatatggatgcggagagggtgtgttgacgccttttcggagcgccaaacactcaacaag

SEQ ID NO: 40037 - DNA, 1906 bp, Zea Mays
gtcccctccccaccccagccttctctctcgctgcgcggcgcctcctcacgcctccgcacttccgcagtctgtccccaaatctgtgcaagacctctcggcaaatcccctcgcggcgacgagacatggttgggagcgtgggcaacgggctggcggatttggacgcaggggccatctccatgaacggggtggggaaggctctgtatcctgccaaggcggcggcggcggccgccgcggagacgctccctgtggagctggagccgccggaggccgtagtggcgccgacgggggaggaggctgccaacgggaagagggagatagtgatggggaggaacgtgcacacctcctgcttcgccgtgaaggagcccgacgcggacgacgaggaaaccggcgagagggaggcgacgatggccagcatcctcgcgctctaccgccgctcgctcgttgaacgcaccaagcaccaccttggttacccgtacaatctggacttcgattatggtgcactggcccaactgcagcacttctcgattaacaaccttggtgaccccttcatcgagagcaactatggtgtccattccaggcagtttgaggttggagtgctggattggttcgctagcctctgggagttagaaaaagatgagtactggggatatattactaactgtggtacagaaggaaatctgcatgggattcttgttgggagggaggtgttccccaaaggaatattgtatgcttctcgtgagtcccattattcagtattcaaagcagcaagaatgtacaggatggattgcgtcaaagtcgacactcttatgtctggggaaatagattgtgctgatttccagagaaagttattgcagaaccgagacaaacctgccatcattaatgttaacattggaacaactgtgaagggggcagttgatgatctagatttggttatcaaaaccctcgaggagaacggctttaaaggtcggttttatattcattgtgatggtgccctctttggattgatgataccatttgttaagaaggcgcctcaagtgacatttaaaaagcctattgggagtgtcagtgtctctgggcacaagtttgttggatgccccatgccatgtggtgtccagataacaagattggagtacataaatgccctgtctagcaacgtggagtatctggcgtcaagggatgcaacaatcatgggaagcaggaacggccatgctcccatcttcctctggtacaccctcaacaggaagggctacagaggctttcagaaagaagtccagaagtgcttgagaaacgcacactacctaaaagatcgcctcaaggaagcaggaatcggagcgatgcttaacgagctcagtagcacagttgtgtttgaaaggccaaaggatgaagtatttgtccgaaggtggcagctcgcttgtgaagggaatatatgccacgttgtggtgatgcccagtgtcaacattgacaagctagactatttcctgaacgaattagtggagaaacgggcgacttggtaccaggatggaataagtcaacccccctgcattgccagagtcgtaggctttgagaactgtctctgtggccgtcataagtagtgtgagccttttgcaaggggggtcattgatgagggagccattggcaattttgtcattatcatttgtgggcttcgccagtatgccatcggacccacaaatcatagacacagacggtcccaccagtcatagcaaatttctcttcatgaggtgcatgttgtactgtatccatgcgttctgtatgtgtgttctgcggtgtaggcgtgtagcttatttgttgtcatgagaataaagttccttctatcaaatttgatggatgcaagttgcatcaaggttggctcgtctgtgcggtgctaagaagattctctttgctttac

SEQ ID NO: 40038 - DNA, 1674 bp, Zea Mays
gtcccctccccaccccagccttctctctcgctgcgcggcgcctcctcacgcctccgcacttccgcagtctgtccccaaatctgtgcaagacctctcggcaaatcccctcgcggcgacgagacatggttgggagcgtgggcaacgggctggcggatttggacgcaggggccatctccatgaacggggtggggaaggctctgtatcctgccaaggcggcggcggcggccgccgcggagacgctccctgtggagctggagccgccggaggccgtagtggcgccgacgggggaggaggctgccaacgggaagagggagatagtgatggggaggaacgtgcacacctcctgcttcgccgtgaaggagcccgacgcggacgacgaggaaaccggcgagagggaggcgacgatggccagcatcctcgcgctctaccgccgctcgctcgttgaacgcaccaagcaccaccttggagggaggtgttccccaaaggaatattgtatgcttctcgtgagtcccattattcagtattcaaagcagcaagaatgtacaggatggattgcgtcaaagtcgacactcttatgtctggggaaatagattgtgctgatttccagagaaagttattgcagaaccgagacaaacctgccatcattaatgttaacattggaacaactgtgaagggggcagttgatgatctagatttggttatcaaaaccctcgaggagaacggctttaaaggtcggttttatattcattgtgatggtgccctctttggattgatgataccatttgttaagaaggcgcctcaagtgacatttaaaaagcctattgggagtgtcagtgtctctgggcacaagtttgttggatgccccatgccatgtggtgtccagataacaagattggagtacataaatgccctgtctagcaacgtggagtatctggcgtcaagggatgcaacaatcatgggaagcaggaacggccatgctcccatcttcctctggtacaccctcaacaggaagggctacagaggctttcagaaagaagtccagaagtgcttgagaaacgcacactacctaaaagatcgcctcaaggaagcaggaatcggagcgatgcttaacgagctcagtagcacagttgtgtttgaaaggccaaaggatgaagtatttgtccgaaggtggcagctcgcttgtgaagggaatatatgccacgttgtggtgatgcccagtgtcaacattgacaagctagactatttcctgaacgaattagtggagaaacgggcgacttggtaccaggatggaataagtcaacccccctgcattgccagagtcgtaggctttgagaactgtctctgtggccgtcataagtagtgtgagccttttgcaaggggggtcattgatgagggagccattggcaattttgtcattatcatttgtgggcttcgccagtatgccatcggacccacaaatcatagacacagacggtcccaccagtcatagcaaatttctcttcatgaggtgcatgttgtactgtatccatgcgttctgtatgtgtgttctgcggtgtaggcgtgtagcttatttgttgtcatgagaataaagttccttctatcaaatttgatggatgcaagttgcatcaaggttggctcgtctgtgcggtgctaagaagattctctttgctttac

SEQ ID NO: 40039 - DNA, 1612 bp, Zea Mays
gtcccctccccaccccagccttctctctcgctgcgcggcgcctcctcacgcctccgcacttccgcagtctgtccccaaatctgtgcaagacctctcggcaaatcccctcgcggcgacgagacatggttgggagcgtgggcaacgggctggcggatttggacgcaggggccatctccatgaacggggtggggaaggctctgtatcctgccaaggcggcggcggcggccgccgcggagacgctccctgtggagctggagccgccggaggccgtagtggcgccgacgggggaggaggctgccaacgggaagagggagatagtgatggggaggaacgtgcacacctcctgcttcgccgtgaaggagcccgacgcggacgacgaggaaaccggcgagagggaggcgacgatggccagcatcctcgcgctctaccgccgctcgctcgttgaacgcaccaagcaccaccttggagggaggtgttccccaaaggaatattgtatgcttctcgtgagtcccattattcagtattcaaagcagcaagaatgtacaggatggattgcgtcaaagtcgacactcttatgtctggggaaatagattgtgctgatttccagagaaagttattgcagaaccgagacaaacctgccatcattaatgttaacattggaacaactgtgaagggggcagttgatgatctagatttggttatcaaaaccctcgaggagaacggctttaaaggcgcctcaagtgacatttaaaaagcctattgggagtgtcagtgtctctgggcacaagtttgttggatgccccatgccatgtggtgtccagataacaagattggagtacataaatgccctgtctagcaacgtggagtatctggcgtcaagggatgcaacaatcatgggaagcaggaacggccatgctcccatcttcctctggtacaccctcaacaggaagggctacagaggctttcagaaagaagtccagaagtgcttgagaaacgcacactacctaaaagatcgcctcaaggaagcaggaatcggagcgatgcttaacgagctcagtagcacagttgtgtttgaaaggccaaaggatgaagtatttgtccgaaggtggcagctcgcttgtgaagggaatatatgccacgttgtggtgatgcccagtgtcaacattgacaagctagactatttcctgaacgaattagtggagaaacgggcgacttggtaccaggatggaataagtcaacccccctgcattgccagagtcgtaggctttgagaactgtctctgtggccgtcataagtagtgtgagccttttgcaaggggggtcattgatgagggagccattggcaattttgtcattatcatttgtgggcttcgccagtatgccatcggacccacaaatcatagacacagacggtcccaccagtcatagcaaatttctcttcatgaggtgcatgttgtactgtatccatgcgttctgtatgtgtgttctgcggtgtaggcgtgtagcttatttgttgtcatgagaataaagttccttctatcaaatttgatggatgcaagttgcatcaaggttggctcgtctgtgcggtgctaagaagattctctttgctttac

SEQ ID NO: 40040 - DNA, 1794 bp, Zea Mays
gtcccctccccaccccagccttctctctcgctgcgcggcgcctcctcacgcctccgcacttccgcagtctgtccccaaatctgtgcaagacctctcggcaaatcccctcgcggcgacgagacatggttgggagcgtgggcaacgggctggcggatttggacgcaggggccatctccatgaacggggtggggaaggctctgtatcctgccaaggcggcggcggcggccgccgcggagacgctccctgtggagctggagccgccggaggccgtagtggcgccgacgggggaggaggctgccaacgggaagagggagatagtgatggggaggaacgtgcacacctcctgcttcgccgtgaaggagcccgacgcggacgacgaggaaaccggcgagagggaggcgacgatggccagcatcctcgcgctctaccgccgctcgctcgttgaacgcaccaagcaccaccttggcagtttgaggttggagtgctggattggttcgctagcctctgggagttagaaaaagatgagtactggggatatattactaactgtggtacagaaggaaatctgcatgggattcttgttgggagggaggtgttccccaaaggaatattgtatgcttctcgtgagtcccattattcagtattcaaagcagcaagaatgtacaggatggattgcgtcaaagtcgacactcttatgtctggggaaatagattgtgctgatttccagagaaagttattgcagaaccgagacaaacctgccatcattaatgttaacattggaacaactgtgaagggggcagttgatgatctagatttggttatcaaaaccctcgaggagaacggctttaaaggtcggttttatattcattgtgatggtgccctctttggattgatgataccatttgttaagaaggcgcctcaagtgacatttaaaaagcctattgggagtgtcagtgtctctgggcacaagtttgttggatgccccatgccatgtggtgtccagataacaagattggagtacataaatgccctgtctagcaacgtggagtatctggcgtcaagggatgcaacaatcatgggaagcaggaacggccatgctcccatcttcctctggtacaccctcaacaggaagggctacagaggctttcagaaagaagtccagaagtgcttgagaaacgcacactacctaaaagatcgcctcaaggaagcaggaatcggagcgatgcttaacgagctcagtagcacagttgtgtttgaaaggccaaaggatgaagtatttgtccgaaggtggcagctcgcttgtgaagggaatatatgccacgttgtggtgatgcccagtgtcaacattgacaagctagactatttcctgaacgaattagtggagaaacgggcgacttggtaccaggatggaataagtcaacccccctgcattgccagagtcgtaggctttgagaactgtctctgtggccgtcataagtagtgtgagccttttgcaaggggggtcattgatgagggagccattggcaattttgtcattatcatttgtgggcttcgccagtatgccatcggacccacaaatcatagacacagacggtcccaccagtcatagcaaatttctcttcatgaggtgcatgttgtactgtatccatgcgttctgtatgtgtgttctgcggtgtaggcgtgtagcttatttgttgtcatgagaataaagttccttctatcaaatttgatggatgcaagttgcatcaaggttggctcgtctgtgcggtgctaagaagattctctttgctttac

SEQ ID NO: 40041 - DNA, 957 bp, Zea Mays
gttggagtgactcgattgagaaaccttccggccttcccccccggtggtcatcacatctcccccaattcgccgccccctccgacctcgccgtactcctctcgctccgggttaatcgctgctgtcttctgcagttgaagtagcctcttcatctgctcgccgcagttcgtccgttgcccatggcggatgaggaggtaactgatccaaaggcgttcctagaggaacgttcaaaggctaagtgtgtgtcgcagtggtatgaatatcagaaatgtgttaagaggattgagaatgacgagactgggcacaaacactgtaccggccagtactttgattactggaaatgtgttgacaagaatgttgcagaaaaactctttgagatgttaaaatgacaagaaaagttttccctacttcagttatccacccaaagttggtaataattgtatcacttgtgtggcctatagactattaaggcgctcaatatttgttagagaagttttgccacttgggtaacacaaattttccactgccagtttgcatttcatttctgctactagtattgaaccagcaggtttcctcctgcattgttggataaaaaatccatcgaatatttacaagattgtggctgattattaaatgctgtaatacaccttaattgcttttacggtgtattttgaggagcacatagcaaatcatttgggtcctaaacttggatgtgtcggaataacatttgtacatcacttctagctggtggaaatgattcatcatgagcagaagtttgtagtactgcactggaatgaaacattggcacagcatagcttttgtccagatgtgagttgatacgtggatgctgttatgagcagagcttgtggctatatattacagcatctcttgcatcctttttgtttgtgtgtttccatcaatgtatgtttactggccattgtatatggagttatctggtca

SEQ ID NO: 40042 - DNA, 2484 bp, Zea Mays
tcttctctcccagcgcccatctctctctctcctcgctgaagctcccatggcgttcggcgtccccagccatggccgcggctccctggagctcgcctgtctgctcacgacacacgcccagcgcctcgtcaagctcctccatgccggtgtccctgcttccgtactggccggcgagtggtctcgagctcccatggcgctcggacttctgctcgggttcaggctccctgcgcgcgagcctctgcgcgccctgtctctctcccttcgcgcgcgctgctccctgttggcccgcgcagtttcccggttgccgctcccggatttcttcctcggtgcctagctcggatttccctatccctccatggccggtcgttcctaccaatttccctggcctcgctcggtctgctgcctctgctccctgcgcgtccgactccgttcggccgagcgattttcccgtctttcgctgcgtcgcgcgctctccccagccgaggctcatgctccccacgcgtgtccctcggtctctactcggatttcgaccctgcccagctgttcctcctctctgctcgctctcctccatcgccgccgtgggctcgccggcgtggtccctgctctggccgccgtggtggcacgcgctgctcccctgagctctcccctgcgtacccggcctcaagtttcctcccatagcgccctgctccgtttactgctcgtcgcgcgcttggaatcctggctggcgctcagccccgttgtgcgcagatgaggttccgtcgtcaagcctgtcgaacctcgttcttctctgctcgatctcgtcgaaccccgaatcccggatattaaacaaaaataagtgaggtccctgtgtatcgcttatcaagtactcgattgaagacttcaatcgaagatcgtcgccgttccgcgtgtcatcaagaatcccaagaatcgggtgatgacgaagctagcagcgtgatattccccaagcgctcgataattgcttggatcggaaaatcactaccgatctcgcggattcgagtcggctattgaaacgatacgttaattaatcgcgtgatgcggaagatgagccaaatcgaccctaagcgcgggctaatccgcaggatgaagctgatgaactaatctaaagatggatagacgaaacaagtatcagaacaaggatgatcgtcaagtggacgtcacctaacaacactaacctagtgttattcaggcaaacccattgcatttatcacctccttgtgttttaaaaatctttttcacttgcttgatgcattaggtgataggagttgattgctaaaacaattcctgcattaccttccttggatttgattaccttccttgaaatccctgttttacaaaaagatttttgatgcttagccttgctttagaaaaacaaaatgttttatttttacaaaagatgatgtggcaaaagtgggtgggatgttttcgaaaataaaacttgatggtggatccatcatggccctgatgggttcaacatcggaaaagatgtacctttgccaggtaccaaactttgggtttgaaatgattaagctgagaccggacgggtgacttgcacgagaaaggagtctcggtgtagtgtctccgtctgagtcgattaaggaccgtgtcgatgtaggcttgatgaccgaggaccatttaactggtcacatgcctcgtcatgggtaagctttgcctcgggcagactaaggccataataagataacacgcaatgggagtggagcgatggtgagagtagcgtgtaccctccatggcaagaggctggacagtggtgtatctgtgctctcggttgacgtgaacctgatctggtcttaagaaccccggtggcaggttgacatatgcaagggttaagtgctacatatgtcgtgtgatcggagatcctcagctgagtataatcgattcagatcaccgtaccttcgcgggtatgaagacttggtcactgccctatacgtagaactccagtaaagctgaagggttgttaagaaattggctagtataggtcaagtgattgaactagggtagaaagaactttagttgcaggtaattttacttaacctgacaagtaaaaatggatttttaaggatccacttttagtaagcatttctgcaaaaccgagtctttgattattgataagccataccttgaatccctctagccagcatacccttgagagtcttttctttagtcgggtaagtcttgttgagtaattccatactcagggttttattccctgttgtttttcaggttatagttttgtgctgctgatgatggtgttaagtgacgttgggctcgtccttcttataagtctaagtacttcttctatacttcttattgaggatggtcacttgagctagcatatatttcaaacttatacttttgcaatcactctgataaaataatgtataatttttgtaacttgtaaaatttggtaataagttttcgctgcaaaaatattggtgtgtgatttgtgtt

SEQ ID NO: 40043 - DNA, 569 bp, Zea Mays
catcagtcatcaccttctcccacctcgtgtgtctgtttctccggcctgggctctgggctcgggcgtagtccagttgccaccaaccgagccagagagagaacaaagaacgggtgaaagaaatctcggaaaggttccagatttcctcgaggtggaggcctccttttcctcggccgaatcgctcgttcgctttctctctctctttcctcccatcgagcatgcattcttttctgctgctgcgaccgtaggatcggcgtccagcagcctcgccgcgtcgggttctaacctggctggtacaggtactctaggataagatgttgtgtcgtctcagtgtgctttgtgaataccattattacatcaatatcaacgaagagtttgttgtcttcatccgtgctttccaggtcgatttgatctaatgtaacgtgaagtttcagaaatgctttacgatagcatcagctggactgtgtactgtatgttgtatcgaacccttctttcttcactaacatacagtaccagatattcatcccttcaagctaccatttaaaaagcaagcttcatctgttttgaccatt

SEQ ID NO: 40044 - DNA, 1617 bp, Zea Mays
atttcttccttttccttgttcttttccaatttccctttatatgtaactgttgaggtttcaaatgcttttcagtcaagcaattggaatacaggatctattaaatttcacatattttatcattatagtttcatcacatgtacacatgttttataatcttcctgtccgctgttgtaatcattttctgtctttcaatctgaaatatcgacgattttctaaaatgaaatccaagctgtacacaagcaatgtcagcacatagacttggttgttgtgattatctaatcaatgatgtgttcatttaggtacggctgattgaatgacatctactatcatatgcatatttaatgttgtgttaagttaaatattgttatttgatgccattggccatcatattctttttcatactaattctacaatagtctgattgactgtgtctacctgtgcttttcctttagtaagtgcttgtgattgtttctttttctttgagtcatgtctatatggaaagcactattacttatctgtcattaactaatcttataatgttcattatttgggtaggaagagcaagacgttgctttaaaacaactaaggaagtcattggtgattagagcgaaacccatgccaagcttctatcaagaagggcccccaccaaaggctgaactgaagaaggtgcctcctacccgtgccaaatcgccaaagtttacaagttcaaggagaaggagctgcagtgatacactattgacacctgacggggaaaataccaatgcaacatctacccaaccacatcgtcatagtatcaggagtcctaaagacgctaacagagtacaacaatgctcgccaaagagcggtgtggcaaccaaaacaagatctgtcaaggctgagctgaaggccctctaaagagcatggagcagccgagcgctgtgtttctctgtacaaaccgaattgcctaaccgttcccatttccatgcatttttgcttctattttatacccaacatctccagcaaaagaaggctgtagggccaatgacgttgttcagcgccgctggaccttatccattttcttacattcgccttgtactcatccgcgtcacacgccaggagaacgcgctctgcactgccgcctcttttgaccgtgatgccgccaacgcgttccagctctacgtcgctgagttcctcggctttggcgtcaagcgggcgggtttcctctacggccgcgtcgacgtagagaccaaggatgtcttcgtcgactttatcgatgagccaccgcagcagggctccgaggacgtggtccacctcttgagggaccccgacgaggaggcccgcgtcgataccatcgctgaggggctcgggatgcgccgggtcggcttcgtgctcacgcaggccgttgggagaaaggccagcgagactggtgagtacaccatgtccaaccaggaggtcatgcaaattctaggcaaaggagttgggttaacatgggaagaggccaagctccaggtgaaactaacacatccttgtcgtcgtgctgattccagatcaaggggtagtgatccggaaggtggctatggtttttgtaagtacgagactcaagatcttgttcaaggaaggtggctatggtacttttga

SEQ ID NO: 40045 - DNA, 2318 bp, Zea Mays
attccatctagccagcccaatccacatcaccagcccacctcgtcgaactcgtcgtcttccgtccatccatcgtcgtcggcggcggcggagagagagcagatgacgtcctcggggacggtcgcgcagcagctgccgcggacggaggcgcggtcgctgtcgggtcacgagggagcggtgttggccgtgcggttcaaccgggacggcaattactgcctgagttgcggcaaggaccgcactctccgcctctggaatcctcacacaggcgcccaggtcaagacctacaagtcccacgcccgcgagggataacgccaaactggtgtcctgcggtgccgacagacaaatcttctattgggacgttgcctcgggccgcgtcatccgcaagttccgcggccacaacagcgaggtcaattcagtgaagtttaatgagtacaatgctgttgtagtctcagctggttatgaccgtacggtgcgtgcatttgactgcaggtctcaaaacaacgaccctattcagacaattgatacttttcaagatagtgtaatgtcagttaacctaacaaagacagaaataattgctggcagtgttgatggtactgtccgggcatttgacattcgcatggggagactgttgataatctagggcatcctgtgaactgtgtatcattatcaaatgacaacaattgccttttagctaactgtttagattctactgtgcggcttctagacaaccggctggctgctgatccattgttcctgggctcctggcgacttctcagttctcctcctccctgagaaaacatccagctgctgctgctgctgctcctccttgaccaacaagatgatgcagcttctcgggaagatgaagaacagccactgcaatctgatggaggatcaacggaaatggaagaatctgtcccaggtggtggtggagggcaagctactgctgatgcattccatttggatgaggatttgctactttaggtcttgagtttgattagctaagtacctaccgctgtttgagtttgaatgtttgattacttacttctgttcagactttaccctttagaggtgctactcaaggtgattgttgctgtaatgctgtttgagactttgagtactgctaaatagctactactgtttgagtttgagttaaatactgctgtagttttgattacctactgctgtttgaagtatattatatagtatataactatacactatagtgtatataactatatatatttatatatgtcctgattagtacaggatgtttaggactactaggtggacgacctgtcaccgattaatcggcctggtcgacgtcctaatcatgattactcgcctaatcggttaccatcaacgacatggataccaggcgacttgaaaaccatgtatgaatgtcaagtatgtgtggtacaatttattgtcatattatctttctatcatgatattgaagtgtggtttttctgttctgttgagtaaagtggtgccatctgttcaatgtactaaatagagggtcatcatgcacaaaatattaaccttttgctgtctcttgcgtttattaggtcatctggagaactgttacaggagtataagggacatacgtgcaagtccttcaagatggattcctgtctgacgaatgatgatgcatttgttgttggcgggtctgaggatggttatattttcttctgggagttggtggatgcacctgttgttgcaagattcagggcacatagttctgtggtaactagcatcagttaccacccaacaaaggcctgcatgttgacgtcttctgtggatggctctattcgtgtttggacctgaagactcttgaatggttgatgtgctattcgtactgttcctccaaatcatccagttatctagcagcaaggattcgacagtatgaaagatgaacgcatgtctaacctaatgggattcatacacgccttgctgcagagagaagaaaatgcgctgctgttgggctgtgtagcacacagctctgaggccaaaaccttttgaagccggtattctgtcatctatgaagtttgtgagccttttagatgattttggattgtacctgaagacaacttgtgagttgcatgaaaagtaacatttgttacgaagtttcttactgcaagtgtcttgtctccatgttactgaagacaacttatgggggttgagaaatgtatcttctagttcctttttttttgttttgatttggaatggaatgactaatgagttcatcgaccatcacatcatcctcacaagctaatactccatctgttctaaaatagttgttttaggtaattagtgggttcata

SEQ ID NO: 40046 - DNA, 1731 bp, Zea Mays
tccatctagccagcccaatccacatcaccagcccacctcgtcgaactcgtcgtcttccgtccatccatcgtcgtcggcggcggcggagagagagcagatgacgtcctcggggacggtcgcgcagcagctgccgcggacggaggcgcggtcgctgtcgggtcacgagggagcggtgttggccgtgcggttcaaccgggacggcaattactgcctgagttgcggcaaggaccgcactctccgcctctggaatcctcacacaggcgcccaggtcaagacctacaagtcccacgcccgcgaggtccgcgatgtgcactcttcctcggataacgccaaactggtgtcctgcggtgccgacagacaaatcttctattgggacgttgcctcgggccgcgtcatccgcaagttccgcggccacaacagcgagtctcagctggttatgaccgtacggtgcgtgcatttgactgcaggtctcaaaacaacgaccctattcagacaattgatacttttcaagatagtgtaatgtcagttaacctaacaaagacagaaataattgctggcagtgttgatggtactgtccgggcatttgacattcgcatggggagactgttgataatctagggcatcctgtgaactgtgtatcattatcaaatgacaacaattgccttttagctaactgtttagattctactgtgcggcttctagacaaccggctggctgctgatccattgttcctgggctcctggcgacttctcagttctcctcctccctgagaaaacatccagctgctgctgctgctgctcctccttgaccaacaagatgatgcagcttctcgggaagatgaagaacagccactgcaatctgatggaggatcaacggaaatggaagaatctgtcccaggtggtggtggagggcaagctactgctgatgcattccatttggatgaggatttgctactttaggtcttgagtttgattagtcatctggagaactgttacaggagtataagggacatacgtgcaagtccttcaagatggattcctgtctgacgaatgatgatgcatttgttgttggcgggtctgaggatggttatattttcttctgggagttggtggatgcacctgttgttgcaagattcagggcacatagttctgtggtaactagcatcagttaccacccaacaaaggcctgcatgttgacgtcttctgtggatggctctattcgtgtttggacctgaagactcttgaatggttgatgtgctattcgtactgttcctccaaatcatccagttatctagcagcaaggattcgacagtatgaaagatgaacgcatgtctaacctaatgggattcatacacgccttgctgcagagagaagaaaatgcgctgctgttgggctgtgtagcacacagctctgaggccaaaaccttttgaagccggtattctgtcatctatgaagtttgtgagccttttagatgattttggattgtacctgaagacaacttgtgagttgcatgaaaagtaacatttgttacgaagtttcttactgcaagtgtcttgtctccatgttactgaagacaacttatgggggttgagaaatgtatcttctagttcctttttttttgttttgatttggaatggaatgactaatgagttcatcgaccatcacatcatcctcacaagctaatactccatctgttctaaaatagttgttttaggtaattagtgggttcata

SEQ ID NO: 40047 - DNA, 1831 bp, Zea Mays
tccatctagccagcccaatccacatcaccagcccacctcgtcgaactcgtcgtcttccgtccatccatcgtcgtcggcggcggcggagagagagcagatgacgtcctcggggacggtcgcgcagcagctgccgcggacggaggcgcggtcgctgtcgggtcacgagggagcggtgttggccgtgcggttcaaccgggacggcaattactgcctgagttgcggcaaggaccgcactctccgcctctggaatcctcacacaggcgcccaggtcaagacctacaagtcccacgcccgcgagggataacgccaaactggtgtcctgcggtgccgacagacaaatcttctattgggacgttgcctcgggccgcgtcatccgcaagttccgcggccacaacagcgaggtcaattcagtgaagtttaatgagtacaatgctgttgtagtctcagctggttatgaccgtacggtgcgtgcatttgactgcaggtctcaaaacaacgaccctattcagacaattgatacttttcaagatagtgtaatgtcagttaacctaacaaagacagaaataattgctggcagtgttgatggtactgtccgggcatttgacattcgcatggggagactgttgataatctagggcatcctgtgaactgtgtatcattatcaaatgacaacaattgccttttagctaactgtttagattctactgtgcggcttctagacaaccggctggctgctgatccattgttcctgggctcctggcgacttctcagttctcctcctccctgagaaaacatccagctgctgctgctgctgctcctccttgaccaacaagatgatgcagcttctcgggaagatgaagaacagccactgcaatctgatggaggatcaacggaaatggaagaatctgtcccaggtggtggtggagggcaagctactgctgatgcattccatttggatgaggatttgctactttaggtcttgagtttgattagctaagtacctaccgctgtttgagtttgaatgtttgattacttacttctgttcagactttaccctttagaggtgctactcaaggtcatctggagaactgttacaggagtataagggacatacgtgcaagtccttcaagatggattcctgtctgacgaatgatgatgcatttgttgttggcgggtctgaggatggttatattttcttctgggagttggtggatgcacctgttgttgcaagattcagggcacatagttctgtggtaactagcatcagttaccacccaacaaaggcctgcatgttgacgtcttctgtggatggctctattcgtgtttggacctgaagactcttgaatggttgatgtgctattcgtactgttcctccaaatcatccagttatctagcagcaaggattcgacagtatgaaagatgaacgcatgtctaacctaatgggattcatacacgccttgctgcagagagaagaaaatgcgctgctgttgggctgtgtagcacacagctctgaggccaaaaccttttgaagccggtattctgtcatctatgaagtttgtgagccttttagatgattttggattgtacctgaagacaacttgtgagttgcatgaaaagtaacatttgttacgaagtttcttactgcaagtgtcttgtctccatgttactgaagacaacttatgggggttgagaaatgtatcttctagttcctttttttttgttttgatttggaatggaatgactaatgagttcatcgaccatcacatcatcctcacaagctaatactccatctgttctaaaatagttgttttaggtaattagtgggttcata

SEQ ID NO: 40048 - DNA, 2268 bp, Zea Mays
tccatctagccagcccaatccacatcaccagcccacctcgtcgaactcgtcgtcttccgtccatccatcgtcgtcggcggcggcggagagagagcagatgacgtcctcggggacggtcgcgcagcagctgccgcggacggaggcgcggtcgctgtcgggtcacgagggagcggtgttggccgtgcggttcaaccgggacggcaattactgcctgagttgcggcaaggaccgcactctccgcctctggaatcctcacacaggcgcccaggtcaagacctacaagtcccacgcccgcgagggataacgccaaactggtgtcctgcggtgccgacagacaaatcttctattgggacgttgcctcgggccgcgtcatccgcaagttccgcggccacaacagcgaggtcaattcagtgaagtttaatgagtacaatgctgttgtagtctcagctggttatgaccgtacggtgcgtgcatttgactgcaggtctcaaaacaacgaccctattcagacaattgatacttttcaagatagtgtaatgtcagttaacctaacaaagacagaaataattgctggcagtgttgatggtactgtccgggcatttgacattcgcatggggagactgttgataatctagggcatcctgtgaactgtgtatcattatcaaatgacaacaattgccttttagctaactgtttagattctactgtgcggcttctagacaattctcctcctccctgagaaaacatccagctgctgctgctgctgctcctccttgaccaacaagatgatgcagcttctcgggaagatgaagaacagccactgcaatctgatggaggatcaacggaaatggaagaatctgtcccaggtggtggtggagggcaagctactgctgatgcattccatttggatgaggatttgctactttaggtcttgagtttgattagctaagtacctaccgctgtttgagtttgaatgtttgattacttacttctgttcagactttaccctttagaggtgctactcaaggtgattgttgctgtaatgctgtttgagactttgagtactgctaaatagctactactgtttgagtttgagttaaatactgctgtagttttgattacctactgctgtttgaagtatattatatagtatataactatacactatagtgtatataactatatatatttatatatgtcctgattagtacaggatgtttaggactactaggtggacgacctgtcaccgattaatcggcctggtcgacgtcctaatcatgattactcgcctaatcggttaccatcaacgacatggataccaggcgacttgaaaaccatgtatgaatgtcaagtatgtgtggtacaatttattgtcatattatctttctatcatgatattgaagtgtggtttttctgttctgttgagtaaagtggtgccatctgttcaatgtactaaatagagggtcatcatgcacaaaatattaaccttttgctgtctcttgcgtttattaggtcatctggagaactgttacaggagtataagggacatacgtgcaagtccttcaagatggattcctgtctgacgaatgatgatgcatttgttgttggcgggtctgaggatggttatattttcttctgggagttggtggatgcacctgttgttgcaagattcagggcacatagttctgtggtaactagcatcagttaccacccaacaaaggcctgcatgttgacgtcttctgtggatggctctattcgtgtttggacctgaagactcttgaatggttgatgtgctattcgtactgttcctccaaatcatccagttatctagcagcaaggattcgacagtatgaaagatgaacgcatgtctaacctaatgggattcatacacgccttgctgcagagagaagaaaatgcgctgctgttgggctgtgtagcacacagctctgaggccaaaaccttttgaagccggtattctgtcatctatgaagtttgtgagccttttagatgattttggattgtacctgaagacaacttgtgagttgcatgaaaagtaacatttgttacgaagtttcttactgcaagtgtcttgtctccatgttactgaagacaacttatgggggttgagaaatgtatcttctagttcctttttttttgttttgatttggaatggaatgactaatgagttcatcgaccatcacatcatcctcacaagctaatactccatctgttctaaaatagttgttttaggtaattagtgggttcata

SEQ ID NO: 40049 - DNA, 1697 bp, Zea Mays
tccatctagccagcccaatccacatcaccagcccacctcgtcgaactcgtcgtcttccgtccatccatcgtcgtcggcggcggcggagagagagcagatgacgtcctcggggacggtcgcgcagcagctgccgcggacggaggcgcggtcgctgtcgggtcacgagggagcggtgttggccgtgcggttcaaccgggacggcaattactgcctgagttgcggcaaggaccgcactctccgcctctggaatcctcacacaggcgcccaggtcaagacctacaagtcccacgcccgcgaggtccgcgatgtgcactcttcctcggataacgccaaactggtgtcctgcggtgccgacagacaaatcttctattgggacgttgcctcgggccgcgtcatccgcaagttccgcggccacaacagcgaggtcaattcagtgaagtttaatgagtacaatgctgttgtagtctcagctggttatgaccgtacggtgcgtgcatttgactgcaggtctcaaaacaacgaccctattcagacaattgatacttttcaagatagtgtaatgtcagttaacctaacaaagacagaaataattgctggcagtgttgatggtactgtccgggcatttgacattcgcatgggtagggagactgttgataatctagggcatcctgtgaactgtgtatcattatcaaatgacaacaattgccttttagctaactgtttagattctactgtgcggcttctagacaaccggctggctgctgatccattgttcctgggctcctggcgacttctcagttctcctcctccctgagaaaacatccagctgctgctgctgctgctcctccttgaccaacaagatgatgcagcttctcgggaagatgaagaacagccactgcaatctgatggaggatcaacggaaatggaagaatctgtcccaggtcatctggagaactgttacaggagtataagggacatacgtgcaagtccttcaagatggattcctgtctgacgaatgatgatgcatttgttgttggcgggtctgaggatggttatattttcttctgggagttggtggatgcacctgttgttgcaagattcagggcacatagttctgtggtaactagcatcagttaccacccaacaaaggcctgcatgttgacgtcttctgtggatggctctattcgtgtttggacctgaagactcttgaatggttgatgtgctattcgtactgttcctccaaatcatccagttatctagcagcaaggattcgacagtatgaaagatgaacgcatgtctaacctaatgggattcatacacgccttgctgcagagagaagaaaatgcgctgctgttgggctgtgtagcacacagctctgaggccaaaaccttttgaagccggtattctgtcatctatgaagtttgtgagccttttagatgattttggattgtacctgaagacaacttgtgagttgcatgaaaagtaacatttgttacgaagtttcttactgcaagtgtcttgtctccatgttactgaagacaacttatgggggttgagaaatgtatcttctagttcctttttttttgttttgatttggaatggaatgactaatgagttcatcgaccatcacatcatcctcacaagctaatactccatctgttctaaaatagttgttttaggtaattagtgggttcata

SEQ ID NO: 40050 - DNA, 1775 bp, Zea Mays
tccatctagccagcccaatccacatcaccagcccacctcgtcgaactcgtcgtcttccgtccatccatcgtcgtcggcggcggcggagagagagcagatgacgtcctcggggacggtcgcgcagcagctgccgcggacggaggcgcggtcgctgtcgggtcacgagggagcggtgttggccgtgcggttcaaccgggacggcaattactgcctgagttgcggcaaggaccgcactctccgcctctggaatcctcacacaggcgcccaggtcaagacctacaagtcccacgcccgcgaggtccgcgatgtgcactcttcctcggataacgccaaactggtgtcctgcggtgccgacagacaaatcttctattgggacgttgcctcgggccgcgtcatccgcaagttccgcggccacaacagcgaggtcaattcagtgaagtttaatgagtacaatgctgttgtagtctcagctggttatgaccgtacggtgcgtgcatttgactgcaggtctcaaaacaacgaccctattcagacaattgatacttttcaagatagtgtaatgtcagttaacctaacaaagacagaaataattgctggcagtgttgatggtactgtccgggcatttgacattcgcatgggtagggagactgttgataatctagggcatcctgtgaactgtgtatcattatcaaatgacaacaattgccttttagctaactgtttagattctactgtgcggcttctagacaaccggctggctgctgatccattgttcctgggctcctggcgacttctcagttctcctcctccctgagaaaacatccagctgctgctgctgctgctcctccttgaccaacaagatgatgcagcttctcgggaagatgaagaacagccactgcaatctgatggaggatcaacggaaatggaagaatctgtcccaggtggtggtggagggcaagctactgctgatgcattccatttggatgaggatttgctactttaggtcttgagtttgattagtcatctggagaactgttacaggagtataagggacatacgtgcaagtccttcaagatggattcctgtctgacgaatgatgatgcatttgttgttggcgggtctgaggatggttatattttcttctgggagttggtggatgcacctgttgttgcaagattcagggcacatagttctgtggtaactagcatcagttaccacccaacaaaggcctgcatgttgacgtcttctgtggatggctctattcgtgtttggacctgaagactcttgaatggttgatgtgctattcgtactgttcctccaaatcatccagttatctagcagcaaggattcgacagtatgaaagatgaacgcatgtctaacctaatgggattcatacacgccttgctgcagagagaagaaaatgcgctgctgttgggctgtgtagcacacagctctgaggccaaaaccttttgaagccggtattctgtcatctatgaagtttgtgagccttttagatgattttggattgtacctgaagacaacttgtgagttgcatgaaaagtaacatttgttacgaagtttcttactgcaagtgtcttgtctccatgttactgaagacaacttatgggggttgagaaatgtatcttctagttcctttttttttgttttgatttggaatggaatgactaatgagttcatcgaccatcacatcatcctcacaagctaatactccatctgttctaaaatagttgttttaggtaattagtgggttcata

SEQ ID NO: 40051 - DNA, 2320 bp, Zea Mays
tccatctagccagcccaatccacatcaccagcccacctcgtcgaactcgtcgtcttccgtccatccatcgtcgtcggcggcggcggagagagagcagatgacgtcctcggggacggtcgcgcagcagctgccgcggacggaggcgcggtcgctgtcgggtcacgagggagcggtgttggccgtgcggttcaaccgggacggcaattactgcctgagttgcggcaaggaccgcactctccgcctctggaatcctcacacaggcgcccaggtcaagacctacaagtcccacgcccgcgagggataacgccaaactggtgtcctgcggtgccgacagacaaatcttctattgggacgttgcctcgggccgcgtcatccgcaagttccgcggccacaacagcgaggtcaattcagtgaagtttaatgagtacaatgctgttgtagtctcagctggttatgaccgtacggtgcgtgcatttgactgcaggtctcaaaacaacgaccctattcagacaattgatacttttcaagatagtgtaatgtcagttaacctaacaaagacagaaataattgctggcagtgttgatggtactgtccgggcatttgacattcgcatgggtagggagactgttgataatctagggcatcctgtgaactgtgtatcattatcaaatgacaacaattgccttttagctaactgtttagattctactgtgcggcttctagacaaccggctggctgctgatccattgttcctgggctcctggcgacttctcagttctcctcctccctgagaaaacatccagctgctgctgctgctgctcctccttgaccaacaagatgatgcagcttctcgggaagatgaagaacagccactgcaatctgatggaggatcaacggaaatggaagaatctgtcccaggtggtggtggagggcaagctactgctgatgcattccatttggatgaggatttgctactttaggtcttgagtttgattagctaagtacctaccgctgtttgagtttgaatgtttgattacttacttctgttcagactttaccctttagaggtgctactcaaggtgattgttgctgtaatgctgtttgagactttgagtactgctaaatagctactactgtttgagtttgagttaaatactgctgtagttttgattacctactgctgtttgaagtatattatatagtatataactatacactatagtgtatataactatatatatttatatatgtcctgattagtacaggatgtttaggactactaggtggacgacctgtcaccgattaatcggcctggtcgacgtcctaatcatgattactcgcctaatcggttaccatcaacgacatggataccaggcgacttgaaaaccatgtatgaatgtcaagtatgtgtggtacaatttattgtcatattatctttctatcatgatattgaagtgtggtttttctgttctgttgagtaaagtggtgccatctgttcaatgtactaaatagagggtcatcatgcacaaaatattaaccttttgctgtctcttgcgtttattaggtcatctggagaactgttacaggagtataagggacatacgtgcaagtccttcaagatggattcctgtctgacgaatgatgatgcatttgttgttggcgggtctgaggatggttatattttcttctgggagttggtggatgcacctgttgttgcaagattcagggcacatagttctgtggtaactagcatcagttaccacccaacaaaggcctgcatgttgacgtcttctgtggatggctctattcgtgtttggacctgaagactcttgaatggttgatgtgctattcgtactgttcctccaaatcatccagttatctagcagcaaggattcgacagtatgaaagatgaacgcatgtctaacctaatgggattcatacacgccttgctgcagagagaagaaaatgcgctgctgttgggctgtgtagcacacagctctgaggccaaaaccttttgaagccggtattctgtcatctatgaagtttgtgagccttttagatgattttggattgtacctgaagacaacttgtgagttgcatgaaaagtaacatttgttacgaagtttcttactgcaagtgtcttgtctccatgttactgaagacaacttatgggggttgagaaatgtatcttctagttcctttttttttgttttgatttggaatggaatgactaatgagttcatcgaccatcacatcatcctcacaagctaatactccatctgttctaaaatagttgttttaggtaattagtgggttcata

SEQ ID NO: 40052 - DNA, 1693 bp, Zea Mays
tccatctagccagcccaatccacatcaccagcccacctcgtcgaactcgtcgtcttccgtccatccatcgtcgtcggcggcggcggagagagagcagatgacgtcctcggggacggtcgcgcagcagctgccgcggacggaggcgcggtcgctgtcgggtcacgagggagcggtgttggccgtgcggttcaaccgggacggcaattactgcctgagttgcggcaaggaccgcactctccgcctctggaatcctcacacaggcgcccaggtcaagacctacaagtcccacgcccgcgaggtccgcgatgtgcactcttcctcggataacgccaaactggtgtcctgcggtgccgacagacaaatcttctattgggacgttgcctcgggccgcgtcatccgcaagttccgcggccacaacagcgaggtcaattcagtgaagtttaatgagtacaatgctgttgtagtctcagctggttatgaccgtacggtgcgtgcatttgactgcaggtctcaaaacaacgaccctattcagacaattgatacttttcaagatagtgtaatgtcagttaacctaacaaagacagaaataattgctggcagtgttgatggtactgtccgggcatttgacattcgcatggggagactgttgataatctagggcatcctgtgaactgtgtatcattatcaaatgacaacaattgccttttagctaactgtttagattctactgtgcggcttctagacaaccggctggctgctgatccattgttcctgggctcctggcgacttctcagttctcctcctccctgagaaaacatccagctgctgctgctgctgctcctccttgaccaacaagatgatgcagcttctcgggaagatgaagaacagccactgcaatctgatggaggatcaacggaaatggaagaatctgtcccaggtcatctggagaactgttacaggagtataagggacatacgtgcaagtccttcaagatggattcctgtctgacgaatgatgatgcatttgttgttggcgggtctgaggatggttatattttcttctgggagttggtggatgcacctgttgttgcaagattcagggcacatagttctgtggtaactagcatcagttaccacccaacaaaggcctgcatgttgacgtcttctgtggatggctctattcgtgtttggacctgaagactcttgaatggttgatgtgctattcgtactgttcctccaaatcatccagttatctagcagcaaggattcgacagtatgaaagatgaacgcatgtctaacctaatgggattcatacacgccttgctgcagagagaagaaaatgcgctgctgttgggctgtgtagcacacagctctgaggccaaaaccttttgaagccggtattctgtcatctatgaagtttgtgagccttttagatgattttggattgtacctgaagacaacttgtgagttgcatgaaaagtaacatttgttacgaagtttcttactgcaagtgtcttgtctccatgttactgaagacaacttatgggggttgagaaatgtatcttctagttcctttttttttgttttgatttggaatggaatgactaatgagttcatcgaccatcacatcatcctcacaagctaatactccatctgttctaaaatagttgttttaggtaattagtgggttcata

SEQ ID NO: 40053 - DNA, 749 bp, Zea Mays
cttcaataatcttcatttgtgatactgccaaaagatttgtccttcaagatggattcctgtctgacgaatgatgatgcatttgttgttggcgggtctgaggatggttatattttcttctgggagttggtggatgcacctgttgttgcaagattcagggcacatagttctgtggtaactagcatcagttaccacccaacaaaggcctgcatgttgacgtcttctgtggatggctctattcgtgtttggacctgaagactcttgaatggttgatgtgctattcgtactgttcctccaaatcatccagttatctagcagcaaggattcgacagtatgaaagatgaacgcatgtctaacctaatgggattcatacacgccttgctgcagagagaagaaaatgcgctgctgttgggctgtgtagcacacagctctgaggccaaaaccttttgaagccggtattctgtcatctatgaagtttgtgagccttttagatgattttggattgtacctgaagacaacttgtgagttgcatgaaaagtaacatttgttacgaagtttcttactgcaagtgtcttgtctccatgttactgaagacaacttatgggggttgagaaatgtatcttctagttcctttttttttgttttgatttggaatggaatgactaatgagttcatcgaccatcacatcatcctcacaagctaatactccatctgttctaaaatagttgttttaggtaattagtgggttcata

SEQ ID NO: 40054 - DNA, 2751 bp, Zea Mays
gtcctcagctacctggagccaaaatttccatgccttcaaagctttccagccattgttgcttcggaagctggcttcggtgaagtcatcttagacaattttcagttcactcaaattgctaggattcgatccaccacaaaactgatcacacctacctctttggaggctcgccaacatatcatgcctatctccaaagctatgaaggatttgtcatcatcaaagcctgctcaggagatgcctagggataggccttcgaaaccaatctatattgagattggtcgttccactttgagggagaaagacctgcaatctatgaagaagcttggttattttagcagtaaggtcaacatgcgcctcactggaaatgaaacaactctaaatccaggcaaagacgaagttgttgtgtatagaagcttctttaaggtaggacttcagcttctaaagtacaagatgattgtgaaggtactacaacgttatgaggtatatatgcatcaactaaatctgaatgccatagttcgccttagcgttttcatttgggttgtacgaagccagaggggtgtggcagccctcccaagttatcgggcccacgtgcaccaatctttgccataatggcctgagatggctatgcgcatgtaccatgtaacttaacaaggctatcacgagttcaacaacctaaactcattatcccaaagatctcccacattcatgtatattacagtgatcacattcgatacacacacacttcagagataagagtggaagactttataaaacattatttttatttctaaaactgaagtttattacatagaaagagttacatttattacaagtcctgatatactcaaagtgcaaaacttattacaatagcaggaaggtaggaaccctccaaagcttatacacaagcctaactaatcctactctagaactagaaacaccctccagcctcaggaacacctcgagtacttcttatcacctgcaataacatgggttcgaaaaccttgagtacggagtgtactttcgcaagtcttacctaactaaggaaaaatgactctcaaggatatgctggttaaataggaatcaaggaaaggcttgagcaagaatcaacttagatacttttgcagaaatagcttactaaagtgagtccttactttcaatattttaacaccggattaaatattaatagactctagttgcatgtagtctaatttcaccatctcatcaatacaacattatttttattcataatgtttacatcctgacctaggttgcaggtcagagatcaagtctccactgtccgaggatataatagcgatccgaatcgatttactcagctgaggatctctaaccacatgacatatgtttctcgtaactcttgcatatgtctaccattcccacggatcctccactgcatgaataggttcgcaccacccgagagcacaccaccccttttaggcggtactttgccaggagggtacgtgccactctcaccatctatccactcccagtgcccaattgtcttttcatgtatggaatagccgggttcaagcttaccttgtcccatatccagggcatgtggccagttaagatagtccttgatcatacatgcctacatacgcatccaatccttaattaacctgggtggagcatcacctattcctagcccaaatctcgagttaagtacttccacccttaggattgctttgtgttccttaggatgaatagagcattatggagaactttgcagtaagatcccaccatgctcctgatgaaaatattcttgcaggtagaggccatcctttctcaggataacccctgagctaggcattattgcaaaagaaaacctctatcgacaagatctaagctgggctaagcatttttgtaaacaatatttgatacttccgaagaagtatctataataggaatggatatcaaggtaggcaatgcatccaatagtttccaagcaattcctataaacttaacgcgcattttactagacttaaagtgtataaaaatcttttaaaaatacaaggaaggggcaaatgcatcggggcttgcctttgttgcagagacggaattctagatccctctatccaatacccagttagctggctccttcacttatcagcagccactggagtagactcctcctttcaacaccacttcatctggagtcttcacccttatgttgggagctctacatgaaatgacatgatcatggatgcttatgcagttgcaaagaagataacattaagtacctataactacaccaaaacccagagttcactaggtaatcttgtttcttcatccacaaaccaaacttctcttagtgaacttgcctctactcccaaaatactaatccatccttaaaccaaggacttttcttattctattttgcaccttacaaggttttctgagcaaatggcttccaaacaaccccaaacttttaacaagtgccaatatccttataaaaaagtctctccaaaaattttcataatttttggcgttatattcttatctctaaaattcaaataggccttccaagagcactatttaatcgcctacaatttggtaactgccctaaaaatcttaaaaccaactctaataggaagctcctgattttagatacccaaaacaattggtctcactatttgggatgcaattctcgggtgagggaaggcttcgctcgctcgctcaaaaagctctaacgctcgtttacgagcggagtgcataagcccttattgaagtagggcg

SEQ ID NO: 40055 - DNA, 929 bp, Zea Mays
tcatgtatattacagtgatcacattcgatacacacacacttcagagataagagtggaagactttataaaacattatttttatttctaaaactgaagtttattacatagaaagagttacatttattacaagtcctgatatactcaaagtgcaaaacttattacaatagcaggaaggtaggaaccctccaaagcttatacacaagcctaactaatcctactctagaactagaaacaccctccagcctcaggaacacctcgagtacttcttatcaccatccaagattcctatgctcgcgtgaagttgcttggagaaaacacaggttgttcggtccttggtgaagctgcccacggctccggtacgcggtggctcggtcatgttccaggcaccacaaagtagtagaattggaaataacaacactgtgtgtttcactggtgaatggagagtatagaacaggcacaacccggacaaacacctgtttgcgttgatctggccaaggcgaggtgggcaaatctggtgctacggtcaccactggtagaccatcacatgcaaactctaggactaggcagacttagcggctggggagaggagctttggcttgcaacatagtccatagagacaccaaagaagcaagctagaactcgaggaccacaaggcttcactggatcaacacttaagtagaggatagggaccaagataaagttcactgtacttgctcatgtgtggtggagaggaactctgagagtgccagcgtaacagggactcaaagacgtggctcccatgcactactaccttgctgggtcggcacaccactcacaaatatcacctttgtccagctttgtaggtagcagaccaaagagatatgtcttccacttggggatatgctcaaatggctcaaaactgatattttcaacagggagctggagagaag

SEQ ID NO: 40056 - DNA, 2091 bp, Zea Mays
actttataaaacattatttttatttctaaaactgaagtttattacatagaaagagttacatttattacaagtcctgatatactcaaagtgcaaaacttattacaatagcaggaaggtaggaaccctccaaagcttatacacaagcctaactaatcctactctagaactagaaacaccctccagcctcaggaacacctcgagtacttcttatcacctgcaataacatgggttcgaaaaccttgagtacggagtgtactttcgcaagtcttacctaactaaggaaaaatgactctcaaggatatgctggttaaataggaatcaaggaaaggcttgagcaagaatcaacttagatacttttgcagaaatagcttactaaagtgagtccttactttcaatattttaacaccggattaaatattaatagactctagttgcatgtagtctaatttcaccatctcatcaatacaacattatttttattcataatgtttacatcctgacctaggttgcaggtcagagatcaagtctccactgtccgaggatataatagcgatccgaatcgatttactcagctgaggatctctaaccacatgacatatgtttctcgtaactcttgcatatgtctaccattcccacggatcctccactgcatgaataggttcgcaccacccgagagcacaccaccccttttaggcggtactttgccaggagggtacgtgccactctcaccatctatccactcccagtgcccaattgtcttttcatgtatggaatagccgggttcaagcttaccttgtcccatatccagggcatgtggccagttaagatagtccttgatcatacatgcctacatacgcatccaatccttaattaacctgggtggagcatcacctattcctagcccaaatctcgagttaagtacttccacccttaggattgctttgtgttccttaggatgaatagagcattatggagaactttgcagtaagatcccaccatgctcctgatgaaaatattcttgcaggtagaggccatcctttctcaggataacccctgagctaggcattattgcaaaagaaaacctctatcgacaagatctaagctgggctaagcatttttgtaaacaatatttgatacttccgaagaagtatctataataggaatggatatcaaggtaggcaatgcatccaatagtttccaagcaattcctataaacttaacgcgcattttactagacttaaagtgtataaaaatcttttaaaaatacaaggaaggggcaaatgcatcggggcttgcctttgttgcagagacggaattctagatccctctatccaatacccagttagctggctccttcacttatcagcagccactggagtagactcctcctttcaacaccacttcatctggagtcttcacccttatgttgggagctcatccaagattcctatgctcgcgtgaagttgcttggagaaaacacaggttgttcggtccttggtgaagctgcccacggctccggtacgcggtggctcggtcatgttccaggcaccacaaagtagtagaattggaaataacaacactgtgtgtttcactggtgaatggagagtatagaacaggcacaacccggacaaacacctgtttgcgttgatctggccaaggcgaggtgggcaaatctggtgctacggtcaccactggtagaccatcacatgcaaactctaggactaggcagacttagcggctggggagaggagctttggcttgcaacatagtccatagagacaccaaagaagcaagctagaactcgaggaccacaaggcttcactggatcaacacttaagtagaggatagggaccaagataaagttcactgtacttgctcatgtgtggtggagaggaactctgagagtgccagcgtaacagggactcaaagacgtggctcccatgcactactaccttgctgggtcggcacaccactcacaaatatcacctttgtccagctttgtaggtagcagaccaaagagatatgtcttccacttggggatatgctcaaatggctcaaaactgatattttcaacagggagctggagagaag

SEQ ID NO: 40057 - DNA, 4489 bp, Zea Mays
aggaacacataccggctgcaactgcaagcaaccgtcgtttccgattccatgactctcagctgcctacatatggtgtatcaaggggtaaaaaaaaaaaaaaccaaacaaacgtgacaaaacatctgaattcagatcgctctcagtgaatctgaaatctgaatgctctcacgaagcctgccgactttctgctctcgctatgggctgcaggtaagatcctggagacagagcactgttatattgtgaactgcagtatgtgatataaattcattaaatatacacttcagctgcttcaccagtttcggaatggtaagatagatagatgcaaagtggaactgcagcacagaaacaattggagcatccttggcttgcaggagcgtgcatgtcgagacggagaacaaggatgagcaaggtatcaggcgaactgagtaaatgacacgtgacacacccgagtaagctatgaattgcgggcgtcgactataaatccggcgtgagcgtcgtcttgctcttgctcccagttgccttgccttgcctgtccccatcatggcctcaaacctcatctccgcctccagcctcgagacagagacagccatggcggatcctggcgaaggacctactgctccacccccgccacggctgcaggaaatagctcacgatgtgcccgaccatactgtcacgcaattttcagcctcacaagacactgaaaccgccgccggcgatgctgccacccacgactccgctcagcctaaagcggagtcggcccattgtgcggttggcgagccggagcaaaccacgacagaggcagacggtcagccacatgtcgcaaccatgccacaggaagttgccgcattgccgtcgccagctgagacaccggtgcaagagagtgcggcgcagcccacactgccgccgcagaagcaagaaagccctgttccagaactagcctcctcagtccacgaggaggagaaggacgcgtcaaaggcaaggggggacgaaggagaagagaagcccaccgcggcgcggaggccgcaactgaaagagactgtaaatttgggcgctgttgagcaaaccacgacacaggaagttgccgcattgccttcgccagctgagacaccggcgcaagagagtgcggcgaaggccacaccgccgccggagaagcaagaaggcggtgctccggaactagcctcctcggtccacgaggaggagaaggacgcgtcaaaggcaagtggggacgaaggactagagaagcctgcgagtcgtcggtggcgatggctccgcgccgtcgtgggcttgttatttctccgccccaaaagcggagagacgaagatgccgacaccgccgagcgacaagcagccggtgtcagggctggaggacacgaagcctacgacaggggagatgccgccgccccacaaggacagcggtagccctgtacttgttccatccaagcctgaagtggggaagaccgaaggcgagatgaagacggcggcggtggacgtcaagaagccggtgtcagggcaggaagaacagaagccagcggcgaagaagaagccgagccggaaatacagctctggcgctccaaggagggagatggaagacggcgaaaggagcaagggcggccgtgttgaaattgaaacccaagtggggaaggcgacaccacagctggaaggggagcgacctatgcgaaagaagctccagaaggcgatcaggttggttcagctcctcatgtccttgtacaacaagcaccgctcccaatcccaggagaagaagccagacacggcttccgatccaggtggtgaggaagacagcgaggccaggctagagtcggcgccggaagacaagaagccggcgtcagcagagcaggaagagcagaagccagcggcgaagaagaaaccgagccggaagtacagcgatggcgctgcacggaagttgaaggacgacggcgaaatgggcaagggccgccgtgatgaaatccaagtggggaaggctataccacagctggaaggggagcgccctatgcggaagaagctccagaaggcgatcaagctggttcagctcctcatgtccttgtacaacaagcaccgctcccaatcccaggataggaagccaggaacggcttctggtccgggtggggaggaagacagcgaggccaagcgagcgtcggcgccggaggaaaagaagccgcagcatcggaattggccacgagaggaagtgcgcctggagcacatcctcgaggaaactttcacaaggcttcttttgacagagtacaacaagcagctgagcggcgtgagtcagaagtgcctcctcaccttctccatcttcgagctcgcctccgaggtcaagaagcagatcatgatctattggtgggtcgcggagttcaacctccggcaccggagtgatccagcgcgggctctttctggcggtggcgaaacaagtgattcgccggcgctgcagggtaaaggcgcagacgctgctgacagcagagatgacgccgaaagcatcttcatcatgctttctgatcatggcttcctagtgccgatgaagaactggtgcagcaaggtgatccatggctgccaggtgaaccccctggtgcactggatgctgaagcgcatggcgagaggttgtcgcttcgccgagctggacgacaagggcagcccggaggacctgcaacccaattccaacatcctttgcctgacagcaggcaatcgccacgtgctgcaacagatgcacatggcggatgagtcacagacacaggccaaggccaggaagaaagatgagtcacagacacaaaccaagaagaaagatcactcacaggcctggggaaaaagcaaggtaacaaatgaaccttccatgcagggcaagggcaacgatgtccaggaccagcagcaaccggaggcacatgtcgggagcacatccacggcagcagcagataagacaccttcccagaaggacgaagacccaacccaagttacggaacagctaacaaataaggggcctcaagatgtgaagcccagctctgagcccgaacatggtgacgagattccgcctccatcatttgaagggaagcgagtgatcctaaacctcaatgcacatgtgtaccccatctgcaagtctgcattctccaaccttgccgaatgcttggttgtgctgcagctcggccggtggaacaatcttgacgacaagacatacatggaggtggatggactggagtcacgggatgccatcggctcgctcaagaaccttcggtacctgagcctccgtggtctatcacggctaacagagctcccaaaagggatcgagagccttaagaaacttgaaatcctggacatgcgaggctgccaaaacctagccagagtgtcggcaggtgtcatcaaacagttgaagcagcttacccatctggacctcaccgagtgctacatgttagagcacattggccgaggaatcacgtccctcacagagctgcaggtgttcaagggcttcgtgttcgcaaccgggactcgggggaaggaggcgtgccgaatacaagacctcagaaggctgaagaagctccagaagctcaccatttgcatcaccacggatgctaatgtaggcaagcgtgagatggcggatcttaagtacctcgctagccttcggaaactcacgattacatggagtgagataccaagcatactggagggtggcacgaagaaagcgagagagaagcgacgtggacttgttaagacgtggaccagctttcagttgccaccagacctcatgaaattggacatccggtgctaccccaaggaagagctagaactcgaatgcaacgagaagctcgagaggctctacttgagaggtggagacatgagaaggtgttccacgaaggaaccatcctccatcaagacactgcgtttgaggtatctcaggcactttgagatggggtggagtgatatccgttcaaaattcgagaaacttgaatatgtggaaatcgtagttaatgataagaatccgatggagataccagattttacattggattgggatggggtatggaccaaggatgagaaggaagagcataataaccaccagaggttgcaggcggcgcctaataaaaaagacgttgggatggataaggatgttcaggacgatggcagcgggaatcacaaagaaccaactaaagctgctagcaccatcacaaaggttaataaggacaaagctgctaccaaagaacgggcaggcaaacaagaacgagtagcaagtcggaagggaccgtgatagttagaagatagatccaatttctacagacggcacatttgaatctcttcattttagacaaattgtaattcatattataaattaacctatttagctttaaattttacattccaccacttttcaaagttcagatataagtctatcttaaattcatggagtggagtatgtgaaataattttgtgtattaatagcatttgtttctactctgtaacttacagaacattcttcgactcattcctctaca

SEQ ID NO: 40058 - DNA, 2501 bp, Zea Mays
tgatctcgtttggtttggtcatgtgtttctcgcccagattcaaaacttcggatataaatagcaggtgaaaatttatctgactccgaaatattcactaaattaaatccggtttaaatattgttgtcgatcttatttggttcgacccttttatatatcttttagacccttattttatatcccaaaatatctgcatttcactctgataaaagaagtaaaaatgggaaatatctttccggatttttcctgaaccgttcctatccccaagccgccctctctctctatttattttctcttcgtctctatcctaccgccgcccagtcttctgcctggtgaacgtggcagctcccttgcgtgcctatccgccaccttgccggtctggccgtagatttcttcctctcccctgcgacctcccctagtccgaccccaagctgagctccatcccgcgtcaagtcttcaagcttcatccaagcagtgtgcttttcctccatccgtgcaaacacccagccgctgtcatgcatggtgcttctctatctctccagccgtcagccattcattcttgctccaacgtgctcaacgtccagacttcatcctccttgccgcagttttggtcccgctttggagctcgctggtgtcgtatggtccagccatctctgttctccttgtctccaaacaccatgccgtctcagcaacactcgaccatcacgttggccctgcgtcctcccatctccctgctagccgcgcgccgcgctcctctgttgggcttgccagccgctgttgtcgtatccgcatcagcacgcgaccgtggtcgtgtttatcgagttgtcgccaacactctgttgctgattcgactgtcgttgcggttgtgtgccttgttgcgtgctcgttgtggtgtcgtctattgtactcctgcactcgcctagccgcttgtgccaacttcggccatcacgatgtctgctccatcccgacaccctgcgcttgtgcttgacaaaaagcccaaacgtgttgccacgccattatttccttcaaatagaattgtcgtgccaccacgtcgatgtcgtcgatcgtcatactcgtctacgccaagatccaagaagattaggcgtagaagaaaataaatcagtacgcggccggagaattctcgatgtagatgaagaagaagcaagactcgacgcagcactcaccctattttcggtgaaatgctgagctgaaaggagtcgtcgatttcgtggttgcaagtttgatttaatatggtttaatttgtctcatttctggaagcaccatgaccatgattcagaaagtttgcacaagtccaagcatgttccaagcattccaaaggaccttgtatgcacttatgatgagctatcagttaattagggtaactggtactaccttgatggcactgggcatgagcttggtccattttcttattttgaattagaagaattagttgataatttgaatggtgcataatattacatggacagaacaaatataataatttgaatatagaaacaggatatcattataaatgagttgcttgcctaaatcaaagatatgcctagcaacataatctctgttgtctagaagttgttctaaagtagatcaagaaggtgagagtctatggacgacttgaaataagttatatccaaagaatggtatagtagactgctgattgttaaaatataccacaattttttgtcgataggaacacaaccaacacatataaattctaataacagttccaatatgctattagaatttttctagtgaatgcccatgacattgattaaccaaaagaatattgaaaaaagacaaaagcaaatgatacagaaaaggaagtgactaacataacacaaacaaaaaccatccttgttatttgtaaaatagcaccagcccaaaaacatttttctgagcataatagcaacaataagccttggaaagtaaaggtgcatactgccaataaaagcgatgggaacaagatttagaactatgcatacaccgatttccttcttggtttgaagtgcaaaacaatatatcttttaacccctgttatgatgtagaaccgaaccctttgttgttcaattgaaacttcaatgtaatcatccaaatttagaagtcaagaaagatcacacccagtttcctctagaacttgtattgttattcaagtagatattagttcgcaaaaaaagctaatatgtgttgggggccttcgtcctccgaaggtcctcaaaaacatgatttgacaatgttttccaagtgaattatatgaacaggtattttcggattcagaattatggatatggagcacgaccaggacgaaggctgagccagacgaaggtcgggggcagccgaagctgtacgcagggaagcttcggcgcgatggcacaagggggaaccgaccttaagatgaaaagacttcggggtcctcaatagatttccataaaccgttaacaaatgtaatggacatggatgtaattttacgtgggctgcgtcccgcgtct

SEQ ID NO: 40059 - DNA, 1324 bp, Zea Mays
gcaaatttaagaaatacttcaatgtacgcacgaaaaagataaggtcaatattagccccaaggccaaataacaggtttaatttgtctcatttctggaagcaccatgaccatgattcagaaagtttgcacaagtccaagcatgttccaagcattccaaaggaccttgtatgcacttatgatgagctatcagttaattagggtaactggtactaccttgatggcactgggcatgagcttggtccattttcttattttgaattagaagaattagttgataatttgaatggtgcataatattacatggacagaacaaatataataatttgaatatagaaacaggatatcattataaatgagttgcttgcctaaatcaaagatatgcctagcaacataatctctgttgtctagaagttgttctaaagtagatcaagaaggtgagagtctatggacgacttgaaataagttatatccaaagaatggtatagtagactgctgattgttaaaatataccacaattttttgtcgataggaacacaaccaacacatataaattctaataacagttccaatatgctattagaatttttctagtgaatgcccatgacattgattaaccaaaagaatattgaaaaaagacaaaagcaaatgatacagaaaaggaagtgactaacataacacaaacaaaaaccatccttgttatttgtaaaatagcaccagcccaaaaacatttttctgagcataatagcaacaataagccttggaaagtaaaggtgcatactgccaataaaagcgatgggaacaagatttagaactatgcatacaccgatttccttcttggtttgaagtgcaaaacaatatatcttttaacccctgttatgatgtagaaccgaaccctttgttgttcaattgaaacttcaatgtaatcatccaaatttagaagtcaagaaagatcacacccagtttcctctagaacttgtattgttattcaagtagatattagttcgcaaaaaaagctaatatgtgttgggggccttcgtcctccgaaggtcctcaaaaacatgatttgacaatgttttccaagtgaattatatgaacaggtattttcggattcagaattatggatatggagcacgaccaggacgaaggctgagccagacgaaggtcgggggcagccgaagctgtacgcagggaagcttcggcgcgatggcacaagggggaaccgaccttaagatgaaaagacttcggggtcctcaatagatttccataaaccgttaacaaatgtaatggacatggatgtaattttacgtgggctgcgtcccgcgtct

SEQ ID NO: 40060 - DNA, 1715 bp, Zea Mays
cccaccccaccccaccgtgttgagcttggagtcggacggcgcttgagagtcgccgggtcgggcatggcatccataggcatacatctcctcgcggagcctggggtggggcggtcaccaccatgcctaatcctatcgcaccaaggagtctgtctcgtgctcctcgtagtcttcctacccacccctccacccccccccccccccctttgcccccaatccctagccctgcccctctcctccagcgccgcgcgccggctctatgcgcccgccgcccccggagatgcatatcacacgccgccgttaccgctgggtgaaggagtgggtcccgcaagatctggtcgtcaccggaggcccctgcacgctctacaagtgggtgcgagaggatagactggcagctttgaaggctaaggataaggagcagggggcagcatctgcaatgcctgaaccaaactctgaggttctcttcctgtgcagctacgaaggatgtgggaagacatttttttgatgtaggggctcttaagaagcacgctcatgtccatggggagaggcaatatatctgccactatgagaactgtggcaagaaattcttagatagctctaagttgaagagacattttcttatccatactggagagaagaattttgtgtgcccacatgaaggttgtgggagggcattttcgttggattttaatttaaaggcacacatgaaaacacattctgcagataactatcatgtgtgccagtacccagaatgtggccgaagatttacacaagaatcaaaactgagagctcatatcagggcacaacatgagaaaaatccaggtgcgtcatcaatgaaccacagtgcaattggaggtccgcaccagccccctaggccagcgaaggtctcagcagcacctccagctccctcagctgagcgcccttacgtctgcccctacgatggttgtgacaaggcatacatccatgagtacaagttgaacctccatctgaaaaaagagcatcccaaccactaccaggatggtggtccaaatggtgctgccgccccttcaaagcgcagcatctcgaagagttcccacaggagcaagctggacatcacctctaggatgccaccggccaacatccccaagcacagagggtatgcaacaccattgccagctgtggtgagcctccctgaggagcagcagttgctaaggaaagtggtgtacgaggatgacagcgaggagactgaagaagagggggataacaatggcgaggacagatggaactacaagagagctgctagcagcgacgacgaggaaaccgaagacgaagaatgagctgctagcagggattcatttttttttcttctgtagctgtgcatataccataatctatagactggtggttatagatttcaatacatgtacatttttaaaatacggctggcctatagtagacaagaggttgttgctgccatgccccttctcaactacacaggccatgagttcagaaaggataatggatcattgctcccgtctgcctgtgtttgtgccttttggtttgttgtcataaatgagttctcagttatcgtagccctgattgagtggatgtcaacagatctcgtcaaccgtacatttgtatgagcatgccatgtttactttgagaaatttatgcatccaccggtttcagaatatggaagtgtgcgatagtgtgttcatggaagacaaaggtggtttgag

SEQ ID NO: 40061 - DNA, 1486 bp, Zea Mays
ctcgtgctcctcgtagtcttcctacccacccctccacccccccccccccccctttgcccccaatccctagccctgcccctctcctccagcgccgcgcgccggctctatgcgcccgccgcccccggagatgcatatcacacgccgccgttaccgctgggtgaaggagtgggtcccgcaagatctggtcgtcaccggaggcccctgcacgctctacaagtgggtgcgagctacgaaggatgtgggaagacatttttttgatgtaggggctcttaagaagcacgctcatgtccatggggagaggcaatatatctgccactatgagaactgtggcaagaaattcttagatagctctaagttgaagagacattttcttatccatactggagagaagaattttgtgtgcccacatgaaggttgtgggagggcattttcgttggattttaatttaaaggcacacatgaaaacacattctgcagataactatcatgtgtgccagtacccagaatgtggccgaagatttacacaagaatcaaaactgagagctcatatcagggcacaacatgagaaagctgttggcttgcagaatccaggtgcgtcatcaatgaaccacagtgcaattggaggtccgcaccagccccctaggccagcgaaggtctcagcagcacctccagctccctcagctgagcgcccttacgtctgcccctacgatggttgtgacaaggcatacatccatgagtacaagttgaacctccatctgaaaaaagagcatcccaaccactaccaggatggtggtccaaatggtgctgccgccccttcaaagcgcagcatctcgaagagttcccacaggagcaagctggacatcacctctaggatgccaccggccaacatccccaagcacagagggtatgcaacaccattgccagctgtggtgagcctccctgaggagcagcagttgctaaggaaagtggtgtacgaggatgacagcgaggagactgaagaagagggggataacaatggcgaggacagatggaactacaagagagctgctagcagcgacgacgaggaaaccgaagacgaagaatgagctgctagcagggattcatttttttttcttctgtagctgtgcatataccataatctatagactggtggttatagatttcaatacatgtacatttttaaaatacggctggcctatagtagacaagaggttgttgctgccatgccccttctcaactacacaggccatgagttcagaaaggataatggatcattgctcccgtctgcctgtgtttgtgccttttggtttgttgtcataaatgagttctcagttatcgtagccctgattgagtggatgtcaacagatctcgtcaaccgtacatttgtatgagcatgccatgtttactttgagaaatttatgcatccaccggtttcagaatatggaagtgtgcgatagtgtgttcatggaagacaaaggtggtttgag

SEQ ID NO: 40062 - DNA, 1518 bp, Zea Mays
ctttgcccccaatccctagccctgcccctctcctccagcgccgcgcgccggctctatgcgcccgccgcccccggagatgcatatcacacgccgccgttaccgctgggtgaaggagtgggtcccgcaagatctggtcgtcaccggaggcccctgcacgctctacaagtgggtgcgagaggatagactggcagctttgaaggctaaggataaggagcagggggcagcatctgcaatgcctgaaccaaactctgaggttctcttcctgtgcagctacgaaggatgtgggaagacatttttttgatgtaggggctcttaagaagcacgctcatgtccatggggagaggcaatatatctgccactatgagaactgtggcaagaaattcttagatagctctaagttgaagagacattttcttatccatactggagagaagaattttgtgtgcccacatgaaggcattttcgttggattttaatttaaaggcacacatgaaaacacattctgcagataactatcatgtgtgccagtacccagaatgtggccgaagatttacacaagaatcaaaactgagagctcatatcagggcacaacatgagaaagctgttggcttgcagaatccaggtgcgtcatcaatgaaccacagtgcaattggaggtccgcaccagccccctaggccagcgaaggtctcagcagcacctccagctccctcagctgagcgcccttacgtctgcccctacgatggttgtgacaaggcatacatccatgagtacaagttgaacctccatctgaaaaaagagcatcccaaccactaccaggatggtggtccaaatggtgctgccgccccttcaaagcgcagcatctcgaagagttcccacaggagcaagctggacatcacctctaggatgccaccggccaacatccccaagcacagagggtatgcaacaccattgccagctgtggtgagcctccctgaggagcagcagttgctaaggaaagtggtgtacgaggatgacagcgaggagactgaagaagagggggataacaatggcgaggacagatggaactacaagagagctgctagcagcgacgacgaggaaaccgaagacgaagaatgagctgctagcagggattcatttttttttcttctgtagctgtgcatataccataatctatagactggtggttatagatttcaatacatgtacatttttaaaatacggctggcctatagtagacaagaggttgttgctgccatgccccttctcaactacacaggccatgagttcagaaaggataatggatcattgctcccgtctgcctgtgtttgtgccttttggtttgttgtcataaatgagttctcagttatcgtagccctgattgagtggatgtcaacagatctcgtcaaccgtacatttgtatgagcatgccatgtttactttgagaaatttatgcatccaccggtttcagaatatggaagtgtgcgatagtgtgttcatggaagacaaaggtggtttgag

SEQ ID NO: 40063 - DNA, 1529 bp, Zea Mays
ctttgcccccaatccctagccctgcccctctcctccagcgccgcgcgccggctctatgcgcccgccgcccccggagatgcatatcacacgccgccgttaccgctgggtgaaggagtgggtcccgcaagatctggtcgtcaccggaggcccctgcacgctctacaagtgggtgcgagaggatagactggcagctttgaaggctaaggataaggagcagggggcagcatctgcaatgcctgaaccaaactctgaggttctcttcctgtgcagctacgaaggatgtgggaagacatttttttgatgtaggggctcttaagaagcacgctcatgtccatggggagaggcaatatatctgccactatgagaactgtggcaagaaattcttagatagctctaagttgaagagacattttcttatccatactggagagaagaattttgtgtgcccacatgaaggttgtgggagggcattttcgttggattttaatttaaaggcacacatgaaaacacattctgcagataactatcatgtgtgccagtacccagaatgtggccgaagatttacacaagaatcaaaactgagagctcatatcagggcacaacatgagaaagctgttggcttgcagaatccaggtgcgtcatcaatgaaccacagtgcaattggaggtccgcaccagccccctaggccagcgaaggtctcagcagcacctccagctccctcagctgagcgcccttacgtctgcccctacgatggttgtgacaaggcatacatccatgagtacaagttgaacctccatctgaaaaaagagcatcccaaccactaccaggatggtggtccaaatggtgctgccgccccttcaaagcgcagcatctcgaagagttcccacaggagcaagctggacatcacctctaggatgccaccggccaacatccccaagcacagagggtatgcaacaccattgccagctgtggtgagcctccctgaggagcagcagttgctaaggaaagtggtgtacgaggatgacagcgaggagactgaagaagagggggataacaatggcgaggacagatggaactacaagagagctgctagcagcgacgacgaggaaaccgaagacgaagaatgagctgctagcagggattcatttttttttcttctgtagctgtgcatataccataatctatagactggtggttatagatttcaatacatgtacatttttaaaatacggctggcctatagtagacaagaggttgttgctgccatgccccttctcaactacacaggccatgagttcagaaaggataatggatcattgctcccgtctgcctgtgtttgtgccttttggtttgttgtcataaatgagttctcagttatcgtagccctgattgagtggatgtcaacagatctcgtcaaccgtacatttgtatgagcatgccatgtttactttgagaaatttatgcatccaccggtttcagaatatggaagtgtgcgatagtgtgttcatggaagacaaaggtggtttgag

SEQ ID NO: 40064 - DNA, 1369 bp, Zea Mays
caattctttaaagacaggtggagcaagcaagaggatagactggcagctttgaaggctaaggataaggagcagggggcagcatctgcaatgcctgaaccaaactctgaggttctcttcctgtgcagctacgaaggatgtgggaagacatttttttgatgtaggggctcttaagaagcacgctcatgtccatggggagaggcaatatatctgccactatgagaactgtggcaagaaattcttagatagctctaagttgaagagacattttcttatccatactggagagaagaattttgtgtgcccacatgaaggttgtgggagggcattttcgttggattttaatttaaaggcacacatgaaaacacattctgcagataactatcatgtgtgccagtacccagaatgtggccgaagatttacacaagaatcaaaactgagagctcatatcagggcacaacatgagaaaaatccaggtgcgtcatcaatgaaccacagtgcaattggaggtccgcaccagccccctaggccagcgaaggtctcagcagcacctccagctccctcagctgagcgcccttacgtctgcccctacgatggttgtgacaaggcatacatccatgagtacaagttgaacctccatctgaaaaaagagcatcccaaccactaccaggatggtggtccaaatggtgctgccgccccttcaaagcgcagcatctcgaagagttcccacaggagcaagctggacatcacctctaggatgccaccggccaacatccccaagcacagagggtatgcaacaccattgccagctgtggtgagcctccctgaggagcagcagttgctaaggaaagtggtgtacgaggatgacagcgaggagactgaagaagagggggataacaatggcgaggacagatggaactacaagagagctgctagcagcgacgacgaggaaaccgaagacgaagaatgagctgctagcagggattcatttttttttcttctgtagctgtgcatataccataatctatagactggtggttatagatttcaatacatgtacatttttaaaatacggctggcctatagtagacaagaggttgttgctgccatgccccttctcaactacacaggccatgagttcagaaaggataatggatcattgctcccgtctgcctgtgtttgtgccttttggtttgttgtcataaatgagttctcagttatcgtagccctgattgagtggatgtcaacagatctcgtcaaccgtacatttgtatgagcatgccatgtttactttgagaaatttatgcatccaccggtttcagaatatggaagtgtgcgatagtgtgttcatggaagacaaaggtggtttgag

SEQ ID NO: 40065 - DNA, 1327 bp, Zea Mays
agtccaccggcatttggaacttgttcgcgagtcgcgactcgcccagccgccccttccgagttccgacgccgataccgtgactccgctcgctccattccgctcctaccgccgctggccgccgcaccattcgatccctgtttcttaatccggcggccggcctggagccctcagctcaacactcggcagatcatctcggctgttcgcctactttcttcttccccacggtcgttcgcgtgcagcacggccggcggtaccggaacagggcccagccggagcagcggtgccgtcccggcccggctgccttttgctactgctaacatcccaggacgcagtccggaagctgtagctcctttccggtggtctggtcttcacgctccaccatgaagatagcctggggtaagaaatctaaggttaagaagcagtcagtggttgtatcaactataccaggcctaccatttggagcggggagtgacaacgatgaggttgaaacggaggaaaaatcagatgcaaacacaaactgtcctggaacaaagccagttgaaactgctgagttgctccagagtcagggagacaagctagccgaggaagggaagtaccatgaagcacttgctaaatgggaggctgctctgatcttgatgcctgataatgcgatacttcatgagcagaaagctcaggttttacttgaagtgggagatgcatggcgtgcactgacagcagcaaccagagcaacagaactggatccattttggcctgaggcttgggttacacttggtagagctcaattaaattttggggagccagattcagctatactgacttttgacaaggcgttagctatgaagcctgactacaccgacgcaaaagctgaccgtgaaactgctgctcgcctagtcaagaaacgaggacagctgcatacgtcaggtttaagtgctaacaaaagacgcttcacagttggggagtacccaaaggagggaggtgcagagggtgaagaaaaagggaaagaaacagccgagcaactccaaaagatcacccaagaaaattagctaaattaactgattttgttactgtgtaaaatagatattacaaaaaaatattacattagtgttggtcacctgctttaattcgtaaagggaaccataacaaggcaatacaattaaagataatcggccttcgttttcctaatctatctaatagataaattaagggaggaggattatggtaatccaagaccttcgaataataaaataggaatgtctgatgagaatcattactgttgtgtctctttattattctttccttatgacaaataattataggtagggatgga

SEQ ID NO: 40066 - DNA, 1618 bp, Zea Mays
agtccaccggcatttggaacttgttcgcgagtcgcgactcgcccagccgccccttccgagttccgacgccgataccgtgactccgctcgctccattccgctcctaccgccgctggccgccgcaccattcgatccctgtttcttaatccggcggccggcctggagccctcagctcaacactcggcagatcatctcggctgttcgcctactttcttcttccccacggtcgttcgcgtgcagcacggccggcggtaccggaacagggcccagccggagcagcggtgccgtcccggcccggctgccttttgctactgctaacatcccaggacgcagtccggaagctgtagctcctttccggtggtctggtcttcacggttctactcctattcgtctgcttcaatccagctgcgtcatctaatttatggcaaggcgtcgcctaggcgtccaggcggccaaagaagtctaggcgtccccgtcgcctagccaagagtcagcaagagaggcaagaggggaggggaagaagcctagcagagactttggggagcgggatcggcggcgcagagcttgggggagtgccgagctcgggggagcagcagtgctgagactcgggggagcgctgagcttgggggagcaggagcagcgatgttgtgacaggagtggcaatgctccaccatgaagatagcctggggtaagaaatctaaggttaagaagcagtcagtggttgtatcaactataccaggcctaccatttggagcggggagtgacaacgatgaggttgaaacggaggaaaaatcagatgcaaacacaaactgtcctggaacaaagccagttgaaactgctgagttgctccagagtcagggagacaagctagccgaggaagggaagtaccatgaagcacttgctaaatgggaggctgctctgatcttgatgcctgataatgcgatacttcatgagcagaaagctcaggttttacttgaagtgggagatgcatggcgtgcactgacagcagcaaccagagcaacagaactggatccattttggcctgaggcttgggttacacttggtagagctcaattaaattttggggagccagattcagctatactgacttttgacaaggcgttagctatgaagcctgactacaccgacgcaaaagctgaccgtgaaactgctgctcgcctagtcaagaaacgaggacagctgcatacgtcaggtttaagtgctaacaaaagacgcttcacagttggggagtacccaaaggagggaggtgcagagggtgaagaaaaagggaaagaaacagccgagcaactccaaaagatcacccaagaaaattagctaaattaactgattttgttactgtgtaaaatagatattacaaaaaaatattacattagtgttggtcacctgctttaattcgtaaagggaaccataacaaggcaatacaattaaagataatcggccttcgttttcctaatctatctaatagataaattaagggaggaggattatggtaatccaagaccttcgaataataaaataggaatgtctgatgagaatcattactgttgtgtctctttattattctttccttatgacaaataattataggtagggatgga

SEQ ID NO: 40067 - DNA, 1403 bp, Zea Mays
gagaatagaagcatgttttgagatagtgtccaacatgctgtatactagtacatatgtctaacacatagattatatatttgtttttgtgccaaaagttttgggcgttcaactgaatgccttgaatctgtgtaggtccacccctggcagccctgcacagaccccatcacattggcaacgtctccggaagaccgaaacgaaccacacacatgcaaggcgtcgcctaggcgtccaggcggccaaagaagtctaggcgtccccgtcgcctagccaagagtcagcaagagaggcaagaggggaggggaagaagcctagcagagactttggggagcgggatcggcggcgcagagcttgggggagtgccgagctcgggggagcagcagtgctgagactcgggggagcgctgagcttgggggagcaggagcagcgatgttgtgacaggagtggcaatgctccaccatgaagatagcctggggtaagaaatctaaggttaagaagcagtcagtggttgtatcaactataccaggcctaccatttggagcggggagtgacaacgatgaggttgaaacggaggaaaaatcagatgcaaacacaaactgtcctggaacaaagccagttgaaactgctgagttgctccagagtcagggagacaagctagccgaggaagggaagtaccatgaagcacttgctaaatgggaggctgctctgatcttgatgcctgataatgcgatacttcatgagcagaaagctcaggttttacttgaagtgggagatgcatggcgtgcactgacagcagcaaccagagcaacagaactggatccattttggcctgaggcttgggttacacttggtagagctcaattaaattttggggagccagattcagctatactgacttttgacaaggcgttagctatgaagcctgactacaccgacgcaaaagctgaccgtgaaactgctgctcgcctagtcaagaaacgaggacagctgcatacgtcaggtttaagtgctaacaaaagacgcttcacagttggggagtacccaaaggagggaggtgcagagggtgaagaaaaagggaaagaaacagccgagcaactccaaaagatcacccaagaaaattagctaaattaactgattttgttactgtgtaaaatagatattacaaaaaaatattacattagtgttggtcacctgctttaattcgtaaagggaaccataacaaggcaatacaattaaagataatcggccttcgttttcctaatctatctaatagataaattaagggaggaggattatggtaatccaagaccttcgaataataaaataggaatgtctgatgagaatcattactgttgtgtctctttattattctttccttatgacaaataattataggtagggatgga

SEQ ID NO: 40068 - DNA, 1068 bp, Zea Mays
gttttgggcgttcaactgaatgccttgaatctgtgtaggtccacccctggcagccctgcacagaccccatcacattggcaacgtctccggaagaccgaaacgaaccacacacatctccaccatgaagatagcctggggtaagaaatctaaggttaagaagcagtcagtggttgtatcaactataccaggcctaccatttggagcggggagtgacaacgatgaggttgaaacggaggaaaaatcagatgcaaacacaaactgtcctggaacaaagccagttgaaactgctgagttgctccagagtcagggagacaagctagccgaggaagggaagtaccatgaagcacttgctaaatgggaggctgctctgatcttgatgcctgataatgcgatacttcatgagcagaaagctcaggttttacttgaagtgggagatgcatggcgtgcactgacagcagcaaccagagcaacagaactggatccattttggcctgaggcttgggttacacttggtagagctcaattaaattttggggagccagattcagctatactgacttttgacaaggcgttagctatgaagcctgactacaccgacgcaaaagctgaccgtgaaactgctgctcgcctagtcaagaaacgaggacagctgcatacgtcaggtttaagtgctaacaaaagacgcttcacagttggggagtacccaaaggagggaggtgcagagggtgaagaaaaagggaaagaaacagccgagcaactccaaaagatcacccaagaaaattagctaaattaactgattttgttactgtgtaaaatagatattacaaaaaaatattacattagtgttggtcacctgctttaattcgtaaagggaaccataacaaggcaatacaattaaagataatcggccttcgttttcctaatctatctaatagataaattaagggaggaggattatggtaatccaagaccttcgaataataaaataggaatgtctgatgagaatcattactgttgtgtctctttattattctttccttatgacaaataattataggtagggatgga

SEQ ID NO: 40069 - DNA, 1278 bp, Zea Mays
ctgagataaaactttcttgtcctcttcattggtgcttacagggggtatataaggccataggccagggctactaaaggaagccactaatcactcttattcccttctaaatgtagcccggattattaaaggaaagccatcaatcactaatcactcttattcccttctaaatctagcccggactaataaaggaaagccatcaatcactaatcactcctattccttctgaatctagcccggactaataggaaggccatcaatcacttttattctttccagatctagccactaggcctggctgcctgctggatcaggcgtcctgcgcgctcagccgcgcgtgccctgtgacgccgtgtgtacgtatttctgtacatcacaagctcacacatctgcatatcccacattaactgcagttcagatcagggatactgaaattagtgattaagctccaccatgaagatagcctggggtaagaaatctaaggttaagaagcagtcagtggttgtatcaactataccaggcctaccatttggagcggggagtgacaacgatgaggttgaaacggaggaaaaatcagatgcaaacacaaactgtcctggaacaaagccagttgaaactgctgagttgctccagagtcagggagacaagctagccgaggaagggaagtaccatgaagcacttgctaaatgggaggctgctctgatcttgatgcctgataatgcgatacttcatgagcagaaagctcaggttttacttgaagtgggagatgcatggcgtgcactgacagcagcaaccacctgactacaccgacgcaaaagctgaccgtgaaactgctgctcgcctagtcaagaaacgaggacagctgcatacgtcaggtttaagtgctaacaaaagacgcttcacagttggggagtacccaaaggagggaggtgcagagggtgaagaaaaagggaaagaaacagccgagcaactccaaaagatcacccaagaaaattagctaaattaactgattttgttactgtgtaaaatagatattacaaaaaaatattacattagtgttggtcacctgctttaattcgtaaagggaaccataacaaggcaatacaattaaagataatcggccttcgttttcctaatctatctaatagataaattaagggaggaggattatggtaatccaagaccttcgaataataaaataggaatgtctgatgagaatcattactgttgtgtctctttattattctttccttatgacaaataattataggtagggatgga

SEQ ID NO: 40070 - DNA, 1393 bp, Zea Mays
gataaaactttcttgtcctcttcattggtgcttacagggggtatataaggccataggccagggctactaaaggaagccactaatcactcttattcccttctaaatgtagcccggattattaaaggaaagccatcaatcactaatcactcttattcccttctaaatctagcccggactaataaaggaaagccatcaatcactaatcactcctattccttctgaatctagcccggactaataggaaggccatcaatcacttttattctttccagatctagccactaggcctggctgcctgctggatcaggcgtcctgcgcgctcagccgcgcgtgccctgtgacgccgtgtgtacgtatttctgtacatcacaagctcacacatctgcatatcccacattaactgcagttcagatcagggatactgaaattagtgattaagctccaccatgaagatagcctggggtaagaaatctaaggttaagaagcagtcagtggttgtatcaactataccaggcctaccatttggagcggggagtgacaacgatgaggttgaaacggaggaaaaatcagatgcaaacacaaactgtcctggaacaaagccagttgaaactgctgagttgctccagagtcagggagacaagctagccgaggaagggaagtaccatgaagcacttgctaaatgggaggctgctctgatcttgatgcctgataatgcgatacttcatgagcagaaagctcaggttttacttgaagtgggagatgcatggcgtgcactgacagcagcaaccagagcaacagaactggatccattttggcctgaggcttgggttacacttggtagagctcaattaaattttggggagccagattcagctatactgacttttgacaaggcgttagctatgaagcctgactacaccgacgcaaaagctgaccgtgaaactgctgctcgcctagtcaagaaacgaggacagctgcatacgtcaggtttaagtgctaacaaaagacgcttcacagttggggagtacccaaaggagggaggtgcagagggtgaagaaaaagggaaagaaacagccgagcaactccaaaagatcacccaagaaaattagctaaattaactgattttgttactgtgtaaaatagatattacaaaaaaatattacattagtgttggtcacctgctttaattcgtaaagggaaccataacaaggcaatacaattaaagataatcggccttcgttttcctaatctatctaatagataaattaagggaggaggattatggtaatccaagaccttcgaataataaaataggaatgtctgatgagaatcattactgttgtgtctctttattattctttccttatgacaaataattataggtagggatgga

SEQ ID NO: 40071 - DNA, 3918 bp, Zea Mays
cggccttcgagatctcatcggtgttcgtctcagcccagaaggggctacggcgcggagtcggcgagttccgagtggaacctgggttcgattcggtgatcggcggcggaatgggggtgccggaggcggtggcgctggagatacctgcggtggaggaggggtcgccgacgccactggccagggtgccaccaaggatcaggcggaggctcctccaggcgggcagcggagaaaacggcggcaaggcgccgacggccgaggagatcgagaccaagctacgccaggcgcatctccggaggcagcaattccatgaagcattgtcctccaaagcaaggcgctcaattaagagcccttcagggtcattgcaggaggaggatcgagggcagcttcttgaggcaaagctcctggctgccaggcagaagaggttgaccctcttggaaaaggaacagagccggttggctaagctggacaaactgcgacaggctgttaagagtgatgcagagatgaggttcgagagggaaagggaagaactcggaatgaaagttgaatcacgggttcaaaaggctgagaacaatcgtatgcaactaatgcatgatcgtttgaagaggcaggctgcattagaggagaggacaaaaaggtactttatgcaaagattgacttgggaaaacaagtacagggagcgtgtacaatctgcaatacagaagtgtaatgctgctgagaagagacgattggggctgcttgaatctgagaaaagacgggcacagagtaggctcttgcaggttcaacttgctgtgaagactgcctctaaccagagagaaactgagaggagcaagttaaatgagcaattagaagaaaagcttcagaaggcagagcagcagagggctgactatttgaagcagcggggaaatcctcacagttctatgcacagcagttcagttaaaaatggagaatttctttcaagaaaattggcaagatgctggagaagattcagaacttctaggaaaacaacagtagtattggctagggcctttgatgcactggggataaatcagcgatcagttgtgtctatgccatttgaagaattagctctctgcattgaatctcctgcagttctccagaccactaaggcattgcttgaccgtcttgagagtcgttttgtcttttctcagtcatcaacttcatcaaaaccagaaaacattgaccaccttctgaagcatctaggatcaccgaagaggaagatcccactgagcaatgtggggacaagtgaagcaacactgaaaaacgcagttggaaattatgattccagtacgttgtctagatattcgcaaaggattgcactttgtgcttatatgattctaggtcatccaaaatctgttcttagtggacaaggtgaacaagagaaatttcttatggaatcagcaacaatctttgtaaaggaatttgaactgctggttaaaacagtacttgatgccctagatggtgcatgcatattgagctggtcagttatagatgatgccacacctgttcgttctagctacgaggaatcttcatccattgttgctgatctgaagaaattcagaactcagctgcttgcctttgacaaagcttggtgtgcttatctttaccattttgtggcatggaaagcaaaagatgctaaatcattagaggatgaactcattagggctgcatgcaagcttgagctgtcaatgattcaaacatgcaaaataactgaaggtgaatctgataacctgggtggtgatttgaaagccatccggaaacaggtcgcagaagaccagaaacttttaagggagagtattcaacacctgggcggtgaagctggtatcggaatgatggaatctgctttatttgaaacacggtcaaagttctttcaagcaaaagagaagaggagttccattgcaactacagttgcaaatgtagcatctccttcagttacatgttcttcaggacagtctaatgattctgaaactggtatcggaatgatggaatctgctttatttgaaacacggtcaaaattctttcaagcaaaagagaagaggagttccattgcaactacagttgcaaatgtagcatctccttcagttacatgttattcaggacagtctaatgattctgatactggggagaattgtaacatggatgctgaaaaggcaagtcgagttgtccaatctctttttggagcattgtcttcacgatatgaaaatagcaaaggtggcaagctgatgagtaacgcagcaccagaaaaaatgcctactgagaatgagcaaatagtcaatgagatactacatgatatacatggttcttttgctgacatctctgatggtgctggtaccgttgaaggtgacttcaaggtaaaagtcaaggaaacaatggagaaggctttctgggatgtggttgctgattcaatgagaggagacatgccagactactgttatctggtcagcctggtaaaggaaatcagggaagcactggaagagttatctcctacagggtggaaagaagaaatcagtgacaatattaaccttgaaatattgacccagttacttgaatcaggttcccaggacagacaataccttggacaaattttgcagtactctctggataagctgcgaaaactgtcttctcctgtgaaggaacacgagatgaagaagagtcatgatacattgttgggagaattggtcgaagactctaaatccaattataaagatccaaattcatttgttctttgcgttatcaagggtttgcgcttcactatggaggaattacaggctctaaaaacagaagttactagagcacgcatccaactattggaaccattgattaagggatcaggtggagtggagtacctgcagaagtcttttgctggtcgctgtggttccccttctgatgcgttagcttctctcccttcaactgcccggtggattttctctttgaaagatgtcgtggaagaacaatggaatgaacatgtcagctcgttatcaattctgccagaagcagaccatgttcagacacttgttgccaccctccgaactggccatgcagttgcaggtgtacaatctgtgatacctgcagcaggattaccagagtgtaggggagaaatacttggcaagctaataaggattgggctattacagctcatcagcagcatggagggtgtagaaagggaatcggttcctgagacctttatgttgaattggttgaggctgcggtctgttcagagtaagtttcaacaagtgattgtgatagcgacaagcatgcttgttttgcatcaggtgttagcgagtgagaacccaaagatcacttcttctgagctggagaatgccacttcggaactgttcaacgtcctcacaaggctgctagacaactttccagatgttggcactgagaaaatcattgaggccatgatgtactcgtcaacctcaaggagcttgtcagatcatgaaaggatgaacgccagaaaagagatattgactagggtcttccttagaagcctccagaccgatgacaccgtcttcaagaaggtctctcagtccgtatactgtgcattccgtgcagtcaccctgggcggcagtggggagaagggccggatgctcgccgatgcatccctgaggcgcgtcggggcaacaaaactcactgcgcggctggtgaaggcagctgaagtgcttatcaaagcagcaatggtgtcagagcaggtccatggcccatggtacacgcagttattgtgaatggctctgctaccgcgatatatatatatatatagctctgctcatgccccgttgttacaactgaatgaatggtttgtgggagtgccgtgatgtctgaattccaataagcataggcgacctgaatgcatgtatatgtaaatatacacgaaacgtaatacgactccgaaatgctcctttctcc

SEQ ID NO: 40072 - DNA, 3893 bp, Zea Mays
cggccttcgagatctcatcggtgttcgtctcagcccagaaggggctacggcgcggagtcggcgagttccgagtggaacctgggttcgattcggtgatcggcggcggaatgggggtgccggaggcggtggcgctggagatacctgcggtggaggaggggtcgccgacgccactggccagggtgccaccaaggatcaggcggaggctcctccaggcgggcagcggagaaaacggcggcaaggcgccgacggccgaggagatcgagaccaagctacgccaggcgcatctccggaggcagcaattccatgaagcattgtcctccaaagcaaggcgctcaattaagagcccttcagggtcattgcaggaggaggatcgagggcagcttcttgaggcaaagctcctggctgccaggcagaagaggttgaccctcttggaaaaggaacagagccggttggctaagctggacaaactgcgacaggctgttaagagtgatgcagagatgaggttcgagagggaaagggaagaactcggaatgaaagttgaatcacgggttcaaaaggctgagaacaatcgtatgcaactaatgcatgatcgtttgaagaggcaggctgcattagaggagaggacaaaaaggtactttatgcaaagattgacttgggaaaacaagtacagggagcgtgtacaatctgcaatacagaagtgtaatgctgctgagaagagacgattggggctgcttgaatctgagaaaagacgggcacagagtaggctcttgcaggttcaacttgctgtgaagactgcctctaaccagagagaaactgagaggagcaagttaaatgagcaattagaagaaaagcttcagaaggcagagcagcagagggctgactatttgaagcagcggggaaatcctcacagttctatgcacagcagttcagttaaaaatggagaatttctttcaagaaaattggcaagatgctggagaagattcagaacttctaggaaaacaacagtagtattggctagggcctttgatgcactggggataaatcagcgatcagttgtgtctatgccatttgaagaattagctctctgcattgaatctcctgcagttctccagaccactaaggcattgcttgaccgtcttgagagtcgttttgtcttttctcagtcatcaacttcatcaaaaccagaaaacattgaccaccttctgaagcatctaggatcaccgaagaggaagatcccactgagcaatgtggggacaagtgaagcaacactgaaaaacgcagttggaaattatgattccagtacgttgtctagatattcgcaaaggattgcactttgtgcttatatgattctaggtcatccaaaatctgttcttagtggacaaggtgaacaagagaaatttcttatggaatcagcaacaatctttgtaaaggaatttgaactgctggttaaaacagtacttgatgccctagatggtgcatgcatattgagctggtcagttatagatgatgccacacctgttcgttctagctacgaggaatcttcatccattgttgctgatctgaagaaattcagaactcagctgcttgcctttgacaaagcttggtgtgcttatctttaccattttgtggcatggaaagcaaaagatgctaaatcattagaggatgaactcattagggctgcatgcaagcttgagctgtcaatgattcaaacatgcaaaataactgaaggtgaatctgataacctgggtggtgatttgaaagccatccggaaacaggtcgcagaagaccagaaacttttaagggagagtattcaacacctgggcggtgaagctggtatcggaatgatggaatctgctttatttgaaacacggtcaaagttctttcaagcaaaagagaagaggagttccattgcaactacagttgcaaatgtagcatctccttcagttacatgttcttcaggacagtctaatgattctgaaactggtatcggaatgatggaatctgctttatttgaaacacggtcaaaattctttcaagcaaaagagaagaggagttccattgcaactacagttgcaaatgtagcatctccttcagttacatgttattcaggacagtctaatgattctgatactggggagaattgtaacatggatgctgaaaaggcaagtcgagttgtccaatctctttttggagcattgtcttcacgatatgaaaatagcaaaggtggcaagctgatgagtaacgcagcaccagaaaaaatgcctactgagaatgagcaaatagtcaatgagatactacatgatatacatggttcttttgctgacatctctgatggtgctggtaccgttgaaggtgacttcaaggtaaaagtcaaggaaacaatggagaaggctttctgggatgtggttgctgattcaatgagaggagacatgccagactactgttatctggtcagcctggtaaaggaaatcagggaagcactggaagagttatctcctacagggtggaaagaagaaatcagtgacaatattaaccttgaaatattgacccagttacttgaatcaggttcccaggacagacaataccttggacaaattttgcagtactctctggataagctgcgaaaactgtcttctcctgtgaaggaacacgagatgaagaagagtcatgatacattgttgggagaattggtcgaagactctaaatccaattataaagatccaaattcatttgttctttgcgttatcaagggtttgcgcttcactatggaggaattacaggctctaaaaacagaagttactagagcacgcatccaactattggaaccattgattaagggatcaggtggagtggagtacctgcagaagtcttttgctggtcgctgtggttccccttctgatgcgttagcttctctcccttcaactgcccggtggattttctctttgaaagatgtcgtggaagaacaatggaatgaacatgtcagctcgttatcaattctgccagaagcagaccatgttcagacacttgttgccaccctccgaactggccatgcagttgcaggtgtacaatctgtgatacctgcagcagacaatacaggattaccagagtgtaggggagaaatacttggcaagctaataaggattgggctattacagctcatcagcagcatggagggtgtagaaagggaatcggttcctgagacctttatgttgaattggttgaggctgcggtctgttcagacatgcttgttttgcatcaggtgttagcgagtgagaacccaaagatcacttcttctgagctggagaatgccacttcggaactgttcaacgtcctcacaaggctgctagacaactttccagatgttggcactgagaaaatcattgaggccatgatgtactcgtcaacctcaaggagcttgtcagatcatgaaaggatgaacgccagaaaagagatattgactagggtcttccttagaagcctccagaccgatgacaccgtcttcaagaaggtctctcagtccgtatactgtgcattccgtgcagtcaccctgggcggcagtggggagaagggccggatgctcgccgatgcatccctgaggcgcgtcggggcaacaaaactcactgcgcggctggtgaaggcagctgaagtgcttatcaaagcagcaatggtgtcagagcaggtccatggcccatggtacacgcagttattgtgaatggctctgctaccgcgatatatatatatatatagctctgctcatgccccgttgttacaactgaatgaatggtttgtgggagtgccgtgatgtctgaattccaataagcataggcgacctgaatgcatgtatatgtaaatatacacgaaacgtaatacgactccgaaatgctcctttctcc

SEQ ID NO: 40073 - DNA, 1663 bp, Zea Mays
gtccccgaaaaacaagaaccatcgtacgggtgacgtggccaacacttccgtttttgttccggccaggcggctcgtgtccccgcagtcggcaggagcgcggacgcagatccgacggcctaggggcactccggggaggccacgcaacgcgcgcggcggcaggaggaggagataggcacacggcgtgccgcggtgggcgaccttttttgcaccgggagataaatcgacagcaccctgacctcaagtcctcaacccgcaggccgcagctgctcccgcccgccgcgcaagcggccaagcgccgccggttcttctcgagcaagagtacatgacttttgagctaagtgtttttcgtgagttctcataaatcattgtcctcataacttgtaatgggtggaagccagtatgatgatgactgggtgttgcccagtgccgatatcactcttgttctggttgggaaacttggctatggcaagagtgcaactggaaatagcatccttggacgggaagcatttgtatcagaatattcacatgccagtgttactaatacttgtcagttgggaagcactaccctgaaggacggccgcaccatcaatgttattgatacaccagggttatttgatatgagcattacatcggacgaggctggtaaagagattgttaaatgcatgaacatggctaaagatgggatacatgcagttctgatggttttttctgccacatctcggttttctcgagaggacgcaagtacagttgagaccattaaagtcttctttggtgaaaggattgtcgaccacatgattttagtcttcacttatggagatttagttggtgaatctaagttgaagaaaatgttaaataatgcgccagagtatttgcagaatgttgttgagctatgccaaaacagagtggttgtcttcgataacgtgactgaagaccgaaggctccaagcgcagcaacttgacaaattgctcgatgtagtggattcagtttgtgcaaaaaatggaggaaaaccattttcagatcaaatgttcactagcatcaaggaggtgcatgatagagaaaaagaggtgcatacctcgggatattcagatgagcagatatctgaattgaaaaaggagattcatagaactagggatgaacagcttgcgcacataaccaacatggtcgaggaaaagttaaactgcactgtggagaagttgcaacagcagctcatggaagaacagaacgcaaggctggaagctgagaaggtggcgtacgaagctaggctgaaatcagaagcggagatccagaagctcaaggagagcctcaagaaagctcaaatggaaaatgatgagttccggaggatggcgcagagccagggcagtaaatgtgctatcctataggcattagtacttgctagaaattggtggagctatcgtgctgacgcgtctcttgtacgtagtactttctctgttccaaaaatatatagttcaatacaccttagtagagatgactacgagagtatccaaacaagacctcgtcggacatgttagcctgaagcttgcttatggacatattggatatagtttttggctgtatgcgcacaacattggagttgttccccaccaaatagaagcattagggatcatccgacaaagaaaacgagtatcctctttctcactagaat

SEQ ID NO: 40074 - DNA, 1685 bp, Zea Mays
cgaaaaacaagaaccatcgtacgggtgacgtggccaacacttccgtttttgttccggccaggcggctcgtgtccccgcagtcggcaggagcgcggacgcagatccgacggcctaggggcactccggggaggccacgcaacgcgcgcggcggcaggaggaggagataggcacacggcgtgccgcggtgggcgaccttttttgcaccgggagataaatcgacagcaccctgacctcaagtcctcaacccgcaggccgcagctgctcccgcccgccgcgcaagcggccaagcgccgccggttcttctcgagcaattctcataaatcattgtcctcataacttgtaatgggtggaagccagtatgatgatgactgggtgttgcccagtgccgatatcactcttgttctggttgggaaacttggctatggcaagagtgcaactggaaatagcatccttggacgggaagcatttgtatcagaatattcacatgccagtgttactaatacttgtcagttgggaagcactaccctgaaggacggccgcaccatcaatgttattgatacaccagggttatttgatatgagcattacatcggacgaggctggtaaagagattgttaaatgcatgaacatggctaaagatgggatacatgcagttctgatggttttttctgccacatctcggttttctcgagaggacgcaagtacagttgagaccattaaagtcttctttggtgaaaggattgtcgaccacatgattttagtcttcacttatggagatttagttggtgaatctaagttgaagaaaatgttaaataatgcgccagagtatttgcagaatgttgttgagctatgccaaaacagagtggttgtcttcgataacgtgactgaagaccgaaggctccaagcgcagcaacttgacaaattgctcgatgtagtggattcagtttgtgcaaaaaatggaggaaaaccattttcagatcaaatgttcactagcatcaaggaggtgcatgatagagaaaaagaggtgcatacctcgggatattcagatgagcagatatctgaattgaaaaaggagattcatagaactagggatgaacagcttgcgcacataaccaacatggtcgaggaaaagttaaactgcactgtggagaagttgcaacagcagctcatggaagaacagaacgcaaggctggaagctgagaaggtggcgtacgaagctaggctgaaatcagaagcggagatccagaagctcaaggagagcctcaagaaagctcaaatggaaaatgatgagttccggaggatggcgcagagccagggcagtaaatgtgctatcctataggcattagtacttgctagaaattggtggagctatcgtgctgacgcgtctcttgtacgtagtactttctctgttccaaaaatatatagttcaatacaccttagtagagatgactacgagagtatccaaacaagacctcgtcggacatgttagcctgaagcttgcttatggacatattggatatagtttttgggtgagaacttttgaacaacttccttgtttttttctctcatgttctaatgcatcttttctctagctgtatgcgcacaacattggagttgttccccaccaaatagaagcattagggatcatccgacaaagaaaacgagtatcctctttctcactagaat

SEQ ID NO: 40075 - DNA, 1557 bp, Zea Mays
gaaccatcgtacgggtgacgtggccaacacttccgtttttgttccggccaggcggctcgtgtccccgcagtcggcaggagcgcggacgcagatccgacggcctaggggcactccggggaggccacgcaacgcgcgcggcggcaggcaagaactccgaagtcggcacggccgcacggccgctacgatacggcgccctcacaattgggccgttataaaacgtcacaggaggaggagataggcacacggcgtgccgcggtgggcgaccttttttgcaccgggagataaatcgacagcaccctgacctcaagtcctcaacccgcaggccgcagctgctcccgcccgccgcgcaagcggccaagcgccgccggttcttctcgagcaattgggaagcactaccctgaaggacggccgcaccatcaatgttattgatacaccagggttatttgatatgagcattacatcggacgaggctggtaaagagattgttaaatgcatgaacatggctaaagatgggatacatgcagttctgatggttttttctgccacatctcggttttctcgagaggacgcaagtacagttgagaccattaaagtcttctttggtgaaaggattgtcgaccacatgattttagtcttcacttatggagatttagttggtgaatctaagttgaagaaaatgttaaataatgcgccagagtatttgcagaatgttgttgagctatgccaaaacagagtggttgtcttcgataacgtgactgaagaccgaaggctccaagcgcagcaacttgacaaattgctcgatgtagtggattcagtttgtgcaaaaaatggaggaaaaccattttcagatcaaatgttcactagcatcaaggaggtgcatgatagagaaaaagaggtgcatacctcgggatattcagatgagcagatatctgaattgaaaaaggagattcatagaactagggatgaacagcttgcgcacataaccaacatggtcgaggaaaagttaaactgcactgtggagaagttgcaacagcagctcatggaagaacagaacgcaaggctggaagctgagaaggtggcgtacgaagctaggctgaaatcagaagcggagatccagaagctcaaggagagcctcaagaaagctcaaatggaaaatgatgagttccggaggatggcgcagagccagggcagtaaatgtgctatcctataggcattagtacttgctagaaattggtggagctatcgtgctgacgcgtctcttgtacgtagtactttctctgttccaaaaatatatagttcaatacaccttagtagagatgactacgagagtatccaaacaagacctcgtcggacatgttagcctgaagcttgcttatggacatattggatatagtttttgggtgagaacttttgaacaacttccttgtttttttctctcatgttctaatgcatcttttctctagctgtatgcgcacaacattggagttgttccccaccaaatagaagcattagggatcatccgacaaagaaaacgagtatcctctttctcactagaat

SEQ ID NO: 40076 - DNA, 2379 bp, Zea Mays
ccgcagtcggcaggagcgcggacgcagatccgacggcctaggggcactccggggaggccacgcaacgcgcgcggcggcaggcaagaactccgaagtcggcacggccgcacggccgctacgatacggcgccctcacaattgggccgttataaaacgtcacaggaggaggagataggcacacggcgtgccgcggtgggcgaccttttttgcaccgggagataaatcgacagcaccctgacctcaagtcctcaacccgcaggccgcagctgctcccgcccgccgcgcaagcggccaagcgccgccggttcttctcgagcaagagtacatgacttttgagctaagtgtttttcgtgaggtaacatgatttttttcatagcaattcaattgaacctttccattcagaaagataatataattcgacctaaaaaactcggtcgatagaggaaagatcgtcccacggtattatattaataagaagctcattcggagccccgatcgagaaaggtcacgaaagttgggcctccgtgcagcataagggtccgcccccctatagaccaaatctttactcgtgctgagccctccaaacatacatacaaggatcccctataggccagttcatctcgtgtgtacacaaccagaggaaccaacgagtgacctttttaactccagcctgaaattcgctcccactgggattcgaaatcggcctgaggagtgctactcagaccacctaatcaactcaagctagaggcctttcgcaatataatccaacctttctctaatttaaacttaaaacaatgaatttggccattggctattaatttcagaaagttttattgaaaaacatctatgcagtttaaaccttgactacttgataactagatatgacccgtaggggcttttctttcatcagttcatttgccagttttgttacatatcctgaatgtggtcggtcatataatataattgttaccttggtgaagtcctaatgtcttgattacctaaacagttctcataaatcattgtcctcataacttgtaatgggtggaagccagtatgatgatgactgggtgttgcccagtgccgatatcactcttgttctggttgggaaacttggctatggcaagagtgcaactggaaatagcatccttggacgggaagcatttgtatcagaatattcacatgccagtgttactaatacttgtcagttgggaagcactaccctgaaggacggccgcaccatcaatgttattgatacaccagggttatttgatatgagcattacatcggacgaggctggtaaagagattgttaaatgcatgaacatggctaaagatgggatacatgcagttctgatggttttttctgccacatctcggttttctcgagaggacgcaagtacagttgagaccattaaagtcttctttggtgaaaggattgtcgaccacatgattttagtcttcacttatggagatttagttggtgaatctaagttgaagaaaatgttaaataatgcgccagagtatttgcagaatgttgttgagctatgccaaaacagagtggttgtcttcgataacgtgactgaagaccgaaggctccaagcgcagcaacttgacaaattgctcgatgtagtggattcagtttgtgcaaaaaatggaggaaaaccattttcagatcaaatgttcactagcatcaaggaggtgcatgatagagaaaaagaggtgcatacctcgggatattcagatgagcagatatctgaattgaaaaaggagattcatagaactagggatgaacagcttgcgcacataaccaacatggtcgaggaaaagttaaactgcactgtggagaagttgcaacagcagctcatggaagaacagaacgcaaggctggaagctgagaaggtggcgtacgaagctaggctgaaatcagaagcggagatccagaagctcaaggagagcctcaagaaagctcaaatggaaaatgatgagttccggaggatggcgcagagccagggcagtaaatgtgctatcctataggcattagtacttgctagaaattggtggagctatcgtgctgacgcgtctcttgtacgtagtactttctctgttccaaaaatatatagttcaatacaccttagtagagatgactacgagagtatccaaacaagacctcgtcggacatgttagcctgaagcttgcttatggacatattggatatagtttttgggtgagaacttttgaacaacttccttgtttttttctctcatgttctaatgcatcttttctctagctgtatgcgcacaacattggagttgttccccaccaaatagaagcattagggatcatccgacaaagaaaacgagtatcctctttctcactagaat

SEQ ID NO: 40077 - DNA, 1498 bp, Zea Mays
gcctaggggcactccggggaggccacgcaacgcgcgcggcggcaggcaagaactccgaagtcggcacggccgcacggccgctacgatacggcgccctcacaattgggccgttataaaacgtcacaggaggaggagataggcacacggcgtgccgcggtgggcgaccttttttgcaccgggagataaatcgacagcaccctgacctcaagtcctcaacccgcaggccgcagctgctcccgcccgccgcgcaagcggccaagcgccgccggttcttctcgagcaagagtacatgacttttgagctaagtgtttttcgtgagtcagttgggaagcactaccctgaaggacggccgcaccatcaatgttattgatacaccagggttatttgatatgagcattacatcggacgaggctggtaaagagattgttaaatgcatgaacatggctaaagatgggatacatgcagttctgatggttttttctgccacatctcggttttctcgagaggacgcaagtacagttgagaccattaaagtcttctttggtgaaaggattgtcgaccacatgattttagtcttcacttatggagatttagttggtgaatctaagttgaagaaaatgttaaataatgcgccagagtatttgcagaatgttgttgagctatgccaaaacagagtggttgtcttcgataacgtgactgaagaccgaaggctccaagcgcagcaacttgacaaattgctcgatgtagtggattcagtttgtgcaaaaaatggaggaaaaccattttcagatcaaatgttcactagcatcaaggaggtgcatgatagagaaaaagaggtgcatacctcgggatattcagatgagcagatatctgaattgaaaaaggagattcatagaactagggatgaacagcttgcgcacataaccaacatggtcgaggaaaagttaaactgcactgtggagaagttgcaacagcagctcatggaagaacagaacgcaaggctggaagctgagaaggtggcgtacgaagctaggctgaaatcagaagcggagatccagaagctcaaggagagcctcaagaaagctcaaatggaaaatgatgagttccggaggatggcgcagagccagggcagtaaatgtgctatcctataggcattagtacttgctagaaattggtggagctatcgtgctgacgcgtctcttgtacgtagtactttctctgttccaaaaatatatagttcaatacaccttagtagagatgactacgagagtatccaaacaagacctcgtcggacatgttagcctgaagcttgcttatggacatattggatatagtttttgggtgagaacttttgaacaacttccttgtttttttctctcatgttctaatgcatcttttctctagctgtatgcgcacaacattggagttgttccccaccaaatagaagcattagggatcatccgacaaagaaaacgagtatcctctttctcactagaat

SEQ ID NO: 40078 - DNA, 1494 bp, Zea Mays
gcctaggggcactccggggaggccacgcaacgcgcgcggcggcaggcaagaactccgaagtcggcacggccgcacggccgctacgatacggcgccctcacaattgggccgttataaaacgtcacaggaggaggagataggcacacggcgtgccgcggtgggcgaccttttttgcaccgggagataaatcgacagcaccctgacctcaagtcctcaacccgcaggccgcagctgctcccgcccgccgcgcaagcggccaagcgccgccggttcttctcgagcaagagtacatgacttttgagctaagtgtttttcgtgagttgggaagcactaccctgaaggacggccgcaccatcaatgttattgatacaccagggttatttgatatgagcattacatcggacgaggctggtaaagagattgttaaatgcatgaacatggctaaagatgggatacatgcagttctgatggttttttctgccacatctcggttttctcgagaggacgcaagtacagttgagaccattaaagtcttctttggtgaaaggattgtcgaccacatgattttagtcttcacttatggagatttagttggtgaatctaagttgaagaaaatgttaaataatgcgccagagtatttgcagaatgttgttgagctatgccaaaacagagtggttgtcttcgataacgtgactgaagaccgaaggctccaagcgcagcaacttgacaaattgctcgatgtagtggattcagtttgtgcaaaaaatggaggaaaaccattttcagatcaaatgttcactagcatcaaggaggtgcatgatagagaaaaagaggtgcatacctcgggatattcagatgagcagatatctgaattgaaaaaggagattcatagaactagggatgaacagcttgcgcacataaccaacatggtcgaggaaaagttaaactgcactgtggagaagttgcaacagcagctcatggaagaacagaacgcaaggctggaagctgagaaggtggcgtacgaagctaggctgaaatcagaagcggagatccagaagctcaaggagagcctcaagaaagctcaaatggaaaatgatgagttccggaggatggcgcagagccagggcagtaaatgtgctatcctataggcattagtacttgctagaaattggtggagctatcgtgctgacgcgtctcttgtacgtagtactttctctgttccaaaaatatatagttcaatacaccttagtagagatgactacgagagtatccaaacaagacctcgtcggacatgttagcctgaagcttgcttatggacatattggatatagtttttgggtgagaacttttgaacaacttccttgtttttttctctcatgttctaatgcatcttttctctagctgtatgcgcacaacattggagttgttccccaccaaatagaagcattagggatcatccgacaaagaaaacgagtatcctctttctcactagaat

SEQ ID NO: 40079 - DNA, 1647 bp, Zea Mays
gcctaggggcactccggggaggccacgcaacgcgcgcggcggcaggcaagaactccgaagtcggcacggccgcacggccgctacgatacggcgccctcacaattgggccgttataaaacgtcacaggaggaggagataggcacacggcgtgccgcggtgggcgaccttttttgcaccgggagataaatcgacagcaccctgacctcaagtcctcaacccgcaggccgcagctgctcccgcccgccgcgcaagcggccaagcgccgccggttcttctcgagcaagagtacatgacttttgagctaagtgtttttcgtgagtatgatgatgactgggtgttgcccagtgccgatatcactcttgttctggttgggaaacttggctatggcaagagtgcaactggaaatagcatccttggacgggaagcatttgtatcagaatattcacatgccagtgttactaatacttgtcagttgggaagcactaccctgaaggacggccgcaccatcaatgttattgatacaccagggttatttgatatgagcattacatcggacgaggctggtaaagagattgttaaatgcatgaacatggctaaagatgggatacatgcagttctgatggttttttctgccacatctcggttttctcgagaggacgcaagtacagttgagaccattaaagtcttctttggtgaaaggattgtcgaccacatgattttagtcttcacttatggagatttagttggtgaatctaagttgaagaaaatgttaaataatgcgccagagtatttgcagaatgttgttgagctatgccaaaacagagtggttgtcttcgataacgtgactgaagaccgaaggctccaagcgcagcaacttgacaaattgctcgatgtagtggattcagtttgtgcaaaaaatggaggaaaaccattttcagatcaaatgttcactagcatcaaggaggtgcatgatagagaaaaagaggtgcatacctcgggatattcagatgagcagatatctgaattgaaaaaggagattcatagaactagggatgaacagcttgcgcacataaccaacatggtcgaggaaaagttaaactgcactgtggagaagttgcaacagcagctcatggaagaacagaacgcaaggctggaagctgagaaggtggcgtacgaagctaggctgaaatcagaagcggagatccagaagctcaaggagagcctcaagaaagctcaaatggaaaatgatgagttccggaggatggcgcagagccagggcagtaaatgtgctatcctataggcattagtacttgctagaaattggtggagctatcgtgctgacgcgtctcttgtacgtagtactttctctgttccaaaaatatatagttcaatacaccttagtagagatgactacgagagtatccaaacaagacctcgtcggacatgttagcctgaagcttgcttatggacatattggatatagtttttgggtgagaacttttgaacaacttccttgtttttttctctcatgttctaatgcatcttttctctagctgtatgcgcacaacattggagttgttccccaccaaatagaagcattagggatcatccgacaaagaaaacgagtatcctctttctcactagaat

SEQ ID NO: 40080 - DNA, 1445 bp, Zea Mays
acgccgtgctgtcgcacggctgggcacaatgagaggagtacatgacttttgagctaagtgtttttcgtgagttctcataaatcattgtcctcataacttgtaatgggtggaagccagtatgatgatgactgggtgttgcccagtgccgatatcactcttgttctggttgggaaacttggctatggcaagagtgcaactggaaatagcatccttggacgggaagcatttgtatcagaatattcacatgccagtgttactaatacttgtcagttgggaagcactaccctgaaggacggccgcaccatcaatgttattgatacaccagggttatttgatatgagcattacatcggacgaggctggtaaagagattgttaaatgcatgaacatggctaaagatgggatacatgcagttctgatggttttttctgccacatctcggttttctcgagaggacgcaagtacagttgagaccattaaagtcttctttggtgaaaggattgtcgaccacatgattttagtcttcacttatggagatttagttggtgaatctaagttgaagaaaatgttaaataatgcgccagagtatttgcagaatgttgttgagctatgccaaaacagagtggttgtcttcgataacgtgactgaagaccgaaggctccaagcgcagcaacttgacaaattgctcgatgtagtggattcagtttgtgcaaaaaatggaggaaaaccattttcagatcaaatgttcactagcatcaaggaggtgcatgatagagaaaaagaggtgcatacctcgggatattcagatgagcagatatctgaattgaaaaaggagattcatagaactagggatgaacagcttgcgcacataaccaacatggtcgaggaaaagttaaactgcactgtggagaagttgcaacagcagctcatggaagaacagaacgcaaggctggaagctgagaaggtggcgtacgaagctaggctgaaatcagaagcggagatccagaagctcaaggagagcctcaagaaagctcaaatggaaaatgatgagttccggaggatggcgcagagccagggcagtaaatgtgctatcctataggcattagtacttgctagaaattggtggagctatcgtgctgacgcgtctcttgtacgtagtactttctctgttccaaaaatatatagttcaatacaccttagtagagatgactacgagagtatccaaacaagacctcgtcggacatgttagcctgaagcttgcttatggacatattggatatagtttttgggtgagaacttttgaacaacttccttgtttttttctctcatgttctaatgcatcttttctctagctgtatgcgcacaacattggagttgttccccaccaaatagaagcattagggatcatccgacaaagaaaacgagtatcctctttctcactagaat

SEQ ID NO: 40081 - DNA, 1479 bp, Zea Mays
caacgatggcgacaccgtggcggaggccaaactatcgccggtgttggaccctggcatctccgataccaggagtacatgacttttgagctaagtgtttttcgtgagttctcataaatcattgtcctcataacttgtaatgggtggaagccagtatgatgatgactgggtgttgcccagtgccgatatcactcttgttctggttgggaaacttggctatggcaagagtgcaactggaaatagcatccttggacgggaagcatttgtatcagaatattcacatgccagtgttactaatacttgtcagttgggaagcactaccctgaaggacggccgcaccatcaatgttattgatacaccagggttatttgatatgagcattacatcggacgaggctggtaaagagattgttaaatgcatgaacatggctaaagatgggatacatgcagttctgatggttttttctgccacatctcggttttctcgagaggacgcaagtacagttgagaccattaaagtcttctttggtgaaaggattgtcgaccacatgattttagtcttcacttatggagatttagttggtgaatctaagttgaagaaaatgttaaataatgcgccagagtatttgcagaatgttgttgagctatgccaaaacagagtggttgtcttcgataacgtgactgaagaccgaaggctccaagcgcagcaacttgacaaattgctcgatgtagtggattcagtttgtgcaaaaaatggaggaaaaccattttcagatcaaatgttcactagcatcaaggaggtgcatgatagagaaaaagaggtgcatacctcgggatattcagatgagcagatatctgaattgaaaaaggagattcatagaactagggatgaacagcttgcgcacataaccaacatggtcgaggaaaagttaaactgcactgtggagaagttgcaacagcagctcatggaagaacagaacgcaaggctggaagctgagaaggtggcgtacgaagctaggctgaaatcagaagcggagatccagaagctcaaggagagcctcaagaaagctcaaatggaaaatgatgagttccggaggatggcgcagagccagggcagtaaatgtgctatcctataggcattagtacttgctagaaattggtggagctatcgtgctgacgcgtctcttgtacgtagtactttctctgttccaaaaatatatagttcaatacaccttagtagagatgactacgagagtatccaaacaagacctcgtcggacatgttagcctgaagcttgcttatggacatattggatatagtttttgggtgagaacttttgaacaacttccttgtttttttctctcatgttctaatgcatcttttctctagctgtatgcgcacaacattggagttgttccccaccaaatagaagcattagggatcatccgacaaagaaaacgagtatcctctttctcactagaat

SEQ ID NO: 40082 - DNA, 714 bp, Zea Mays
gcgtttagggtaaaggtagtcaaaattgagttgatgatgcactccactatgctgatcagctttgcttgtgcactggtagtacataatcgattctttgcaatgctatatccgcaaaggattttcttgctgatataagcagctctctgaaaatggagggagagaacaacatgaaattagtccaggagttacaattctatcttgtatagtttcacatttaattgctcttgatttcatggctaaactctcgataccttttctttctttcttctctatctttttcatttctttttctatctatgtttccctctgtatttttttaagataaaataaaagcgcgctgtaggggtttaccctacagcctttctccctcaaaaaaacatttaattgctctttttgctggaacagttttttcttcttccctacaagcatcttctttgttttgaaacatctgatctaactccttactaaacatggtctgatggtcggtggttcacagtcaatatcagtcgataggtctaatctggtaaaggctgtatgttttggttcagattgggatggtttcagtttctgattgggataggtgtgccatactgatgtttttccttttcttattgatatattatacgaagttgcattttagggtaacttgttctaaccttctgatagatactttggcgatatcctgtgccgttgcatataatattctttagtgac

SEQ ID NO: 40083 - DNA, 866 bp, Zea Mays
atgtttggtgttttgcgcagcccttccgcaataccgtcagccatcggtgaggttttgtttttgctttgtcgtttcatcgatcgacgtctatttgctaatgtgaactgtgtttatgtgcctatgtgtgttgaggagtgaaatccgtgaaatctaggtgaagaagagacaaagcacgtccatcgcttactagctgctcggtgaaaggattgaatcggcttcgtggtcgtttagtgccgatcgagtcaactttagtcgtggtacgttaattgatcacgtgatgtggaggacaagagttggtttaatctcgaggtaaagttgatgaatgaacatgaagctggataatctgatcgagtgctagattgggagatactcaccaagcgagtgtcatctaacaacactaacctagtgttatcccaggcaagctccggtgcatgcaaccccttccttgtgtttttaaatgatttttacacactttaagtctagcgaaatgtgcattaggtttataggagttgcatagaaatcctttgatgcattggctaccttgaaatcctttccttttatatatacttctggtgaagtatcaaatatgatttacaaaattgcttagcccttcctagaggtaaatcttgcggatagattttgtcctttgcactaatgcctagctcaggggttatcctgaggaaggatggcttctgcctgcaagaatattttcgtttagagcatgggtgggatcttactgcaaagttccctataatgctctttttcatcctaaggaacacaaacgatcctaaggatggaagtacttaaatcgagacttgagctaggaacaggtgatgttctacccaggttgattaaggattatagag

SEQ ID NO: 40084 - DNA, 1549 bp, Zea Mays
ctgcgtttctcttcccttctctctctgctccgggttcagagcagagctcagcgccctgtctccctccctccctccattcctcctcctccgctctctctctgcaggcctgcactgtgaggagactgtgacccggggacggagagctcctttcttctctctcatcgctccaccccttatttaccggtcggttgttcctgggccgtcccgtcccgtcccgtcgtctcgcctgggttctcgcttgcttctcaccatcactaccaccgtccacaccatcgcgagggcctggagggaagaggatgggacagggaggagaagtgaaggcggcgccggccgtgagggtgctggtggtggacgactcccccgtcgaccgcaaggtcgtggagctgctgctccggaaccacaaccaccagggcggcgccgcgccattccacgcggataaccattgacatcgtgctcacggactactgcatgccggagatgactggctacgacctgctcaaggccatcaaggcgctgagctcccctaacccgatcccggtggtggtgatgtcgtcggagaacgagccccagaggatcagcagatgcctaaccgccggtgccgaggatttcatcctcaagccactcaagaccaaggacgtgcagcgcctgcgcaactgctccagcgccgctagacccagggacgacgcggcccaccagtgcgagagcttgaggaggagcagcagaaagctgcggtcggatcaggtcgccgcgcctggccacagatcgcaaccgacgacgggattaaccatggtactgttattcatcgtttcttgctgttcctccttcagaagatcagccagagcttataatttcaatggatgccccccacccccaggtgctgcatgcctccagcattgagctctcgcactacttccagttcctcctcaagttcgtgctgctcgcgtacgcggtgctgtgcctgaccgagctcctccacagatggtccaatggctccgtcctctccctgtggtctgcatgaggtcgactggaaccgcgatgcggtattattagtgtaaccactaaggctccaggctttcagttcaattcccccctgtaatccagtcctggcatgaggagccaccagttcttgctcgccgctccctatatttccatttcacttttcaccagcttttttgtggttattattatttatttttttggctagattattgttcttgcatttgggggcgtcgtatcgtttgcttggttgatggaagcgacaagaagtgggcgcgataaggtgatggtgattatatatagtgtaaatgcacggtatgagtgggtcagggtatctaatgtccctgttaatcaagataccggcttgatctgccgatgcaactgccagagacgccatttcttatggcgggtggggtggacgcagacgcccacctgctctgctgttaacctcagtacccgcggtcacgctgtgcgtcagtgacacaaacaaaactgcataagttgaccgccatatgacgccacattgatcttaggggaaagcaaaaatattgtg

SEQ ID NO: 40085 - DNA, 752 bp, Zea Mays
gtttctcttcccttctctctctgctccgggttcagagcagagctcagcgccctgtctccctccctccctccattcctcctcctccgctctctctctgcaggcctgcactgtgaggagactgtgacccggggacggagagctcctttcttctctctcatcgctccaccccttatttaccggtcggttgttcctgggccgtcccgtcccgtcccgtcgtctcgcctgggttctcgcttgcttctcaccatcactaccaccgtccacaccatcgcgagggcctggagggaagaggatgggacagggaggagaagtgaaggcggcgccggccgtgagggtgctggtggtggacgactcccccgtcgaccgcaaggtcgtggagctgctgctccggaaccacaaccaccagggcggcgccgcgccattccacgttaccgccgtcgacagcggcaagaaggcaatggagcatctccggctgatggagcaaggcggccagctggattcatgtgccgctgatgctaatgtgagtactaccagtaccacacctatacccagtctcatgtactcgccgcccaatcgtaggccaccgtacatgtctgcagatgccgagctgtctcttagaaatggagaaaggtttcctttagtgtactgatttagttctagtgcgttagtattaccaaggaaaaaaaacatagaccgtgttctcatgacgtgatgagatctttgactgcaagtgcaagtgcaagcagaaatga

SEQ ID NO: 40086 - DNA, 1845 bp, Zea Mays
gtttctcttcccttctctctctgctccgggttcagagcagagctcagcgccctgtctccctccctccctccattcctcctcctccgctctctctctgcaggcctgcactgtgaggagactgtgacccggggacggagagctcctttcttctctctcatcgctccaccccttatttaccggtcggttgttcctgggccgtcccgtcccgtcccgtcgtctcgcctgggttctcgcttgcttctcaccatcactaccaccgtccacaccatcgcgagggcctggagggaagaggatgggacagggaggagaagtgaaggcggcgccggccgtgagggtgctggtggtggacgactcccccgtcgaccgcaaggtcgtggagctgctgctccggaaccacaaccaccagggcggcgccgcgccattccacggtcagcggctcctgctcctcagctcctcgcttgctcccctctcgtccggtcccttccgttccgtctggccactccattcctcccctctgctggtctcgacgacccttctcggcggcccgtgtactctgatccgggattatggctatgcataggaattgcatggcatgatcaagcttcatccattcgtcgtctgtcagttgcttatcagtactgttgaagaaaaaacgaaattaaatttccgcagcatgaactaattaaggcccgggtttcgttcctttcctcgtttggttcagttaccgccgtcgacagcggcaagaaggcaatggagcatctccggctgatggagcaaggcggccagctggattcatgtgccgctgatgctaatcggataaccattgacatcgtgctcacggactactgcatgccggagatgactggctacgacctgctcaaggccatcaaggcgctgagctcccctaacccgatcccggtggtggtgatgtcgtcggagaacgagccccagaggatcagcagatgcctaaccgccggtgccgaggatttcatcctcaagccactcaagaccaaggacgtgcagcgcctgcgcaactgctccagcgccgctagacccagggacgacgcggcccaccagtgcgagagcttgaggaggagcagcagaaagctgcggtcggatcaggtcgccgcgcctggccacagatcgcaaccgacgacgggattaaccatggtgctgcatgcctccagcattgagctctcgcactacttccagttcctcctcaagttcgtgctgctcgcgtacgcggtgctgtgcctgaccgagctcctccacagatggtccaatggctccgtcctctccctgtggtctgcatgaggtcgactggaaccgcgatgcggtattattagtgtaaccactaaggctccaggctttcagttcaattcccccctgtaatccagtcctggcatgaggagccaccagttcttgctcgccgctccctatatttccatttcacttttcaccagcttttttgtggttattattatttatttttttggctagattattgttcttgcatttgggggcgtcgtatcgtttgcttggttgatggaagcgacaagaagtgggcgcgataaggtgatggtgattatatatagtgtaaatgcacggtatgagtgggtcagggtatctaatgtccctgttaatcaagataccggcttgatctgccgatgcaactgccagagacgccatttcttatggcgggtggggtggacgcagacgcccacctgctctgctgttaacctcagtacccgcggtcacgctgtgcgtcagtgacacaaacaaaactgcataagttgaccgccatatgacgccacattgatcttaggggaaagcaaaaatattgtg

SEQ ID NO: 40087 - DNA, 3017 bp, Zea Mays
aaaaaaaagcagcgcctccacctccacctcccgactccaagccaaggcggcccacggagccacaccgcacaccccatcccgcccggagcagcaaagcataggtgctcgagcgctccctccagagctccccgcctgccgccccgtcctcaccctcctcggtcgcctcccgccgaggctcggctcccgtccgcagccaccacgtgcgacctcccctcccctgttcctgagaatctccgtaggtcggcatggggtgaccagatcggtgctctccagctgaattctgctcgcggctcgtctcggaggcagcggagatggcgagcgccggcgtggcgggctgctcagggagtgctggcgatgctttgttcagggaactctggcatgcttgtgctgggccgttggtcacagtgcctcgccaaggcgagctggtttactacttcccacaggcttgaagcatctacagatcaacaacttgatcagcacttacctttgtttgatctaccacccaagattctctgcaaggtggtcaatgtagaacttagagctgaaactgattctgatgaagtttatgctcaaattatgctgcaaccagaagcagatcaaagtgagcccaccagcccagattctgagccaccggagcctgaaagatgcaacgtctattccttctgcaagaccttgactgcttcagatacaagtacccatggtggattctctgtcctcaggaggcatgctgaagaatgtttgccccaactggacatgactcagaatccaccatggcaagaactgctggctaaagatctccatggaaatgaatggcatttccgtcacatctttcgagggcaaccaaggaggcatctacttacgacaggttggagtgtttttgttagctcaaaaagattggttgctggtgacgcgtttatctttttgagaggtgagaacggagagctgagagttggggtaaggaggctcatgaggcaactaaataacatgccatcttcggttatctcaagccacaacatgcatcttggagtcctagcaactgcatctcatgccatctccacaggaactctcttttctgttttctacaaacctagaacaagtcgatcggaatttgtcgttagtgtaaataagtaccttgaagctaagaatcacaaggtgtctgttggcatgaggtttaaaatgagatttgagggtgatgaatctcctgaaagaagattaagtgggacaattattggtctgggaagcatgccagctaactcaacttctccatgggctaactctgattggagatctttgagggtccaatgggacgagccttctgctattctgcgtccagatagagtttcaccatgggaactagaaccccttgatgcaactaatccacaaccacctcaacctcatttacggaataagcgtgcacgaccccctgctttactttctattgctccagaacttcctcaagtttttggttttttgaaatccccagctgagcctgcccaagctttctcattttcaagaccgcagcaaactcaggaattataccattcaaatcccagttcaatcttctcatcatcgttgaatgtaggattcagttcaaagaatgaccgttctactccaatcaacagtcatttgtactggacaatgaggcagacaagaactgaatcctactctgctagcattaacaaagctcctactgaaaagaagcaagaatctgctacttctggctgcagattgtttggcattgagataggttctgcagtatcaccagtggctactgttgctagtgttggccaggatcagccacctgctctctcagtagacgttgaatctgattagctgtcacagccatccaatgccaacaaaacggatgccccagtggcaagcagcgagcgctctcttaacgagtcagagagccggcaagtcaggagctgcaccaaggtaatcatgcaaggaatggcggttggcagggcagtggacttgacaaggttagatgggtatgctgatctccaccgcaagttggaggagatgtttgatatccagggagagctttctgccaacctcaagaaatggaaggtcatttacacagatgacgaggatgatacgatgctggtcggggacgatccatggaatgaattcctcaggatggtaaaaaggatatacatttactcttacgaggaggccaagtctttgactcgcaaggcgaagccgccggttgttggtgacaccatcaagccagacccaaacaaattgccaccggaatctgacgtgccacatgactcaaacaacaatgctcccgttgctgctgattatcaggactgatggatgctaacttggctcctaccttttctttcccctcttggatgtcggtcatgggaggcaatgcacgctccttgggacttgtaagagttatctgttttgttgcttcgcgggcccaaaggacgcttccctgcaccatctgcctttgtttggaacggcttggaccgccgtggtccttttacctgcagcaaggaaaggaatggctgggagggaatggatactggtatcgttccgtgtgtggcaccccgtgatctgtttgccgtgctttgtaggaggcatggcgtattgccgggtactttggttttggagactgctactgactgctgccgtcgtcgggccgctcctctcacctctggtaaataggactttgtacacaattattttgttagtagcagtatatgtacatcatcggtcgtgttgcttgctacatgtactcctatgtagcatcctcccctgcattttagtcctggctaggtatcagatgctctggtgcaaaaatgtctctgcttgttccaacggcatgctcttttcggcccgtgctgccttgctgggtgtcgtgtgtgccttttcggttggaacattgctgccaccgcccggcatttggtgctttcttggtgttatgtgtctgccctcgtgtacaaggcatctgtaacgcctggggtctctgtttgacgcgatgctgatgcgggcgcggccctttctgc

SEQ ID NO: 40088 - DNA, 3030 bp, Zea Mays
aaaaaaaagcagcgcctccacctccacctcccgactccaagccaaggcggcccacggagccacaccgcacaccccatcccgcccggagcagcaaagcataggtgctcgagcgctccctccagagctccccgcctgccgccccgtcctcaccctcctcggtcgcctcccgccgaggctcggctcccgtccgcagccaccacgtgcgacctcccctcccctgttcctgagaatctccgtaggtcggcatggggtgaccagatcggtgctctccagctgaattctgctcgcggctcgtctcggaggcagcggagatggcgagcgccggcgtggcgggctgctcagggagtgctggcgatgctttgttcagggaactctggcatgcttgtgctgggccgttggtcacagtgcctcgccaaggcgagctggtttactacttcccacagggtcatatggaacagcttgaagcatctacagatcaacaacttgatcagcacttacctttgtttgatctaccacccaagattctctgcaaggtggtcaatgtagaacttagagctgaaactgattctgatgaagtttatgctcaaattatgctgcaaccagaagcagatcaaagtgagcccaccagcccagattctgagccaccggagcctgaaagatgcaacgtctattccttctgcaagaccttgactgcttcagatacaagtacccatggtggattctctgtcctcaggaggcatgctgaagaatgtttgccccaactggacatgactcagaatccaccatggcaagaactgctggctaaagatctccatggaaatgaatggcatttccgtcacatctttcgagggcaaccaaggaggcatctacttacgacaggttggagtgtttttgttagctcaaaaagattggttgctggtgacgcgtttatctttttgagaggtgagaacggagagctgagagttggggtaaggaggctcatgaggcaactaaataacatgccatcttcggttatctcaagccacaacatgcatcttggagtcctagcaactgcatctcatgccatctccacaggaactctcttttctgttttctacaaacctagaacaagtcgatcggaatttgtcgttagtgtaaataagtaccttgaagctaagaatcacaaggtgtctgttggcatgaggtttaaaatgagatttgagggtgatgaatctcctgaaagaagattaagtgggacaattattggtctgggaagcatgccagctaactcaacttctccatgggctaactctgattggagatctttgagggtccaatgggacgagccttctgctattctgcgtccagatagagtttcaccatgggaactagaaccccttgatgcaactaatccacaaccacctcaacctcatttacggaataagcgtgcacgaccccctgctttactttctattgctccagaacttcctcaagtttttggttttttgaaatccccagctgagcctgcccaagctttctcattttcaagaccgcagcaaactcaggaattataccattcaaatcccagttcaatcttctcatcatcgttgaatgtaggattcagttcaaagaatgaccgttctactccaatcaacagtcatttgtactggacaatgaggcagacaagaactgaatcctactctgctagcattaacaaagctcctactgaaaagaagcaagaatctgctacttctggctgcagattgtttggcattgagataggttctgcagtatcaccagtggctactgttgctagtgttggccaggatcagccacctgctctctcagtagacgttgaatctgattagctgtcacagccatccaatgccaacaaaacggatgccccagtggcaagcagcgagcgctctcttaacgagtcagagagccggcaagtcaggagctgcaccaaggtaatcatgcaaggaatggcggttggcagggcagtggacttgacaaggttagatgggtatgctgatctccaccgcaagttggaggagatgtttgatatccagggagagctttctgccaacctcaagaaatggaaggtcatttacacagatgacgaggatgatacgatgctggtcggggacgatccatggaagaattcctcaggatggtaaaaaggatatacatttactcttacgaggaggccaagtctttgactcgcaaggcgaagccgccggttgttggtgacaccatcaagccagacccaaacaaattgccaccggaatctgacgtgccacatgactcaaacaacaatgctcccgttgctgctgattatcaggactgatggatgctaacttggctcctaccttttctttcccctcttggatgtcggtcatgggaggcaatgcacgctccttgggacttgtaagagttatctgttttgttgcttcgcgggcccaaaggacgcttccctgcaccatctgcctttgtttggaacggcttggaccgccgtggtccttttacctgcagcaaggaaaggaatggctgggagggaatggatactggtatcgttccgtgtgtggcaccccgtgatctgtttgccgtgctttgtaggaggcatggcgtattgccgggtactttggttttggagactgctactgactgctgccgtcgtcgggccgctcctctcacctctggtaaataggactttgtacacaattattttgttagtagcagtatatgtacatcatcggtcgtgttgcttgctacatgtactcctatgtagcatcctcccctgcattttagtcctggctaggtatcagatgctctggtgcaaaaatgtctctgcttgttccaacggcatgctcttttcggcccgtgctgccttgctgggtgtcgtgtgtgccttttcggttggaacattgctgccaccgcccggcatttggtgctttcttggtgttatgtgtctgccctcgtgtacaaggcatctgtaacgcctggggtctctgtttgacgcgatgctgatgcgggcgcggccctttctgc

SEQ ID NO: 40089 - DNA, 1969 bp, Zea Mays
ttaaccctaaccttaactttacttgtcctcttgttcctccgcatctcttgccatccgctggagaagagtcaatcgcggcggccccgttcaatggtctcacgacggctaccgtgaacacgacgacgcacccgcgcgagatggcgacctcctcggcgtctatctatggcttggttgctggcgaggctagtggcgatcttgttgccctccctcaggcgggtgagtcttgcggcgggcgcaaacacagcgggtgagctaatggcagccaatgcaaccggttaagggcacacgtccggcaatggcgccccgtactgtagtgcctatagtggtcagcgccaagccctatcaggccatgtgcacaccagtaccgcggtgcctgctgcatgctcctgcgcccaacgccaaaggaaaaaaaaggaatacggtctactactagagtagtagttctccattcatcactttgcactttgcagtcgatctcagccagccatcctcctgcagtcctgctatcgtcaccctgcaggctctttcttgattccgaggtctggataaatcttggatctggagcccagactcgctctcatgaactcaggtaacagtacataaatctgcaacgcacggacttgttcttctgaactcacctgcctgatagcgcttaaatctgcaatgtgatggcggtcagactacaccaccaacaagggcgccaacgggcggccgcatggcaagaagaatcaagcgttggctcggcccaaggcgacgccgtccaagtgggacgacgcgcagaaatggcttgtgggcatgtcgaacggccacgcggacggaacccacggtgccagagtcaagcctaggagctctaacgccgacgacaggcgcctcctcggctcggcctcgcagaacggccgcgtgtcctgcagcagcgtggatggcgccttggagtacagcatggtggtggccgcgccctcgacaccgccgcaggccgccgagggcggcggcgacatggaggaaaccaagaagatcgactgcatggtgcagctgcatgactcgccccaagcggtgatgcggtccgtgtgcctgcgggacatggggacggaaatgacccccatcgccagcaaggagccgtccaggacacccacgccccggcgcgcctgcacgcccgttgcgctgagcccgatggcctcaaggtcgtccaccccggtgagaagacgccaggaagggcccgtgggcgtgaccacggccattgtagcagggacgctgaccgagcaggtagcggcagcagacgaggtcgcttgcgtcggggacgagcgccccgtggctggtcatgtgcccagcgtgaactctctggagtctcgcgcggcagcctgggatgaggctgaacgggccaagttcatggcgaggtataaacgtgaagaggtaaagatacaggcctgggagaaccatgagaagagaaaagccgagacaaagatgaagaaaatgcagatgaaggctgatcagatgaaagcacggggccaagaggagctgtccaaccggctggccaccacgcgtcggatggctgaggagaagcgggcgagcgctgaggcgaagctcaatgagcgtgcggccaggacatcggagaaggccaactacatcaggaggactgggcacctgccgtcctccttcaagatttcttgcttgtgcggctcgagctttgagtaacagaataacaattattagtccaaataatacaatgaagatagtccaactcaacttcaaattcttcctcttcaacatggtgcttctcattcttctacctgaacgatgacaaatatgtggtctctatttttctcttatgatggatttattaaattttgtgcagttgagaataaacaatatacccccgatggtctagccaaaatacgcctgaattgtacatgttaattatgctacaatttgaatacttatgtagtgaaactctacaatacaatctacaacaacg

SEQ ID NO: 40090 - DNA, 1686 bp, Zea Mays
ttaaccctaaccttaactttacttgtcctcttgttcctccgcatctcttgccatccgctggagaagagtcaatcgcggcggccccgttcaatggtctcacgacggctaccgtgaacacgacgacgcacccgcgcgagatggcgacctcctcggcgtctatctatggcttggttgctggcgaggctagtggcgatcttgttgccctccctcaggcgggtgagtcttgcggcgggcgcaaacacagcgggtgagctaatggcagccaatgcaaccggttaagggcacacgtccggcaatggcgccccgtactgtagtgcctatagtggtcagcgccaagccctatcaggtctggataaatcttggatctggagcccagactcgctctcatgaactcagactacaccaccaacaagggcgccaacgggcggccgcatggcaagaagaatcaagcgttggctcggcccaaggcgacgccgtccaagtgggacgacgcgcagaaatggcttgtgggcatgtcgaacggccacgcggacggaacccacggtgccagagtcaagcctaggagctctaacgccgacgacaggcgcctcctcggctcggcctcgcagaacggccgcgtgtcctgcagcagcgtggatggcgccttggagtacagcatggtggtggccgcgccctcgacaccgccgcaggccgccgagggcggcggcgacatggaggaaaccaagaagatcgactgcatggtgcagctgcatgactcgccccaagcggtgatgcggtccgtgtgcctgcgggacatggggacggaaatgacccccatcgccagcaaggagccgtccaggacacccacgccccggcgcgcctgcacgcccgttgcgctgagcccgatggcctcaaggtcgtccaccccggtgagaagacgccaggaagggcccgtgggcgtgaccacggccattgtagcagggacgctgaccgagcaggtagcggcagcagacgaggtcgcttgcgtcggggacgagcgccccgtggctggtcatgtgcccagcgtgaactctctggagtctcgcgcggcagcctgggatgaggctgaacgggccaagttcatggcgaggtataaacgtgaagaggtaaagatacaggcctgggagaaccatgagaagagaaaagccgagacaaagatgaagaaaatgcagatgaaggctgatcagatgaaagcacggggccaagaggagctgtccaaccggctggccaccacgcgtcggatggctgaggagaagcgggcgagcgctgaggcgaagctcaatgagcgtgcggccaggacatcggagaaggccaactacatcaggaggactgggcacctgccgtcctccttcaagatttcttgcttgtgcggctcgagctttgagtaacagaataacaattattagtccaaataatacaatgaagatagtccaactcaacttcaaattcttcctcttcaacatggtgcttctcattcttctacctgaacgatgacaaatatgtggtctctatttttctcttatgatggatttattaaattttgtgcagttgagaataaacaatatacccccgatggtctagccaaaatacgcctgaattgtacatgttaattatgctacaatttgaatacttatgtagtgaaactctacaatacaatctacaacaacg

SEQ ID NO: 40091 - DNA, 1882 bp, Zea Mays
ttaaccctaaccttaactttacttgtcctcttgttcctccgcatctcttgccatccgctggagaagagtcaatcgcggcggccccgttcaatggtctcacgacggctaccgtgaacacgacgacgcacccgcgcgagatggcgacctcctcggcgtctatctatggcttggttgctggcgaggctagtggcgatcttgttgccctccctcaggcgggtgagtcttgcggcgggcgcaaacacagcgggtgagctaatggcagccaatgcaaccggttaagggcacacgtccggcaatggcgccccgtactgtagtgcctatagtggtcagcgccaagccctatcagtaggccatgtgcacaccagtaccgcggtgcctgctgcatgctcctgcgcccaacgccaaaggaaaaaaaaggaatacggtctactactagagtagtagttctccattcatcactttgcactttgcagtcgatctcagccagccatcctcctgcagtcctgctatcgtcaccctgcaggctctttcttgattccgaggtctggataaatcttggatctggagcccagactcgctctcatgaactcagactacaccaccaacaagggcgccaacgggcggccgcatggcaagaagaatcaagcgttggctcggcccaaggcgacgccgtccaagtgggacgacgcgcagaaatggcttgtgggcatgtcgaacggccacgcggacggaacccacggtgccagagtcaagcctaggagctctaacgccgacgacaggcgcctcctcggctcggcctcgcagaacggccgcgtgtcctgcagcagcgtggatggcgccttggagtacagcatggtggtggccgcgccctcgacaccgccgcaggccgccgagggcggcggcgacatggaggaaaccaagaagatcgactgcatggtgcagctgcatgactcgccccaagcggtgatgcggtccgtgtgcctgcgggacatggggacggaaatgacccccatcgccagcaaggagccgtccaggacacccacgccccggcgcgcctgcacgcccgttgcgctgagcccgatggcctcaaggtcgtccaccccggtgagaagacgccaggaagggcccgtgggcgtgaccacggccattgtagcagggacgctgaccgagcaggtagcggcagcagacgaggtcgcttgcgtcggggacgagcgccccgtggctggtcatgtgcccagcgtgaactctctggagtctcgcgcggcagcctgggatgaggctgaacgggccaagttcatggcgaggtataaacgtgaagaggtaaagatacaggcctgggagaaccatgagaagagaaaagccgagacaaagatgaagaaaatgcagatgaaggctgatcagatgaaagcacggggccaagaggagctgtccaaccggctggccaccacgcgtcggatggctgaggagaagcgggcgagcgctgaggcgaagctcaatgagcgtgcggccaggacatcggagaaggccaactacatcaggaggactgggcacctgccgtcctccttcaagatttcttgcttgtgcggctcgagctttgagtaacagaataacaattattagtccaaataatacaatgaagatagtccaactcaacttcaaattcttcctcttcaacatggtgcttctcattcttctacctgaacgatgacaaatatgtggtctctatttttctcttatgatggatttattaaattttgtgcagttgagaataaacaatatacccccgatggtctagccaaaatacgcctgaattgtacatgttaattatgctacaatttgaatacttatgtagtgaaactctacaatacaatctacaacaacg

SEQ ID NO: 40092 - DNA, 2063 bp, Zea Mays
ttaaccctaaccttaactttacttgtcctcttgttcctccgcatctcttgccatccgctggagaagagtcaatcgcggcggccccgttcaatggtctcacgacggctaccgtgaacacgacgacgcacccgcgcgagatggcgacctcctcggcgtctatctatggcttggttgctggcgaggctagtggcgatcttgttgccctccctcaggcgggtgagtcttgcggcgggcgcaaacacagcgggtgagctaatggcagccaatgcaaccggttaagggcacacgtccggcaatggcgccccgtactgtagtgcctatagtggtcagcgccaagccctatcagtaggccatgtgcacaccagtaccgcggtgcctgctgcatgctcctgcgcccaacgccaaaggaaaaaaaaggaatacggtctactactagagtagtagttctccattcatcactttgcactttgcagtcgatctcagccagccatcctcctgcagtcctgctatcgtcaccctgcaggctctttcttgattccgaggtcagcaacaacttttcctgtctctcttttccaatcgctttcagtgaaaaggatctggcaattccaggtaaacttgagtaaagagaaatgccgaggttagttctaacttcatactgatttggtgccattaagctatgcgcgacaaaagtggggaacggtgaaaaggggattcatatttttggtctggataaatcttggatctggagcccagactcgctctcatgaactcagactacaccaccaacaagggcgccaacgggcggccgcatggcaagaagaatcaagcgttggctcggcccaaggcgacgccgtccaagtgggacgacgcgcagaaatggcttgtgggcatgtcgaacggccacgcggacggaacccacggtgccagagtcaagcctaggagctctaacgccgacgacaggcgcctcctcggctcggcctcgcagaacggccgcgtgtcctgcagcagcgtggatggcgccttggagtacagcatggtggtggccgcgccctcgacaccgccgcaggccgccgagggcggcggcgacatggaggaaaccaagaagatcgactgcatggtgcagctgcatgactcgccccaagcggtgatgcggtccgtgtgcctgcgggacatggggacggaaatgacccccatcgccagcaaggagccgtccaggacacccacgccccggcgcgcctgcacgcccgttgcgctgagcccgatggcctcaaggtcgtccaccccggtgagaagacgccaggaagggcccgtgggcgtgaccacggccattgtagcagggacgctgaccgagcaggtagcggcagcagacgaggtcgcttgcgtcggggacgagcgccccgtggctggtcatgtgcccagcgtgaactctctggagtctcgcgcggcagcctgggatgaggctgaacgggccaagttcatggcgaggtataaacgtgaagaggtaaagatacaggcctgggagaaccatgagaagagaaaagccgagacaaagatgaagaaaatgcagatgaaggctgatcagatgaaagcacggggccaagaggagctgtccaaccggctggccaccacgcgtcggatggctgaggagaagcgggcgagcgctgaggcgaagctcaatgagcgtgcggccaggacatcggagaaggccaactacatcaggaggactgggcacctgccgtcctccttcaagatttcttgcttgtgcggctcgagctttgagtaacagaataacaattattagtccaaataatacaatgaagatagtccaactcaacttcaaattcttcctcttcaacatggtgcttctcattcttctacctgaacgatgacaaatatgtggtctctatttttctcttatgatggatttattaaattttgtgcagttgagaataaacaatatacccccgatggtctagccaaaatacgcctgaattgtacatgttaattatgctacaatttgaatacttatgtagtgaaactctacaatacaatctacaacaacg

SEQ ID NO: 40093 - DNA, 673 bp, Zea Mays
cgatgagctccactgcatctgccatatattcatcgctttggacttgattcagtgaagttcttcccctttgccctcaagctctagccaaagctactgcgtgtatgttgtaaaacctatgtccatgatggtggtagctattctccttagccatcagttcggatttcccatgttcatcacagccaacatcccagtctggtgaccacgctcacccaactgtccacctcaccgtggtcaaggatttccgaaggttttctcagtcatgtggcttttgttccgtgctcatctaagaacacctagacgaggtggtatttgaagaagtctactccagtgcctgctcctcaagtggatggagccatctaactaggtattggatagagggatctggaacctcttcactgcaacaaagacaagccccgatgcatttacccattccttttatttttaaaaagacttttgtacacttaagtctagtgaaatgtgcattaagtttataggaattgcttggaaactatttgatgcattgactaccttgatatccatgcctttatagatacttctgatgaagtatcaaaatatgatttacaaagatgcttatccctgcttagatcttgtggatagaggttgtcttttgcaataatgcctagctcaagggttatcctgaggaaggatgact

SEQ ID NO: 40094 - DNA, 544 bp, Zea Mays
atcgctttggacttgattcagtgaagttcttcccctttgccctcaagctctagccaaagctactgcgtgtatgttgtaaaacctatgtccatgatggtggtagctattctccttagccatcagttcggatttcccatgttcatcacagccaacatcccagtctggtgaccacgctcacccaactgtccacctcaccgtggtcaaggatttccgaaggttttctcagtcatgtggcttttgttccgtgctcatctaaggtgatgaggagtactctaagtgatttggaggctggagggcgtttccagttctgggggaggattagttacgcttgtgtataagctttggagggttcctaccttcctgctattataataagttatacactttgagtatatcaggacttgtaataaatgtaactcttcctatgtaatgaccttcagttttagaaatgaaaagaatattttgtaaagtctttcgctcttatctttgaagtgtgtgtatcgaatgtgattactgcaatatacatgaatgtgggagatccttg

SEQ ID NO: 40095 - DNA, 890 bp, Zea Mays
cttgattcagtgaagttcttcccctttgccctcaagctctagccaaagctactgcgtgtatgttgtaaaacctatgtccatgatggtggtagctattctccttagccatcagttcggatttcccatgttcatcacagccaacatcccagtctggtgaccacgctcacccaactgtccacctcaccgtggtcaaggatttccgaaggttttctcagtcatgtggcttttgttccgtgctcatctaaggtcagtggtgctcgccaagttaggtttcctaactctactgctttgtatttccttgaacgtggtcgtgccgccgtggtctggcgccgcggtcggtcctaccgtcgacccgtcaaccagcgttgtccccggtcaaactcacacgagcaaaaggatctaggtgagatggtgatgctctccgcgtgtttggctagagatctatcgcggggttacctcgggattggcctcggccagccagatgtatcgctggcatcgttgccgatggagactagtgttcggttcgggcattgaagccatggagcttgttcgcgttagatagtgacgtgtttcggtagtggttagagcacgtcagaatgcaacgccgccgcggccatggtcgccggagtagggcggctggatcgtggctgagatgttgcaaataaaacggagtcgaggggcctaagggcgtgtttgtttacccccatggattatataatctggattatttttggaagattatataatctggattatataatctgaattatataatctgaatagtcctgtttgtttactcagattattttgagttgttaataggattctctgatccaatagacgcaaaaatgattcggtggattataatggcaatggtgggtaatttctag

SEQ ID NO: 40096 - DNA, 856 bp, Zea Mays
aatttttaaagcagttagaaaattttaagtgaattaagggtgctcttggaaggactgtttgaattttagaactaagaatatagcaccaaaaattgagaaaattcttggagaaactagttatcagaagttaaaaccttgggcgaaatttaaaattgtttggatacgattttgtcagcagactaattattgcctaaaaaaagggtttcgcctatgaaatgagaacacctagtagtttagtgaggagatgcagttgcttaagaagttttaagctattggatgagatctaagatggattagttctctggtttgcctaagtgaatccgatttgaccacttttagcaagtgttggtggtgtagaaccatgtgtatacttgtcatgtattttagtttgtggtgtttatgttccccacctctccagtttgcattacatttcattacataagcattcatgtatttgtaattgacttgtagaacacctagacgaggtggtatttgaagaagtctactccagtgcctgctcctcaagtggatggagccatctaactaggtattggatagagggatctggaacctcttcactgcaacaaagacaagccccgatgcatttacccattccttttatttttaaaaagacttttgtacacttaagtctagtgaaatgtgcattaagtttataggaattgcttggaaactatttgatgcattgactaccttgatatccatgcctttatagatacttctgatgaagtatcaaaatatgatttacaaagatgcttatccctgcttagatcttgtggatagaggttgtcttttgcaataatgcctagctcaagggttatcctgaggaaggatgact

SEQ ID NO: 40097 - DNA, 899 bp, Zea Mays
gaaacttgggctaggaacaggtgatgctccacccagattaattaaggattggatgcgtatgtaggcctgtatgatcaaggactatcttaactggccacatgccctagatatggacagggtaagcttgaacctggctattccatatgtgaaaagaaaactgcgcactgggcgtgggagatggtgggagtagcgtgtaccctcctggttagaggctggacggaggagtactgtgctctcgggtagcgcggaccggttcacattgtggaggatctgtgggaatggttgacatatgcaagggttaagtgctacatatgtcatgtggttagagatcctcagctgagtaaatcgattcggatcgccgttatatcctcggacagtggagacttgatctctgacctgcaacctaggtcaggatgtaaacattataaataaaaatgatgttgtattgatgagatagtgaaattagtctagatgcaaccagagtctattaatatttaatctggcgttaaaatattgaaagtaaggactcactttaataagctatttccgcaaaagtatctaaattgattcttgctaaagccttttccttgattcctatttaacgagcatatccttgagagtcatttttccttagtcaggtaagacttgcgaaagtacatttcgtactcagggttttcgaacccatgttgttgtaggtgatgaggagtactctaagtgatttggaggctggagggcgtttccagttctgggggaggattagttacgcttgtgtataagctttggagggttcctaccttcctgctattataataagttatacactttgagtatatcaggacttgtaataaatgtaactcttcctatgtaatgaccttcagttttagaaatgaaaagaatat

SEQ ID NO: 40098 - DNA, 2221 bp, Zea Mays
agactctccgcagttcggcctcgcgattccgcgggagactgttctacttctcgccggcgacgccgattcgatctgacgggcacacatcagaaggctggaggagggcactgggagccgagggggaggctaagggtcaggattcgggcgcgatgccgcgcccgggacgacttcagcggtcggggtccaagcgcgggctggaccccaccggtggtggcggcggcggcgacaacgacgaccatgcgcccaagcgcccgcgcatccctgccctcgctagtgtcattgtggaagctctcaagatggacagtttgcagaaactctgttcatcgctcgagcccattctccgaagagttgtaagtgaagaagtagagcgtgctttagccaaactgggtcctgctagaattcaaggaagatcctcccccaaaagaattgaagggcctgatggaagaaatcttcagctccagttcagaagtcagttggctcttccaatcttcactggtggaaaagttgaagacgaagatgaggattggacagaagaagagtttgaaagtaatattgtcaaggagcgtgaagggaagagacctcttttgacaggaaatttatacttgggctgaggattgctcctggcttttatgaaggcattcgtgtccgagaagccaagacagaagctttccccgttaaggatcacagaggagaattgtacaaaaaacactacccacccacgctgaaggatgatgtttggagattagaaaagattggcaaggatggcgcattccacaagaagttaaatgctagtgggatctatacagttgaagatttcctccagcttcttgttagggatcagcagagattacgtagcattctgggcagtggaatgtcaaataagatgtgggacagccttgttgatcatgcaaagacgtgtgtcttaagtggaaagcattatgtatactatgctagagactcaagaaacgtgggtgcaatattcaataacatctatgagttcactggtttgattgccgatgatcagttcatttcagctgaaaatcttacagacaatcaaaagggctatgctgatgcattggtaaagaaagcatatgaggactggatgcaagttgtagaatatgatggcaaggcactcttgagcttcaagcagaaaaagaaatctgtcatgacaagaagcgatgctgcagttgcctcgacaaaccaccctgcttcaaatggttcggccatttcacagaaacaattgtcccttccagcaaaagctggacaaacttcctccgcgggtattatgaatgaagatggaactagaaatgcttacaatgcaaatggaaaccagtcagcaagatatgcagccaccactcagaacattcctgcaaacgtcgccatgcaatatgacaggagtgcagtgtcgcctgaaagccagtttagtggttcatcccttcagagtcaagcttcaagagggtccaatacgctagcattgggccctccacagcaacatcaaagttttgcattcccagcactcggccagtccatgcggccaacaggcctgaatccttttgaagaatggccgcagcaacaggaaaactgtggcggtgttgatgactacctgatggaggagatcaggatgaggagccatgagattctcgaaaacgaagaaatgcagcagatgttgcggcttctgagcacgggtggtgcaggaaccaacctaactgaagatggcttcagtttcccttcgtacatgcctgcaccttcaccaaaattgagctacgaggatgaccgcacccgtgcacctgggaaagccgttgttgggtggctcaagatcaaggctgctatgcggtggggcatctttgtcaggaagaaggcagctgagagaagagctcagcttgttgagctagacgactagaaagtattgcagctggaagcatgtgcactccagatgttcatgtaccaaagtttcgttgatgtttgtggatccggatggactcagccttgttcgatgcatataagttgatttgtccaggctgttcttttaattactatggaaaaaaatccctttcttactttagatgcatataagttgattttttatcacattctggactgctgtcctcgaaattacaaaatctggagctaaaacagtttaggttttaaccttaacctgatagcaactcaatcgaaaactcgatctctctttctgccggcatatcgggtacacatcgatatc

SEQ ID NO: 40099 - DNA, 2294 bp, Zea Mays
agactctccgcagttcggcctcgcgattccgcgggagactgttctacttctcgccggcgacgccgattcgatctgacgggcacacatcagaaggctggaggagggcactgggagccgagggggaggctaagggtcaggattcgggcgcgatgccgcgcccgggacgacttcagcggtcggggtccaagcgcgggctggaccccaccggtggtggcggcggcggcgacaacgacgaccatgcgcccaagcgcccgcgcatccctgccctcgctagatcctcccccaaaagaattgaagggcctgatggaagaaatcttcagctccagttcagaagtcagttggctcttccaatcttcactggtggaaaagttgaaggtgagcagggagcagctatacatgtcgtgctgttggatgcaaacactggatgtgttgttacttcaggacctgagtcgtttgcaaaattggatatccttgtacttgagggtgacttcaataaagacgaagatgaggattggacagaagaagagtttgaaagtaatattgtcaaggagcgtgaagggaagagacctcttttgacaggtgacctgcaagtgactcttaaagaaggtgttggaaccataggggagcttaccttcactgacaactccagctggataagaagcaggaaatttatacttgggctgaggattgctcctggcttttatgaaggcattcgtgtccgagaagccaagacagaagctttccccgttaaggatcacagaggagaattgtacaaaaaacactacccacccacgctgaaggatgatgtttggagattagaaaagattggcaaggatggcgcattccacaagaagttaaatgctagtgggatctatacagttgaagatttcctccagcttcttgttagggatcagcagagattacgtagcattctgggcagtggaatgtcaaataagatgtgggacagccttgttgatcatgcaaagacgtgtgtcttaagtggaaagcattatgtatactatgctagagactcaagaaacgtgggtgcaatattcaataacatctatgagttcactggtttgattgccgatgatcagttcatttcagctgaaaatcttacagacaatcaaaagggctatgctgatgcattggtaaagaaagcatatgaggactggatgcaagttgtagaatatgatggcaaggcactcttgagcttcaagcagaaaaagaaatctgtcatgacaagaagcgatgctgcagttgcctcgacaaaccaccctgcttcaaatggttcggccatttcacagaaacaattgtcccttccagcaaaagctggacaaacttcctccgcgggtattatgaatgaagatggaactagaaatgcttacaatgcaaatggaaaccagtcagcaagatatgcagccaccactcagaacattcctgcaaacgtcgccatgcaatatgacaggagtgcagtgtcgcctgaaagccagtttagtggttcatcccttcagagtcaagcttcaagagggtccaatacgctagcattgggccctccacagcaacatcaaagttttgcattcccagcactcggccagtccatgcggccaacaggcctgaatccttttgaagaatggccgcagcaacaggaaaactgtggcggtgttgatgactacctgatggaggagatcaggatgaggagccatgagattctcgaaaacgaagaaatgcagcagatgttgcggcttctgagcacgggtggtgcaggaaccaacctaactgaagatggcttcagtttcccttcgtacatgcctgcaccttcaccaaaattgagctacgaggatgaccgcacccgtgcacctgggaaagccgttgttgggtggctcaagatcaaggctgctatgcggtggggcatctttgtcaggaagaaggcagctgagagaagagctcagcttgttgagctagacgactagaaagtattgcagctggaagcatgtgcactccagatgttcatgtaccaaagtttcgttgatgtttgtggatccggatggactcagccttgttcgatgcatataagttgatttgtccaggctgttcttttaattactatggaaaaaaatccctttcttactttagatgcatataagttgattttttatcacattctggactgctgtcctcgaaattacaaaatctggagctaaaacagtttaggttttaaccttaacctgatagcaactcaatcgaaaactcgatctctctttctgccggcatatcgggtacacatcgatatc

SEQ ID NO: 40100 - DNA, 2322 bp, Zea Mays
agactctccgcagttcggcctcgcgattccgcgggagactgttctacttctcgccggcgacgccgattcgatctgacgggcacacatcagaaggctggaggagggcactgggagccgagggggaggctaagggtcaggattcgggcgcgatgccgcgcccgggacgacttcagcggtcggggtccaagcgcgggctggaccccaccggtggtggcggcggcggcgacaacgacgaccatgcgcccaagcgcccgcgcatccctgccctcgctagtgtcattgtggaagctctcaagatggacagtttgcagaaactctgttcatcgctcgagcccattctccgaagagttgtaagtgaagaagtagagcgtgctttagccaaactgggtcctgctagaattcaaggaagatcctcccccaaaagaattgaagggcctgatggaagaaatcttcagctccagttcagaagtcagttggctcttccaatcttcactggtggaaaagttgaagggtgacttcaataaagacgaagatgaggattggacagaagaagagtttgaaagtaatattgtcaaggagcgtgaagggaagagacctcttttgacaggtgacctgcaagtgactcttaaagaaggtgttggaaccataggggagcttaccttcactgacaactccagctggataagaagcaggaaatttatacttgggctgaggattgctcctggcttttatgaaggcattcgtgtccgagaagccaagacagaagctttccccgttaaggatcacagaggagaattgtacaaaaaacactacccacccacgctgaaggatgatgtttggagattagaaaagattggcaaggatggcgcattccacaagaagttaaatgctagtgggatctatacagttgaagatttcctccagcttcttgttagggatcagcagagattacgtagcattctgggcagtggaatgtcaaataagatgtgggacagccttgttgatcatgcaaagacgtgtgtcttaagtggaaagcattatgtatactatgctagagactcaagaaacgtgggtgcaatattcaataacatctatgagttcactggtttgattgccgatgatcagttcatttcagctgaaaatcttacagacaatcaaaagggctatgctgatgcattggtaaagaaagcatatgaggactggatgcaagttgtagaatatgatggcaaggcactcttgagcttcaagcagaaaaagaaatctgtcatgacaagaagcgatgctgcagttgcctcgacaaaccaccctgcttcaaatggttcggccatttcacagaaacaattgtcccttccagcaaaagctggacaaacttcctccgcgggtattatgaatgaagatggaactagaaatgcttacaatgcaaatggaaaccagtcagcaagatatgcagccaccactcagaacattcctgcaaacgtcgccatgcaatatgacaggagtgcagtgtcgcctgaaagccagtttagtggttcatcccttcagagtcaagcttcaagagggtccaatacgctagcattgggccctccacagcaacatcaaagttttgcattcccagcactcggccagtccatgcggccaacaggcctgaatccttttgaagaatggccgcagcaacaggaaaactgtggcggtgttgatgactacctgatggaggagatcaggatgaggagccatgagattctcgaaaacgaagaaatgcagcagatgttgcggcttctgagcacgggtggtgcaggaaccaacctaactgaagatggcttcagtttcccttcgtacatgcctgcaccttcaccaaaattgagctacgaggatgaccgcacccgtgcacctgggaaagccgttgttgggtggctcaagatcaaggctgctatgcggtggggcatctttgtcaggaagaaggcagctgagagaagagctcagcttgttgagctagacgactagaaagtattgcagctggaagcatgtgcactccagatgttcatgtaccaaagtttcgttgatgtttgtggatccggatggactcagccttgttcgatgcatataagttgatttgtccaggctgttcttttaattactatggaaaaaaatccctttcttactttagatgcatataagttgattttttatcacattctggactgctgtcctcgaaattacaaaatctggagctaaaacagtttaggttttaaccttaacctgatagcaactcaatcgaaaactcgatctctctttctgccggcatatcgggtacacatcgatatc

SEQ ID NO: 40101 - DNA, 2203 bp, Zea Mays
gtttagttgagttatagattgtcaatccgtgccaaaaccatgacctagtgtcattgtggaagctctcaagatggacagtttgcagaaactctgttcatcgctcgagcccattctccgaagagttgtaagtgaagaagtagagcgtgctttagccaaactgggtcctgctagaattcaaggaagatcctcccccaaaagaattgaagggcctgatggaagaaatcttcagctccagttcagaagtcagttggctcttccaatcttcactggtggaaaagttgaaggtgagcagggagcagctatacatgtcgtgctgttggatgcaaacactggatgtgttgttacttcaggacctgagtcgtttgcaaaattggatatccttgtacttgagggtgacttcaataaagacgaagatgaggattggacagaagaagagtttgaaagtaatattgtcaaggagcgtgaagggaagagacctcttttgacaggtgacctgcaagtgactcttaaagaaggtgttggaaccataggggagcttaccttcactgacaactccagctggataagaagcaggaaatttatacttgggctgaggattgctcctggcttttatgaaggcattcgtgtccgagaagccaagacagaagctttccccgttaaggatcacagaggagaattgtacaaaaaacactacccacccacgctgaaggatgatgtttggagattagaaaagattggcaaggatggcgcattccacaagaagttaaatgctagtgggatctatacagttgaagatttcctccagcttcttgttagggatcagcagagattacgtagcattctgggcagtggaatgtcaaataagatgtgggacagccttgttgatcatgcaaagacgtgtgtcttaagtggaaagcattatgtatactatgctagagactcaagaaacgtgggtgcaatattcaataacatctatgagttcactggtttgattgccgatgatcagttcatttcagctgaaaatcttacagacaatcaaaagggctatgctgatgcattggtaaagaaagcatatgaggactggatgcaagttgtagaatatgatggcaaggcactcttgagcttcaagcagaaaaagaaatctgtcatgacaagaagcgatgctgcagttgcctcgacaaaccaccctgcttcaaatggttcggccatttcacagaaacaattgtcccttccagcaaaagctggacaaacttcctccgcgggtattatgaatgaagatggaactagaaatgcttacaatgcaaatggaaaccagtcagcaagatatgcagccaccactcagaacattcctgcaaacgtcgccatgcaatatgacaggagtgcagtgtcgcctgaaagccagtttagtggttcatcccttcagagtcaagcttcaagagggtccaatacgctagcattgggccctccacagcaacatcaaagttttgcattcccagcactcggccagtccatgcggccaacaggcctgaatccttttgaagaatggccgcagcaacaggaaaactgtggcggtgttgatgactacctgatggaggagatcaggatgaggagccatgagattctcgaaaacgaagaaatgcagcagatgttgcggcttctgagcacgggtggtgcaggaaccaacctaactgaagatggcttcagtttcccttcgtacatgcctgcaccttcaccaaaattgagctacgaggatgaccgcacccgtgcacctgggaaagccgttgttgggtggctcaagatcaaggctgctatgcggtggggcatctttgtcaggaagaaggcagctgagagaagagctcagcttgttgagctagacgactagaaagtattgcagctggaagcatgtgcactccagatgttcatgtaccaaagtttcgttgatgtttgtggatccggatggactcagccttgttcgatgcatataagttgatttgtccaggctgttcttttaattactatggaaaaaaatccctttcttactttagatgcatataagttgattttttatcacattctggactgctgtcctcgaaattacaaaatctggagctaaaacagtttaggttttaaccttaacctgatagcaactcaatcgaaaactcgatctctctttctgccggcatatcgggtacacatcgatatc

SEQ ID NO: 40102 - DNA, 768 bp, Zea Mays
cttaacttatttgtaaggaagaacactgaagctagcataagatgcagttaaacaaaaagggggagctttccttgaagctccagtttcagggagcaagaagccagctgaagatggccaattggtcattcttgctgcaggggacaagccattgtatgatggtatgattcctgcatttgatgtactggggaagaagtcattctttctgggagagattggaaatggggcaaagatgaagcttgtggtcaacatggtcatgggaagtatgatgaattctttgtccgagggactctgtttggccgacaaaagtgggctgagcccccaaacacttcttgatgtactggaccttggtgccatcgcaaacccaatgttcaagctgaaggggcctacaatgctgcaaggcagctacagccctgcgtttcccctgaagcatcagcagaaggacatgaggttagcgcttgctctgggagatgagaacgccgtcgccatgcccgtctcagcagctgccaatgaggcgttcaagaaggcgaggagcctggggctgggagaccaggatttttcggcggtctatgaggttgtgaagggcgcgggtggttctggatctggccagccgtgatagaaggaccatttgtgactgtgttagcccatttccatgccgatttgcaacatagcgacgtacgagtacgtgtgtattcgagatttggaaccagaccatacgttgcaaaagaaataataaatcaaagagatgatgctagcttgcacgatagtctt

SEQ ID NO: 40103 - DNA, 1776 bp, Zea Mays
gttttggacgacgagcacctcgtggtttccgcttttcccaaattgcccctctgaaatcctcgcaggcctacggtctcgcggtattgcgcttctcgtcttctctaatcctcttctgctccctccactaccagtccaccaccaccactgctaccatcggttccccaaaccctagccaagggacacggtggccagcgatggacggcgacagagaaggcgctgcggcggtgcaccaccacgcgcgctcccccgaggacgtcttccgcgatttccgcgcgcgccgcgccggcatcgtcaaggcactcaccacggctgcttccgtggtgcgcgcagatgtggagaagttctatcagcagtgcgatccaggtgacgcgcccgactttgctcccctcttttttttcccgtccgtctgtactgctcttatcttcgagctaagcttcgcctttcactatatgccgatccggcgtttgtttatggagctcgatccggttgccgtttagagattcgtcggattatttaaggacgaatagtggtattgttagccctttacttttgtcagatatgtaagtttattctgtaattgatctcaccctccaatctgttaagatcatcaattcaaggccgtaagctaaagaaacttgcgtagatgagtacgtcaattaaaggaagtgcttggtaaatggcatggttatgtaatttaaagtcctataatatgctccagctgcggtcatttgaatttcagtttacatgcataatgctttgattgtacgtaaaaaaaaccatgtacattacataataaaggggattgaccaatttgcatttccgtttacatgcataatgcttgggttgtacgtaacaaaccatgtaccttgcataatgaaggggattgaccaatcacagtgcagtatcacttgatgggacacacgatcatttggctcatgttggtgtatgtcggtatttgctgaaagttgcagcctcagtagagttgaattgtactcattgtcattggttaccatgggcctattcatttaaaccctcagatagatgccgttttgagctacaatctgttactgctgctgtgaggattgaaatctggttaaaactataaaagctagcaaaattgatgtagtgcttttgacatgatatatcatgtaacctggtttttccaggttgccctcctgtgaatgaaaaaagaatgagaagtaatatatgttagtagaaggaattacaaattgtatgaagaattgtgaagtggagacaagataaaagtcagatgcagacattaatggtgactggcctaatattgctcaatgtccacaagtaatcctgacatacattcatggaaaacagttatgagtaaagtggcttctagtcatcattgcagcatctgttttacttgattaacattttttaatagcatccttgctctgctgtctactgatgttcagtaacatgtcataactagtgacgtgaacatatcagattccatttcctttgttttgtcctgttgacatatttctttcctttttatgccagagaaagagaacttgtgcctttatggtttgccaaatgagacttgggaggttactcttccagctgaggaagtacctcctgagcttccagaaccagcactgggcataaactttgcccgtgatggaatggttgaaaaagactggttgtctctagttgcagttcatagtgatgcgtggctcctgtctgttgcattctactttggagctcgctttggatttgataaagatgcaagcatttggatttcag

SEQ ID NO: 40104 - DNA, 1240 bp, Zea Mays
gttttggacgacgagcacctcgtggtttccgcttttcccaaattgcccctctgaaatcctcgcaggcctacggtctcgcggtattgcgcttctcgtcttctctaatcctcttctgctccctccactaccagtccaccaccaccactgctaccatcggttccccaaaccctagccaagggacacggtggccagcgatggacggcgacagagaaggcgctgcggcggtgcaccaccacgcgcgctcccccgaggacgtcttccgcgatttccgcgcgcgccgcgccggcatcgtcaaggcactcaccacggagaaagagaacttgtgcctttatggtttgccaaatgagacttgggaggttactcttccagctgaggaagtacctcctgagcttccagaaccagcactgggcataaactttgcccgtgatggaatggttgaaaaagactggttgtctctagttgcagttcatagtgatgcgtggctcctgtctgttgcattctactttggagctcgctttggatttgataaagatgcaaggagaaggctcttcaccatgattaataacctgcccactgtttatgaagttgtgaccggggttgctaagaagcaatcaaaagcccccaacggcagcagcaaaagcagcaaatctaactctaaaccatcaaaacagatcaattctaacagtaagcctgtgaagccagcccacccaaacgaagaggaggatagcggccgtgaggacgcagaggaggaccaggcgtacctgtgtgggtcctgtggggaaagctatgcgaatggggagttctggatctgctgcgatatctgcgagaagtggttccatggcaagtgtgtccgcatcacccctgcaaaggcagagcacatcaagcagtacaagtgtcccagctgcagcaccaagcggagccgggaatgacaggcgccctggggcaggactcgctcccacttgacgaagcatttagaatcattaggagcagtgaaagtgtgaaactgtgtcattagaatcacttcctctgtttagtggaccagtgcgtgtgctggctgttgtatttttctcgtcgtgtgttgtacactggtagtaatggacatggtagctagtggtgacgtgttgtgttagcaagcaggctgactgttgtcatcgtagagtcggatgaactgctggagtttggaaacacatgttcagtaattcagtgatgtttagcgtgtatgataattttcttcggcttg

SEQ ID NO: 40105 - DNA, 934 bp, Zea Mays
ctaatattgctcaatagaaagagaacttgtgcctttatggtttgccaaatgagacttgggaggttactcttccagctgaggaagtacctcctgagcttccagaaccagcactgggcataaactttgcccgtgatggaatggttgaaaaagactggttgtctctagttgcagttcatagtgatgcgtggctcctgtctgttgcattctactttggagctcgctttggatttgataaagatgcaaggagaaggctcttcaccatgattaataacctgcccactgtttatgaagttgtgaccggggttgctaagaagcaatcaaaagcccccaacggcagcagcaaaagcagcaaatctaactctaaaatcaattctaacagtaagcctgtgaagccagcccacccaaacgaagaggaggatagcggccgtgaggacgcagaggaggaccaggcgtacctgtgtgggtcctgtggggaaagctatgcgaatggggagttctggatctgctgcgatatctgcgagaagtggttccatggcaagtgtgtccgcatcacccctgcaaaggcagagcacatcaagcagtacaagtgtcccagctgcagcaccaagcggagccgggaatgacaggcgccctggggcaggactcgctcccacttgacgaagcatttagaatcattaggagcagtgaaagtgtgaaactgtgtcattagaatcacttcctctgtttagtggaccagtgcgtgtgctggctgttgtatttttctcgtcgtgtgttgtacactggtagtaatggacatggtagctagtggtgacgtgttgtgttagcaagcaggctgactgttgtcatcgtagagtcggatgaactgctggagtttggaaacacatgttcagtaattcagtgatgtttagcgtgtatgataattttcttcggcttg

SEQ ID NO: 40106 - DNA, 3160 bp, Zea Mays
ttccctgcttccatgggcgctgcgcacttgcccctgctcggctccctttcctgcgcgtgcccagccgtggtctccagctcaccggacgcgggcctctgtctgtgccgtgctccctgcgcgcttggtcctgccatctccatggcactcggccgcgcagcgtcttcctcagccatggcgagttcctcgctgccacggttgtctagtggttggcccgcgccatctctgctcctctcggcctgctactgcgtgtgcttgtgtctgagctcatctggccacgacctcgtcgaactgcgaaactccctcgccgtgcgctctggcatcggctgccaccgattccgccattgagttcatgagcactccttgctctgttcgtttcgccgtgggcgatttctccactcttcaaatccgtgctgttcgccctgcgtgcactcgctccctatccatcgggtttcggcgtgttcatgtttgtcgttgagtcgccgaacccgtcatcccctgctcgactcccaagcaaaccccctgatccgtgtcctgctcgccatcgactctcggcaccataagctcattttcccttgcgcacatctccacagaccctgcctcatcacgcgtgtgcattatcgatctcgtcgttgttccgtgcagcatcaagaaatacaaagcatggggtgaagacgaagctagcagcgtaatagccaccaagtgctcgacaaaaagctcgaacaaatcgtcgatcgtcatcctcgtctacgccaaagatccgagaagattaggcacagaagaaaataaatcagtacgcagtcggagaattctcgatgtggatgaagatgaagcgcgattcgacacagcagtcaccctattttcggtgaaatgctgagctgaaaggcgtcgtcgatttcgtgatttcaagtcggatttaattgacggtaagttgattcgttattccagtcaactaggtatataaatagattaaatagaattgttggtcacgataattgttattaatttagcatacgtatattgtgatgttcgttctagatgaatcggtaaatcaagttaattaagatactcagtttaaagagttaattagattgtttctataactattttaagtcgttggcatttaataatagcgagtcgaggttttactagacctctgaaaaaatatgttactaaaaatgatagtgtgtgtttataatttattcttgcttgataataaaattagatgtgattggacaggagaaatgcgtgtgctgtaattagtatgtatagtttattattttgtgattattacgcgtagtcgtatatcgataactagtgtttccgtatgaaattgtacaacgcctcgccgctaggtgtttaattcgctatcgcgtagcactatttaagtttgtaatattcctgtctatatgcattcatgtgcataatgcatttcattcaggtacgtgaattaaccacgtgatgcggaagacgagccaagtcgaccccaagcgcgggctactccgcatggtgatgctgatggacgaacctgcctgatcatgtgctaggacaaggatgatcgtctaacaacactaacctagtgttacccaggcaagccccggtgcgtttgtcatctgtgataggagttgtgtgctaaacaactgatgcatttccttccttgaaaaattaattacccttccttgataccatttttgaaaagaattttatgatgcttagccttgctttagcaaacaaaatgttttgttttaaaacaaaagtgatgctttgaactaggatagaaagaactctagatgcaggtagctttacttaaccagacaagtaaaaatggattcttaaggatccactcatagtaagattttctgcaaacagagtccttgattcttgataagccttaccttgagtccttttaaaaccagcatacccttgagagtcttttctttagtcgggtaagtcttgctgagtacttgcgtacttagggttttattcctattgttggtgcaggttacgagtcactttgattgtgattggtgttaagcgccggtgggcacgaccttcttataagtttaagtacttcttctatacttcttattgaggattgtcactgagctagcatatatttcaaacttataaataaattataacatttcaaagtttattctttgaaccacttttgtaaccactctgatacatataatgtaaatttgttgtaacttgtaaaatttggtaataagattttcgctgcaaattgatggtgtgtgatttgtgtttacttaatcttgcgatcctggttgtaagtggtttatccggggtccttgggacactcggatggatcctgttaagttatctggtgcacatgcatagtcgtctgaggtcttggagacaagggcaggtgcatgtgggcccaataacttggaaggttctgccacagggactattgatgtgtgcggggatggagtgttcctacatgtcgtgtgtctaggtttatgttgcaaggttaaaactcgattggaatcgtctacttctcgcagataatgagactacttgatccactgtacttcattgagtaataagtggataactaggtacttgcaaaagatgttgattgattaatgtttgataccatgtgtggatagctaggtactcatctagtttaaagtattattctaaaacttgaaaagctaaaatttgacttagattcagctagtgctttttggcaaaccaaatcactcagccaaacgacttcatagtctagaggtagaggagtagactcctcacaccgggtaagtctagctgagtattagtatactcaaccttacttgtggcacaaaaaatttcaggcatcttgcaagaaatggttgatggtgtgacttgccttccaccttgccaccgggttggacgaccgagtgggatgctgcctttgcaggagaggaccaggaggagtgaattggccaggctttgccatgttactcagttatcttcgttagctatttccgttgcatgaaaaataatggtttactacttttgaactccgatgctgtaataacacttaagtacttctttaaatttttggtattatgctttattgtatttctctatgtctcaccttcgagtgagcaagtgatatttgaaagtcgcctagagggggtgaataggcgaaacctga

SEQ ID NO: 40107 - DNA, 1168 bp, Zea Mays
gttgatttttaggatccttgctagtacttacgttcgtctcacttatcttctcattgttcccctctccacgtcatgtctaggcatcaaatttctacacgccacttctctctagaaggcgccaattcctggggaaaatcctcgcgccagctccttgatattttccaaaagcaatcttatccctggggaagaaatcacgtacatctccatctctcagccatctcatttcttctccgttcctgatgacactagagggattagtccgcacatcagtgcttggatcttgctagcagccgagctacttctccagcatcaatgtttgaaaccgtcatatctgcaatttccggtcgtcgacctcgccctgctgcttatcccgtcgccagctgtacttgtcttcctcaccggtgtgccctctcggctcgctcggcttcaatctccatcgcgcagcggcaacttcccttttctctggtgccgcgcacgctgctggtccttgcgagtccaccttgctccggccagtgacaccggtgccggctcgctaatgcttgcgcgcgtctgtccacgtcgccagcagctcggtctctacgtgtctccctcagcatctcggcatcggaactccatcatgtctgtatgtgtgtggaagaacgagatcgagggatcggagaagaaagcgaagcccatgtggtttgtgcgttcgtttggcttggaattggaactgtggatattggagaagaaattccgagaaattagtggacggtgatggtaatgttcgtgcgatactcatctgatgctcgacaaaaagcccgaatcgggagtggctgcttcgtcttcttcgtcgaatgagaatcgtcgtgctggccacgcgtcaccagctcgataaaataaatcctatgggtatctggttaaggatagaaattgtgtgcatcgctcgccagacgtgtgtggtcatgggcgtcaagcgaaaaccatcttcgtttttccgactatcgtgtcggattggtcagggtacgctagctgagaatcgtgcaaagcaaagttcatagctcaaaacaacccacaagacgatgtcgtcagtcggatcaacccgaagaagggcagactgaacaagtatcggaacaaaaggttgatcgccaagcggacgtcgtctaacaaacactaacatagtgtttattcc

SEQ ID NO: 40108 - DNA, 1848 bp, Zea Mays
ctacttcttcctcccccacgtcctcacgccgctccagggcacccacccaaaatcggccgcgtccgggccgacctcctcgaccaccccgctgccagggccagggaccccatcttctgggaggctattagggccagttcctcgtcgcgcgacgacggggaaggcggcggcgtcgccgtgcacgtcccgcccggcccgccgttccaccccaacctcaacgtggtccgcgttgctggcagcggtggcgggggaggtggcgctggcgacgagggtgcggggaaggagggctggggtggttccaatctcggcagggatttgcccacgcccaaggagatttgtaaggggctcgacaagtatgtgattgggcaggacagagccaagaaggtgctatctgttgcagtttacaaccactataaacggatataccatcaaactttacaaaaggggtctggagcagatttgggtggttttaatggggaagctgatgatgacgacaacgtggaactagagaaaagcaatgtgctgttaatgggacctactggctctggtaaaactttacttgcaaagacattagctcgttttgtgaatgtaccatttgtaattgctgatgcaacaacattgacccaggcagggtatgtaggagaagatgtagaatctatattatacaagttactcacggtggcagattttaatgtgcaagcagcacaacaagggatggtgtacatagatgaagttgataagatcacaaaaaaggctgaaagtcttaacattagcagagacgtatctggtgaaggtgttcagcaggcattgctgaaaatgctggaaggcacgatagtcaacgttcctgagaaaggagcaaggaagcatcctcgtggtgataatatacagatagataccaaagatattctttttatatgtggtggtgctttcgtggatttggaaaaaactatatcagagagacggcaggattcatctattggtttcggcgccccagttcgtgcaaacatgagggctggtggcatttcaagtgctcaagtgacatcatccttgttggaatctaatttattggacgcttccctatccttgtgagcctggccgctctaaatgaggaccagcttgttcaggttctgattgagccaaagaatgccctgggcaaacaattcaagaaattgtttagcatgaataatgttaagcttcactttacagatggtgcacttagaataattgccaaaaaggcaatgtcaaaaaatacaggtgcacggggtttaagaactatccttgagaatattctcatggattctatgtatgagatcccagatgcaaaatctggggagaagcgaatcgatgcagtggttgtagatgaagatgcagtaggatcagtggaccaacctggctgcggagctaagattctttacggtgatggtgctttggatcaatatctatcccagataaaggtgtcaggagacggagtggggagcgaaatggatggggaagctgagctttcgtcatcgagagccattggcatgtgattcctggttctgaccgcaccagtgtaacctgtaaaaatctaatcccagttatatcaatgtaagtagtagtagccttgtaaatgaaacgatatgtgcagcgtccattgttcttctgaagccctggcacacgttgccccgcccgcgctcacgcattgcatgatttgcagcaggattttaatgagtgtagtcgagcaggttcgtgtagataccagtcgcttataaatggcgcaatgccatgaattgtaatagctgccggatctatgttaaaacttgaaacaaagaaatggatcaagagggcatggagttgcaaatttgtgatctc

SEQ ID NO: 40109 - DNA, 1857 bp, Zea Mays
ctacttcttcctcccccacgtcctcacgccgctccagggcacccacccaaaatcggccgcgtccgggccgacctcctcgaccaccccgctgccagggccagggaccccatcttctgggaggctattagggccagttcctcgtcgcgcgacgacggggaaggcggcggcgtcgccgtgcacgtcccgcccggcccgccgttccaccccaacctcaacgtggtccgcgttgctggcagcggtggcgggggaggtggcgctggcgacgagggtgcggggaaggagggctggggtggttccaatctcggcagggatttgcccacgcccaaggagatttgtaaggggctcgacaagtatgtgattgggcaggacagagccaagaaggtgctatctgttgcagtttacaaccactataaacggatataccatcaaactttacaaaagggatttgggtggttttaatggggaagctgatgatgacgacaacgtggaactagagaaaagcaatgtgctgttaatgggacctactggctctggtaaaactttacttgcaaagacattagctcgttttgtgaatgtaccatttgtaattgctgatgcaacaacattgacccaggcagggtatgtaggagaagatgtagaatctatattatacaagttactcacgtcctatgttgttattaactaggtggcagattttaatgtgcaagcagcacaacaagggatggtgtacatagatgaagttgataagatcacaaaaaaggctgaaagtcttaacattagcagagacgtatctggtgaaggtgttcagcaggcattgctgaaaatgctggaaggcacgatagtcaacgttcctgagaaaggagcaaggaagcatcctcgtggtgataatatacagatagataccaaagatattctttttatatgtggtggtgctttcgtggatttggaaaaaactatatcagagagacggcaggattcatctattggtttcggcgccccagttcgtgcaaacatgagggctggtggcatttcaagtgctcaagtgacatcatccttgttggaatctgttagtagtattctactattgattagataactttctgtcctagaggtgtttcaatgtccctcctttttcaggttgagagtggtgatctaatagcttatggacttatcccagaatttattggacgcttccctatccttgtgagcctggccgctctaaatgaggaccagcttgttcaggttctgattgagccaaagaatgccctgggcaaacaattcaagaaattgtttagcatgaataatgttaagcttcactttacagatggtgcacttagaataattgccaaaaaggcaatgtcaaaaaatacaggtgcacggggtttaagaactatccttgagaatattctcatggattctatgtatgagatcccagatgcaaaatctggggagaagcgaatcgatgcagtggttgtagatgaagatgcagtaggatcagtggaccaacctggctgcggagctaagattctttacggtgatggtgctttggatcaatatctatcccagataaaggtgtcaggagacggagtggggagcgaaatggatggggaagctgagctttcgtcatcgagagccattggcatgtgattcctggttctgaccgcaccagtgtaacctgtaaaaatctaatcccagttatatcaatgattttaatgagtgtagtcgagcaggttcgtgtagataccagtcgcttataaatggcgcaatgccatgaattgtaatagctgccggatctatgttaaaacttgaaacaaagaaatggatcaagagggcatggagttgcaaatttgtgatctc

SEQ ID NO: 40110 - DNA, 1725 bp, Zea Mays
ctacttcttcctcccccacgtcctcacgccgctccagggcacccacccaaaatcggccgcgtccgggccgacctcctcgaccaccccgctgccagggccagggaccccatcttctgggaggctattagggccagttcctcgtcgcgcgacgacggggaaggcggcggcgtcgccgtgcacgtccccggtggcgggggaggtggcgctggcgacgagggtgcggggaaggagggctggggtggttccaatctcggcagggatttgcccacgcccaaggagatttgtaaggggctcgacaagtatgtgattgggcaggacagagccaagaaggtgctatctgttgcagtttacaaccactataaacggatataccatcaaactttacaaaaggggtctggagcagatttgggtggttttaatggggaagctgatgatgacgacaacgtggaactagagaaaagcaatgtgctgttaatgggacctactggctctggtaaaactttacttgcaaagacattagctcgttttgtgaatgtaccatttgtaattgctgatgcaacaacattgacccaggcagggtatgtaggagaagatgtagaatctatattatacaagttactcacggtggcagattttaatgtgcaagcagcacaacaagggatggtgtacatagatgaagttgataagatcacaaaaaaggctgaaagtcttaacattagcagagacgtatctggtgaaggtgttcagcaggcattgctgaaaatgctggaaggcacgatagtcaacgttcctgagaaaggagcaaggaagcatcctcgtggtgataatatacagatagataccaaagatattctttttatatgtggtggtgctttcgtggatttggaaaaaactatatcagagagacggcaggattcatctattggtttcggcgccccagttcgtgcaaacatgagggctggtggcatttcaagtgctcaagtgacatcatccttgttggaatctgttgagagtggtgatctaatagcttatggacttatcccagaatttattggacgcttccctatccttgtgagcctggccgctctaaatgaggaccagcttgttcaggttctgattgagccaaagaatgccctgggcaaacaattcaagaaattgtttagcatgaataatgttaagcttcactttacagatggtgcacttagaataattgccaaaaaggcaatgtcaaaaaatacaggtgcacggggtttaagaactatccttgagaatattctcatggattctatgtatgagatcccagatgcaaaatctggggagaagcgaatcgatgcagtggttgtagatgaagatgcagtaggatcagtggaccaacctggctgcggagctaagattctttacggtgatggtgctttggatcaatatctatcccagataaaggtgtcaggagacggagtggggagcgaaatggatggggaagctgagctttcgtcatcgagagccattggcatgtgattcctggttctgaccgcaccagtgtaacctgtaaaaatctaatcccagttatatcaatgattttaatgagtgtagtcgagcaggttcgtgtagataccagtcgcttataaatggcgcaatgccatgaattgtaatagctgccggatctatgttaaaacttgaaacaaagaaatggatcaagagggcatggagttgcaaatttgtgatctc

SEQ ID NO: 40111 - DNA, 1603 bp, Zea Mays
ctacttcttcctcccccacgtcctcacgccgctccagggcacccacccaaaatcggccgcgtccgggccgacctcctcgaccaccccgctgccagggccagggaccccatcttctgggagggctggggtggttccaatctcggcagggatttgcccacgcccaaggagatttgtaaggggctcgacaagtatgtgattgggcaggacagagccaagaaggtgctatctgttgcagtttacaaccactataaacggatataccatcaaactttacaaaagggatttgggtggttttaatggggaagctgatgatgacgacaacgtggaactagagaaaagcaatgtgctgttaatgggacctactggctctggtaaaactttacttgcaaagacattagctcgttttgtgaatgtaccatttgtaattgctgatgcaacaacattgacccaggcagggtatgtaggagaagatgtagaatctatattatacaagttactcacggtggcagattttaatgtgcaagcagcacaacaagggatggtgtacatagatgaagttgataagatcacaaaaaaggctgaaagtcttaacattagcagagacgtatctggtgaaggtgttcagcaggcattgctgaaaatgctggaaggcacgatagtcaacgttcctgagaaaggagcaaggaagcatcctcgtggtgataatatacagatagataccaaagatattctttttatatgtggtggtgctttcgtggatttggaaaaaactatatcagagagacggcaggattcatctattggtttcggcgccccagttcgtgcaaacatgagggctggtggcatttcaagtgctcaagtgacatcatccttgttggaatctgttgagagtggtgatctaatagcttatggacttatcccagaatttattggacgcttccctatccttgtgagcctggccgctctaaatgaggaccagcttgttcaggttctgattgagccaaagaatgccctgggcaaacaattcaagaaattgtttagcatgaataatgttaagcttcactttacagatggtgcacttagaataattgccaaaaaggcaatgtcaaaaaatacaggtgcacggggtttaagaactatccttgagaatattctcatggattctatgtatgagatcccagatgcaaaatctggggagaagcgaatcgatgcagtggttgtagatgaagatgcagtaggatcagtggaccaacctggctgcggagctaagattctttacggtgatggtgctttggatcaatatctatcccagataaaggtgtcaggagacggagtggggagcgaaatggatggggaagctgagctttcgtcatcgagagccattggcatgtgattcctggttctgaccgcaccagtgtaacctgtaaaaatctaatcccagttatatcaatgattttaatgagtgtagtcgagcaggttcgtgtagataccagtcgcttataaatggcgcaatgccatgaattgtaatagctgccggatctatgttaaaacttgaaacaaagaaatggatcaagagggcatggagttgcaaatttgtgatctc

SEQ ID NO: 40112 - DNA, 1568 bp, Zea Mays
cttcacttgattgagggaatttaacacagctgggtttgattgtttgctgtttcaacaaaatgtgctatctgttgcagtttacaaccactataaacggatataccatcaaactttacaaaaggggtctggagcagatttgggtggttttaatggggaagctgatgatgacgacaacgtggaactagagaaaagcaatgtgctgttaatgggacctactggctctggtaaaactttacttgcaaagacattagctcgttttgtgaatgtaccatttgtaattgctgatgcaacaacattgacccaggcagggtatgtaggagaagatgtagaatctatattatacaagttactcacggtggcagattttaatgtgcaagcagcacaacaagggatggtgtacatagatgaagttgataagatcacaaaaaaggctgaaagtcttaacattagcagagacgtatctggtgaaggtgttcagcaggcattgctgaaaatgctggaaggcacgatagtcaacgttcctgagaaaggagcaaggaagcatcctcgtggtgataatatacagatagataccaaagatattctttttatatgtggtggtgctttcgtggatttggaaaaaactatatcagagagacggcaggattcatctattggtttcggcgccccagttcgtgcaaacatgagggctggtggcatttcaagtgctcaagtgacatcatccttgttggaatctgttgagagtggtgatctaatagcttatggacttatcccagaatttattggacgcttccctatccttgtgagcctggccgctctaaatgaggaccagcttgttcaggttctgattgagccaaagaatgccctgggcaaacaattcaagaaattgtttagcatgaataatgttaagcttcactttacagatggtgcacttagaataattgccaaaaaggcaatgtcaaaaaatacaggtgcacggggtttaagaactatccttgagaatattctcatggattctatgtatgagatcccagatgcaaaatctggggagaagcgaatcgatgcagtggttgtagatgaagatgcagtaggatcagtggaccaacctggctgcggagctaagattctttacggtgatggtgctttggatcaatatctatcccagataaaggtgtcaggagacggagtggggagcgaaatggatggggaagctgagctttcgtcatcgagagccattggcatgtgattcctggttctgaccgcaccagtgtaacctgtaaaaatctaatcccagttatatcaatgtaagtagtagtagccttgtaaatgaaacgatatgtgcagcgtccattgttcttctgaagccctggcacacgttgccccgcccgcgctcacgcattgcatgatttgcagcaggattttaatgagtgtagtcgagcaggttcgtgtagataccagtcgcttataaatggcgcaatgccatgaattgtaatagctgccggatctatgttaaaacttgaaacaaagaaatggatcaagagggcatggagttgcaaatttgtgatctc

SEQ ID NO: 40113 - DNA, 1114 bp, Zea Mays
gctagagcagttgcacacccaaaacgcagccgtggacagctctaccactggccatccaatccatgttgatccgactgatcttgcacgagcactgaaggcgtgagctccgagcagaaggagtgtaaattcaagacgaagtggttgtggaagaggagtttgctcgagtgcctattcagcaagtggatggagctatctaactggttattgggtagaaaggtcttgagcctcttcactgcaacaaaggcaagccccggtgcatttaccccttccttgtatttttaaaaagacttttatatacttaagtctagtgaaatgtgcattaagtttataggaattacttggaaactatttgatgcattgcctaccttgatatccatacctttatagatacttctgatgaagtatcaaaatatgatttacaaaaatgcttagccctgcttagatcttgtggatagaggctgtcttttgcaataatgcctagctcaggggttatcctgaggaaggatggcttctacctgcaagaatattttcattgggagcatggtgggatcttactgcaaagttccctataatgctcttttcatcctaaggaacacaaacaatcctaaggatggaagtacttaaatcgggacttgtgctaggaacaggtgatgttctacccaggttgattaaggattggatgcgtatgtaggcctgttgatcaaggactatcttaactagccacatgccctggatatgggacagggtaagcttgaacccggctattccatacatgaaaagacaatcgcgcactgggagtggagagatggcgagagtggcacgtaccctcctggcaaaggaccgcctaaaaaggatggtgtgctctcaggtggcgcggacctgttcatgcagtggaggatccgtgggaatggttgacatgtgcaagggttaagtgctacatatatcgtgtggttagagatcctcagctgagtaaatcgattcagatcgccgttatatccccggagagtggagacttgatcgctgccctgcaacctaagtcaggatgtgaacattatgaataaaaatgatgttgcattgatgagtggtgaaattagactagatgcaaccagagtct

SEQ ID NO: 40114 - DNA, 1212 bp, Zea Mays
aatagatcagaccggacaacagagagaggggcctccttcaactccgggctaggtccaccgccggagaaaacgggactgtgtctgtgtcggctggctgaccagaacacttgagcagactagcaaggccttcagaccgggagggctccctgtcctgtcccccgcgccgccgcggatggccggagccaccacgccggcatcaggcgccctcgtcaggctctgcctgccttcgctcctcctctttctgtaccgatgtgaggctgttgagatggagagaacccttgcgatgatcaagcccgatggtttgtcaggtaagtacacagaagcaatcaaggaggtcatcttggattctggatttcatatcgtcaaagaaaccgaggtccagcttgatgctgagagggcatctgtcttctatgcggagcattcccagagaagcttctttgacagcctagtcaagtacataacaagtggtccagttcttgctatggttctggaaagacctgacgccgttgcgcaatggcgcactttgattggaccaactgatgcaaaaaaggccaaaacctctcatccaaacagcattagagcaatgtgtgggctggactctgagaaaaattgcgtgcatggttcggattcaccagaatctgcagacagagagatctcatttttcttcggagaagctgaatccgtaactgtggaacatgatgagctatagacgccacactggtatcagtggcaatattggccggctcattggacaacgtgggagagtatcgactctgctgcttctagtgttcgtcatgcttcttttatgaactaaacccgaagacgctgcaatttgaggaggggatgtcagttgtcacagaggagagagtcatttttagggctagtttggaaatctcatttttttcaagagatttttattttcctaaaggaaattagtttatttttctttgagaaaatagaattcccttgggaaattagagtttctaaacgagcccttaatttcgtaaaattatgtccggagtccatatttcctatcggagcaccatggtccttgaacttgcaaaactatatggtgcaaaccaaatattgttttttcatccgtgttgacgtcttgtgtggcatactttgacagctgcgtgaacttgttgaggtattcacttacaattatattttcttgcttcaattttgtgaactcctttctcttcaaacgaa

SEQ ID NO: 40115 - DNA, 1227 bp, Zea Mays
cggacaacagagagaggggcctccttcaactccgggctaggtccaccgccggagaaaacgggactgtgtctgtgtcggctggctgaccagaacacttgagcagactagcaaggccttcagaccgggagggctccctgtcctgtcccccgcgccgccgcggatggccggagccaccacgccggcatcaggcgccctcgtcaggctctgcctgccttcgctcctcctctttctgtaccggtgctgcagatgtgaggctgttgagatggagagaacccttgcgatgatcaagcccgatggtttgtcaggtaagtacacagaagcaatcaaggaggtcatcttggattctggatttcatatcgtcaaagaaaccgaggtccagcttgatgctgagagggcatctgtcttctatgcggagcattcccagagaagcttctttgacagcctagtcaagtacataacaagtggtccagttcttgctatggttctggaaagacctgacgccgttgcgcaatggcgcactttgattggaccaactgatgcaaaaaaggccaaaacctctcatccaaacagtactctttgtcatttcagcattagagcaatgtgtgggctggactctgagaaaaattgcgtgcatggttcggattcaccagaatctgcagacagagagatctcatttttcttcggagaagctgaatccgtaactgtggaacatgatgagctatagacgccacactggtatcagtggcaatattggccggctcattggacaacgtgggagagtatcgactctgctgcttctagtgttcgtcatgcttcttttatgaactaaacccgaagacgctgcaatttgaggaggggatgtcagttgtcacagaggagagagtcatttttagggctagtttggaaatctcatttttttcaagagatttttattttcctaaaggaaattagtttatttttctttgagaaaatagaattcccttgggaaattagagtttctaaacgagcccttaatttcgtaaaattatgtccggagtccatatttcctatcggagcaccatggtccttgaacttgcaaaactatatggtgcaaaccaaatattgttttttcatccgtgttgacgtcttgtgtggcatactttgacagctgcgtgaacttgttgaggtattcacttacaattatattttcttgcttcaattttgtgaactcctttctcttcaaacgaa

SEQ ID NO: 40116 - DNA, 797 bp, Zea Mays
ggacaacagagagaggggcctccttcaactccgggctaggtccaccgccggagaaaacgggactgtgtctgtgtcggctggctgaccagaacacttgagcagactagcaaggccttcagaccgggagggctccctgtcctgtcccccgcgccgccgcggatggccggagccaccacgccggcatcaggcgccctcgtcaggctctgcctgccttcgctcctcctctttctgtaccggtgctgcagatgtgaggctgttgagatggagagaacccttgcgatgatcaagcccgatggtttgtcaggtaagtacacagaagcaatcaaggaggtcatcttggattctggatttcatatcgtcaaagaaaccgaggtccagcttgatgctgagagggcatctgtcttctatgcggagcattcccagagaagcttctttgacagcctagtcaagtacataacaagtggtccagttcttgctatggttctggaaagacctgacgccgttgcgcaatggcgcactttgattggaccaactgatgcaaaaaaggccaaaacctctcatccaaacagcattagagcaatgtgtgggctggactctgagaaaaattgcgtgcatggttcggattcaccagaatctgcagacagagagatctcatttttcttcggagaagctgaatccgtaactgtggaacatgatgagctatagacgccacactggtatcaggtgatggtggccacctcatcatgagcattgcattatgcttcccaccaatcagttgcagtgtcagtgccacaaac

SEQ ID NO: 40117 - DNA, 686 bp, Zea Mays
cgggactgtgtctgtgtcggctggctgaccagaacacttgagcagactagcaaggccttcagaccgggagggctccctgtcctgtcccccgcgccgccgcggatggccggagccaccacgccggcatcaggcgccctcgtcaggctctgcctgccttcgctcctcctctttctgtaccggtgctgcagatgtgaggctgttgagatggagagaacccttgcgatgatcaagcccgatggtttgtcaggtaagtacacagaagcaatcaaggaggtcatcttggattctggatttcatatcgtcaaagaaaccgaggtccagcttgatgctgagagggcatctgtcttctatgcggagcattcccagagaagcttctttgacagcctagtcaagtacataacaagtggtccagttcttgctatggttctggaaagacctgacgccgttgcgcaatggcgcactttgattggaccaactgatgcaaaaaaggccaaaacctctcatccaaacagcattagagcaatgtgtgggctggactctgagaaaaattgcgtgcatggttcggattcaccagaatctgcagacagagagatctcatttttcttcggagaagctgaatccgtaactgtggaacatgatgagctatagacgccacactggtatcagtttcgtttgctttggtgagt

SEQ ID NO: 40118 - DNA, 1154 bp, Zea Mays
tgtgtctgtgtcggctggctgaccagaacacttgagcagactagcaaggccttcagaccgggagggctccctgtcctgtcccccgcgccgccgcggatggccggagccaccacgccggcatcaggcgccctcgtcaggctctgcctgccttcgctcctcctctttctgtaccgatgtgaggctgttgagatggagagaacccttgcgatgatcaagcccgatggtttgtcaggtaagtacacagaagcaatcaaggaggtcatcttggattctggatttcatatcgtcaaagaaaccgaggtccagcttgatgctgagagggcatctgtcttctatgcggagcattcccagagaagcttctttgacagcctagtcaagtacataacaagtggtccagttcttgctatggttctggaaagacctgacgccgttgcgcaatggcgcactttgattggaccaactgatgcaaaaaaggccaaaacctctcatccaaacagtactctttgtcatttcagcattagagcaatgtgtgggctggactctgagaaaaattgcgtgcatggttcggattcaccagaatctgcagacagagagatctcatttttcttcggagaagctgaatccgtaactgtggaacatgatgagctatagacgccacactggtatcagtggcaatattggccggctcattggacaacgtgggagagtatcgactctgctgcttctagtgttcgtcatgcttcttttatgaactaaacccgaagacgctgcaatttgaggaggggatgtcagttgtcacagaggagagagtcatttttagggctagtttggaaatctcatttttttcaagagatttttattttcctaaaggaaattagtttatttttctttgagaaaatagaattcccttgggaaattagagtttctaaacgagcccttaatttcgtaaaattatgtccggagtccatatttcctatcggagcaccatggtccttgaacttgcaaaactatatggtgcaaaccaaatattgttttttcatccgtgttgacgtcttgtgtggcatactttgacagctgcgtgaacttgttgaggtattcacttacaattatattttcttgcttcaattttgtgaactcctttctcttcaaacgaa

SEQ ID NO: 40119 - DNA, 1218 bp, Zea Mays
gtaagaggtgcctgttttgtttctaccaccactcctgcgcagctgctctgctgaactttgggttcctggctattgctcccactgcattccatccagcgtccagaaacatgctagactagtactaggatgcttgcttcggaacatctgagcaaggtttcggccgcccgtttggtcatatcaacaacaagcatgcctacttgctcgtggacctaactatgcacacagtgattcttcaatcgagtcgacgtgctgcagatgtgaggctgttgagatggagagaacccttgcgatgatcaagcccgatggtttgtcaggtaagtacacagaagcaatcaaggaggtcatcttggattctggatttcatatcgtcaaagaaaccgaggtccagcttgatgctgagagggcatctgtcttctatgcggagcattcccagagaagcttctttgacagcctagtcaagtacataacaagtggtccagttcttgctatggttctggaaagacctgacgccgttgcgcaatggcgcactttgattggaccaactgatgcaaaaaaggccaaaacctctcatccaaacagcattagagcaatgtgtgggctggactctgagaaaaattgcgtgcatggttcggattcaccagaatctgcagacagagagatctcatttttcttcggagaagctgaatccgtaactgtggaacatgatgagctatagacgccacactggtatcagtggcaatattggccggctcattggacaacgtgggagagtatcgactctgctgcttctagtgttcgtcatgcttcttttatgaactaaacccgaagacgctgcaatttgaggaggggatgtcagttgtcacagaggagagagtcatttttagggctagtttggaaatctcatttttttcaagagatttttattttcctaaaggaaattagtttatttttctttgagaaaatagaattcccttgggaaattagagtttctaaacgagcccttaatttcgtaaaattatgtccggagtccatatttcctatcggagcaccatggtccttgaacttgcaaaactatatggtgcaaaccaaatattgttttttcatccgtgttgacgtcttgtgtggcatactttgacagctgcgtgaacttgttgaggtattcacttacaattatattttcttgcttcaattttgtgaactcctttctcttcaaacgaa

SEQ ID NO: 40120 - DNA, 546 bp, Zea Mays
gttgaatccaatcgctgtggtcaggatttggtgggcccgagtcgatccccttgcgcctataaatactcgagccacgaccccctctccatatccgtctgcatcgacgctgtcgaccacaatcgttgccgcaaagcgccgctgcgacttcacctcaacattgtgggagctcggagtcgaccaactgtgcaggaaggttcactggaaggtgaagatcgcgggcgtgagggatttggacctcgggaggtctcggtggctcagtgattgctcgccagaaatattctccaccacggattcgccccccatcgcggtcagagaccatcgtttcgttacctccggtcaaggacaggtaccacaggatgaggcgcatggaggatgctatgatgagttcgtgagaggtctaggccgtcgtctcccagtcaactttggttgatggatcgttgtcttcgtatgatgtaattatttaatgattttgtacagaactccattatatattaatgttgtgacattcgtttctgtaccatgaatcatcatatgtgtaagacttga

SEQ ID NO: 40121 - DNA, 1487 bp, Zea Mays
ggcaaatcctggtttggtaacgaaaaaggaatatgtgatattattctgttgaattgtgttggtaaggtggtgaatattaaagtcattcgcaatagacactcgggagtttctgagggttatggttttatagagttttatactcacgtttcagcagagaaggcactgcagaatttttctggtcacgtaatgcctaatactgaccgggcttttaagttaaactgggcatcatatagtatgggagaaaaacgctcggaaatttcgtctgatcactcgatatttgttggcgatttggctgttgatgttactgatgcgatgttgctggaacttttttctaacaaataccgatcggtgaaaggagctaaagttattattgatgcaaacacaggccgttctagaggctacggctttgttaggtttggagatgataatgacaaaattcatgcaatgactgaaatgaatggtgtttactgttccacaagaccaattcgtgtaggaccagcgactcctagaagatctcaagttgcttattttaggtgattctggcacttctccaccaaggcaatctcatgttgactctactaacaggacggtatatgttggtgggcttgaccccaatgttagcgaagatgaactgaggaaagcatttgcaaaatatggtgatcttgcctctgtcaaaattccttttgggaaacaatgtgggtttgttcaatttgtaaacagagttgatgctgaagaagcactgcatgggttgaatggatcaactattgggaagcaggcagttcgactttcctggggccgcagccctgcaagtaaacagtctaggggtgattctggccaccggcgcaatggcaactgcaacggcatgtactacgggacaccattctacggtggatatggctacgcctccccgattccgcacccaaacatgtacgccgcggcctacgaagcctacccgtactatgggaaccagcagctagtgagctgatgtagtgatgtggcgagatgctctctgctcagttttcctcccttggaggaaacgagtttttggtcccagtaaaagcatagtagctatgatgagatatatgataggtggccataaaaatgggcgcgagagacgagacaggcatatgatggtaacgctacctgcagatttgtgctgctagtagaacctaaaagagcttgtagtagacaaataaaaccttttcttttgtcttggaaattttgactcgctaataaaaagtgaagctatctgttgttgtggctgtctgtttggttggtgtgctgtgttttgggtcggtggtccttgcatgttcggtttctcacttcgcatcagttgctgttgctagcttggagttgcatgatgtcacaccgcctgtattattttttgcatgctatgttgatacacgtatccatgttgctatcctgcagccaaccgcggctatcctgtcaatacgaacttcggggatttaggttttttggttctggga

SEQ ID NO: 40122 - DNA, 1474 bp, Zea Mays
ggcaaatcctggtttggtaacgaaaaaggaatatgtgatattattctgttgaattgtgttggtaaggtggtgaatattaaagtcattcgcaatagacactcgggagtttctgagggttatggttttatagagttttatactcacgtttcagcagagaaggcactgcagaatttttctggtcacgtaatgcctaatactgaccgggcttttaagttaaactgggcatcatatagtatgggagaaaaacgctcggaaatttcgtctgatcactcgatatttgttggcgatttggctgttgatgttactgatgcgatgttgctggaacttttttctaacaaataccgatcggtgaaaggagctaaagttattattgatgcaaacacaggccgttctagaggctacggctttgttaggtttggagatgataatgacaaaattcatgcaatgactgaaatgaatggtgtttactgttccacaagaccaattcgtgtaggaccagcgactcctagaagatctcaaggtgattctggcacttctccaccaaggcaatctcatgttgactctactaacaggacggtatatgttggtgggcttgaccccaatgttagcgaagatgaactgaggaaagcatttgcaaaatatggtgatcttgcctctgtcaaaattccttttgggaaacaatgtgggtttgttcaatttgtaaacagagttgatgctgaagaagcactgcatgggttgaatggatcaactattgggaagcaggcagttcgactttcctggggccgcagccctgcaagtaaacagtctaggggtgattctggccaccggcgcaatggcaactgcaacggcatgtactacgggacaccattctacggtggatatggctacgcctccccgattccgcacccaaacatgtacgccgcggcctacgaagcctacccgtactatgggaaccagcagctagtgagctgatgtagtgatgtggcgagatgctctctgctcagttttcctcccttggaggaaacgagtttttggtcccagtaaaagcatagtagctatgatgagatatatgataggtggccataaaaatgggcgcgagagacgagacaggcatatgatggtaacgctacctgcagatttgtgctgctagtagaacctaaaagagcttgtagtagacaaataaaaccttttcttttgtcttggaaattttgactcgctaataaaaagtgaagctatctgttgttgtggctgtctgtttggttggtgtgctgtgttttgggtcggtggtccttgcatgttcggtttctcacttcgcatcagttgctgttgctagcttggagttgcatgatgtcacaccgcctgtattattttttgcatgctatgttgatacacgtatccatgttgctatcctgcagccaaccgcggctatcctgtcaatacgaacttcggggatttaggttttttggttctggga

SEQ ID NO: 40123 - DNA, 1371 bp, Zea Mays
gttgaattgtgttggtaaggtggtgaatattaaagtcattcgcaatagacactcgggagtttctgagggttatggttttatagagttttatactcacgtttcagcagagaaggcactgcagaatttttctggtcacgtaatgcctaatactgaccgggcttttaagttaaactgggcatcatatagtatgggagaaaaacgctcggaaatttcgtctgatcactcgatatttgttggcgatttggctgttgatgttactgatgcgatgttgctggaacttttttctaacaaataccgatcggtgaaaggagctaaagttattattgatgcaaacacaggccgttctagaggctacggctttgttaggtttggagatgataatgacaaaattcatgcaatgactgaaatgaatggtgtttactgttccacaagaccaattcgtgtaggaccagcgactcctagaagatctcaaggtatatgttggtgggcttgaccccaatgttagcgaagatgaactgaggaaagcatttgcaaaatatggtgatcttgcctctgtcaaaattccttttgggaaacaatgtgggtttgttcaatttgtaaacagagttgatgctgaagaagcactgcatgggttgaatggatcaactattgggaagcaggcagttcgactttcctggggccgcagccctgcaagtaaacagtctaggggtgattctggccaccggcgcaatggcaactgcaacggcatgtactacgggacaccattctacggtggatatggctacgcctccccgattccgcacccaaacatgtacgccgcggcctacgaagcctacccgtactatgggaaccagcagctagtgagctgatgtagtgatgtggcgagatgctctctgctcagttttcctcccttggaggaaacgagtttttggtcccagtaaaagcatagtagctatgatgagatatatgataggtggccataaaaatgggcgcgagagacgagacaggcatatgatggtaacgctacctgcagatttgtgctgctagtagaacctaaaagagcttgtagtagacaaataaaaccttttcttttgtcttggaaattttgactcgctaataaaaagtgaagctatctgttgttgtggctgtctgtttggttggtgtgctgtgttttgggtcggtggtccttgcatgttcggtttctcacttcgcatcagttgctgttgctagcttggagttgcatgatgtcacaccgcctgtattattttttgcatgctatgttgatacacgtatccatgttgctatcctgcagccaaccgcggctatcctgtcaatacgaacttcggggatttaggttttttggttctggga

SEQ ID NO: 40124 - DNA, 1435 bp, Zea Mays
ggtttacccttttctttgctgcatcaagtggtgaatattaaagtcattcgcaatagacactcgggagtttctgagggttatggttttatagagttttatactcacgtttcagcagagaaggcactgcagaatttttctggtcacgtaatgcctaatactgaccgggcttttaagttaaactgggcatcatatagtatgggagaaaaacgctcggaaatttcgtctgatcactcgatatttgttggcgatttggctgttgatgttactgatgcgatgttgctggaacttttttctaacaaataccgatcggtgaaaggagctaaagttattattgatgcaaacacaggccgttctagaggctacggctttgttaggtttggagatgataatgacaaaattcatgcaatgactgaaatgaatggtgtttactgttccacaagaccaattcgtgtaggaccagcgactcctagaagatctcaaggtgattctggcacttctccaccaaggcaatctcatgttgactctactaacaggacggtatatgttggtgggcttgaccccaatgttagcgaagatgaactgaggaaagcatttgcaaaatatggtgatcttgcctctgtcaaaattccttttgggaaacaatgtgggtttgttcaatttgtaaacagagttgatgctgaagaagcactgcatgggttgaatggatcaactattgggaagcaggcagttcgactttcctggggccgcagccctgcaagtaaacagtctaggggtgattctggccaccggcgcaatggcaactgcaacggcatgtactacgggacaccattctacggtggatatggctacgcctccccgattccgcacccaaacatgtacgccgcggcctacgaagcctacccgtactatgggaaccagcagctagtgagctgatgtagtgatgtggcgagatgctctctgctcagttttcctcccttggaggaaacgagtttttggtcccagtaaaagcatagtagctatgatgagatatatgataggtggccataaaaatgggcgcgagagacgagacaggcatatgatggtaacgctacctgcagatttgtgctgctagtagaacctaaaagagcttgtagtagacaaataaaaccttttcttttgtcttggaaattttgactcgctaataaaaagtgaagctatctgttgttgtggctgtctgtttggttggtgtgctgtgttttgggtcggtggtccttgcatgttcggtttctcacttcgcatcagttgctgttgctagcttggagttgcatgatgtcacaccgcctgtattattttttgcatgctatgttgatacacgtatccatgttgctatcctgcagccaaccgcggctatcctgtcaatacgaacttcggggatttaggttttttggttctggga

SEQ ID NO: 40125 - DNA, 3647 bp, Zea Mays
ggcaagagcaaatccgaaccaaccaatcccaatatccgcaggcctccctctgcactggaccacaccacaccctcgcctttcccgcaacccagagcccctctgccaatctctgcacaacatcatcgattccccaggcgaaaaaaaatactctggaccctttttttcaatcagattttcaatcagaggagggtagattggatttgtcagattatccgatctccactgcagcctctctgaagagaagaggcccatccagtccagcctttccgcagttcctggagcaatcctggctcagtgcgtgaagcagcttgattcgcctgcgcaactgatagtcatagaagggagccaagagcttgttcttggctgcttgaccgattcttgattgagctgctgcggatcttgccaaagggccaagagcttgctgtgtctggaattcttggtcagccgtgccggatagggtgagggtgccatgacagcatcgcagtcctcgatgagcggcggcggggagccgggggtgcggacggtggtctggttcaggcgagacctgcgtgtggaggacaacccggcgctggcggcggccgctcggacggccggggaggtcgtgccggcgtacgtgtggtcgccagaggaggacgggccctactaccccggcagggtgtcccggtggtggctcagccaaagcctgaagcacctcgacgcctcgctccgccggctcggcgcctgccgcctcgtcacccgccgctccagcgacgctgtcgtcgcgctgatcgacctagtccgcagcaccggcgccacccacctctttttcaaccgactctacgacccgctatcgctggtccgggaccaccgcgtgaaggagcagctgtcggcggagggcatcactgtgcagtccttcaacgccgatctgctgtacgagccgtgggaggtcctcgacgacgacggcttccccttcaccatgttcgcgccattctggaacaggtgcctgtgcatgccggaccctgccgcaccactgctgccgcccaagaggatcaattcaggtatccaaatgcatttgcctacagagttctaatggccacactggatgacgtgaaaaatgctgagctccacaggtgacctgtcgaggtgtccgtgggacgagctcatctttgaagacgagtccgagaagggcagcaatgcgctgctcgcacgagcgtggtcaccagggtggcagaacgctgacaaggcgctaacggccttcctcgacggtccgctggtcgactactccgcgaaccacaagaaggccgacagcgccagcacgtccctgctgtctccgtacctgcacttcggcgagctcagcgtccgcaaggtcttccaccaggtgcggatgaagcagctgatgtggagcaacgacggcgaccgcgccggcgaggagagctgcacgctattcctccgcgccatcggcctgcgggagtactcgaggtacctcaccttcaaccacccctgcagccttgagaagccccttctgtcgcacctcaggttcttcccctgggtcgtcgatgaggtgcacttcaaggtctggagacaagggaggactggctaccctcttgtcgacgctggcatgagggagctctgggccaccggctgggttcacgaccggatacgtgtcgttgtctctagcttcttcgtcaaggtgctccagctgccatggcgctggggcatgaagtacttctgggacaccttgctggatgctgaccttgagagtgacgcactaggctggcagtacatttctgggtctctccctgatggccgtgagcttgaccgcattgacaaccctcagtttgaagggtacaagtttgatccgcacggggagtacgtacggcgatggctaccggagctggcgaggctgccgacggaatggatacaccacccctgggatgcacctgagtctgtgcttcaggctgcaggagtcgagctaggctccaactacccacgccccattgtggagttagatgcagccaattccaggttgcagggtgccctgtcagagatgtgggagcttgaggcagcctcttgtgctgccatcgagaacgggatggaagaaggcctcggcgattccacagatgagccgccgatcgacttccctcaagaattacggatggaagtggaccgacaaccagctcaacctgctatcatccacacgccggtagtggctggttggagacgagaagaccagagggtgcctagcatgacttcctcgttaattagagctgagaccgaactcactgcagactttggcaacaccagtgaggacagtaggccagaagtgccgtcaaacattcatctgcaggctcgggcggagagggaagaaacagttgacggtgccactggcaatactgtcagggtgaatggcaaccaacagcagcagaatcttcagaacaacatgcaccgcgtgctaggtatcgctccatcaatttcagaggcatcgagcagctggacgggtagggaaggtggattggtaccggtctggtcacctccggcagcttcagtacattctgatccatatactgccgacgaggctgacatttcgagtaggagttatttggacaggcatcagcaatcaaatacgatgatgaactggagtcaactctctcagtcattgtgagttcagttgcacggtaacctattttcaaagaaaaaatgctttgtcataaactgaaaatttggagcttatagcaaaaggtagacagtagttgtctaaagccattgttaatgtggcaccaaaaattagctgacaacttgaatttgatgtgtagtagctgagtagaacattccaaatgcccactaatgatcccttttttcacaaatctctcaatgcaggacaacaggatgggaagtggataattagtgctgtgtgaccggatttaattgattaggagttcggcagagagaattatattatacatatgtaaattatcacattttgttcgtctatatagccttggtgtgcatgcaagtcatcgaacatgcagcttcttggatgcaataattgttgtgaacctagttgtgtagaaccttgtggtttaggttgctaggtgcccacaagatatgtattattcgtcagataagagttttctagcatcaggttcattttgtatctggttattgtcatattgcagttcttggtgatgggatagtcaacacaggtgtattctcagttttatagacagcacttaccttttatctgtgacaacgaggactcaaagggaacatcttggcagtgagattgtgtgccactcttaccttctgctcctttgcctcaataaagaagttacctgaaactttttcacaatgcaccatggtgaattaatcaggagatatgaaagacaatggacgtttaggatggcaaacaatgagatttactagaggtaacataaatgatttacaaggattccccatcttatgatacgtagaaaaactaccagacatataaccgaagacaacatagataattaagcaatcgcatggcgactctctacaccataagctgggctgggacagcgagcactgcacatgttgctttgccctggcctagtgggaaccacagcaatcacaattgagaagcaaaaccatctgaattagacgagtcattgcaggataaaatatgacaa

SEQ ID NO: 40126 - DNA, 3364 bp, Zea Mays
aaatccgaaccaaccaatcccaatatccgcaggcctccctctgcactggaccacaccacaccctcgcctttcccgcaacccagagcccctctgccaatctctgcacaacatcatcgattccccaggcgaaaaaaaatactctggaccctttttttcaatcagattttcaatcagaggagggtagattggatttgtcagattatccgatctccactgcagcctctctgaagagaagaggcccatccagtccagcctttccgcagttcctggagcaatcctggctcagtgcgtgaagcagcttgattcgcctgcgcaactgatagtcatagaagggagccaagagcttgttcttggctgcttgaccgattcttgattgagctgctgcggatcttgccaaagggccaagagcttgctgtgtctggaattcttggtcagccgtgccggatagggtgagggtgccatgacagcatcgcagtcctcgatgagcggcggcggggagccgggggtgcggacggtggtctggttcaggcgagacctgcgtgtggaggacaacccggcgctggcggcggccgctcggacggccggggaggtcgtgccggcgtacgtgtggtcgccagaggaggacgggccctactaccccggcagggtgtcccggtggtggctcagccaaagcctgaagcacctcgacgcctcgctccgccggctcggcgcctgccgcctcgtcacccgccgctccagcgacgctgtcgtcgcgctgatcgacctagtccgcagcaccggcgccacccacctctttttcaaccgactctacgacccgctatcgctggtccgggaccaccgcgtgaaggagcagctgtcggcggagggcatcactgtgcagtccttcaacgccgatctgctgtacgagccgtgggaggtcctcgacgacgacggcttccccttcaccatgttcgcgccattctggaacaggtgcctgtgcatgccggaccctgccgcaccactgctgccgcccaagaggatcaattcaggtgacctgtcgaggtgtccgtgggacgagctcatctttgaagacgagtccgagaagggcagcaatgcgctgctcgcacgagcgtggtcaccagggtggcagaacgctgacaaggcgctaacggccttcctcgacggtccgctggtcgactactccgcgaaccacaagaaggccgacagcgccagcacgtccctgctgtctccgtacctgcacttcggcgagctcagcgtccgcaaggtcttccaccaggtgcggatgaagcagctgatgtggagcaacgacggcgaccgcgccggcgaggagagctgcacgctattcctccgcgccatcggcctgcgggagtactcgaggtacctcaccttcaaccacccctgcagccttgagaagccccttctgtcgcacctcaggttcttcccctgggtcgtcgatgaggtgcacttcaaggtctggagacaagggaggactggctaccctcttgtcgacgctggcatgagggagctctgggccaccggctgggttcacgaccggatacgtgtcgttgtctctagcttcttcgtcaaggtgctccagctgccatggcgctggggcatgaagtacttctgggacaccttgctggatgctgaccttgagagtgacgcactaggctggcagtacatttctgggtctctccctgatggccgtgagcttgaccgcattgacaaccctcagtttgaagggtacaagtttgatccgcacggggagtacgtacggcgatggctaccggagctggcgaggctgccgacggaatggatacaccacccctgggatgcacctgagtctgtgcttcaggctgcaggagtcgagctaggctccaactacccacgccccattgtggagttagatgcagccaattccaggttgcagggtgccctgtcagagatgtgggagcttgaggcagcctcttgtgctgccatcgagaacgggatggaagaaggcctcggcgattccacagatgagccgccgatcgacttccctcaagaattacggatggaagtggaccgacaaccagctcaacctgctatcatccacacgccggtagtggctggttggagacgagaagaccagagggtgcctagcatgacttcctcgttaattagagctgagaccgaactcactgcagactttggcaacaccagtgaggacagtaggccagaagtgccgtcaaacattcatctgcaggctcgggcggagagggaagaaacagttgacggtgccactggcaatactgtcagggtgaatggcaaccaacagcagcagaatcttcagaacaacatgcaccgcgtgctaggtatcgctccatcaatttcagaggcatcgagcagctggacgggtagggaaggtggattggtaccggtctggtcacctccggcagcttcagtacattctgatccatatactgccgacgaggctgacatttcgagtaggagttatttggacaggcatcagcaatcaaatacgatgatgaactggagtcaactctctcagtcattgtgagttcagttgcacggacaacaggatgggaagtggataattagtgctgtgtgaccggatttaattgattaggagttcggcagagagaattatattatacatatgtaaattatcacattttgttcgtctatatagccttggtgtgcatgcaagtcatcgaacatgcagcttcttggatgcaataattgttgtgaacctagttgtgtagaaccttgtggtttaggttgctaggtgcccacaagatatgtattattcgtcagataagagttttctagcatcaggttcattttgtatctggttattgtcatattgcagttcttggtgatgggatagtcaacacaggtgtattctcagttttatagacagcacttaccttttatctgtgacaacgaggactcaaagggaacatcttggcagtgagattgtgtgccactcttaccttctgctcctttgcctcaataaagaagttacctgaaactttttcacaatgcaccatggtgaattaatcaggagatatgaaagacaatggacgtttaggatggcaaacaatgagatttactagaggtaacataaatgatttacaaggattccccatcttatgatacgtagaaaaactaccagacatataaccgaagacaacatagataattaagcaatcgcatggcgactctctacaccataagctgggctgggacagcgagcactgcacatgttgctttgccctggcctagtgggaaccacagcaatcacaattgagaagcaaaaccatctgaattagacgagtcattgcaggataaaatatgacaa

SEQ ID NO: 40127 - DNA, 2167 bp, Zea Mays
cgtggttccactctgtacgcaacgcaaggcgccgttcgcacttcgcacgcaaacccctcctctcctctgctgacccctcctctcctggtctggattccaccaagccgtgtccaccaaccggccaccacccccgctgccggctcgcacctctctgcgccgtgctcagatttgcccccctctgcctgcctgcttctactacctgctgacacggcggtgcgggtcgtgctcggtggacgccagggggctacccctacccgggatccaggatcgtgctgtctgctcgccctctcctgctccttcaatcccatcggagatccgtgctggcgtttcctccctttcagcgcccaattgtttggtttgaagaaatcaagttcagatgggctccattctaagtgctactagtactacggctaagtctatggatcagcatgaggcatctggaacagatcctaataagagggtgaagatatctacttatgagtatgggtcaaacccaaggataattccaactcttcctgatgagctctcactccagatcctggcaaggtcaccacggatccattaccttaacttgaagctggtttgccgagcctggaaggcagcaatcatcggctatgaactttcccagctgaggagagagcttggtgtaagtgaggaatgggtgtatgtactgaccaaggctgaggcatacaagctccattggtatgccctggatccagtgtttcagaaatggcagaggttgccaccgatgccttctttcgtcaatcaggaggaatccaatcggacagcatcttcggcgttctggatgtggaatgttgtgggatcaagcattaggattgctgattacgtgaggggcttattttggcgcaggaacagtttggaccagatgcccttttgcggttgttcagtgggtgttgctgatggttacttgtatgtcattggcggtttttccaaagctgttgccctgaatcgcgtttgtagatacgacccttttctcaatttgtggcaggaagtgagcccaatgatgactgggcgggctttctgcaaggcggcatttttgaatggcaagttatatgtagttggtggagtcagcaggggtcggaatggcttgcttcccctgcgttcagctgaggcgttcgaccctaaaactggattgtggagcgacctaccagaaatgcctttcgcaagagcgcaggtactccccactgctttcttggtcgatgtgctgaagcctatcgccacaggaatggcaccctacaagggaaagctgtatgtccctcagagcctgtactcatggccattcttttttgacattggaggtgagatctacgacccagatctgaatgcctggtcaacgatgccggatggtctcggcgatggatggccagccagacaggcaggcacaaagttgggtgttgtgatcgatgacagactttacacgctagagccttccagctctttggacagtggtaagataaaaagatacgactccgaggaggacgcatgggtaactatcaccccacaagttccagttaatgatttcactggtgcagaggccccttatttactcgctggcctcggtggaaggctccatgttataacaaaggcggcgaacaacactcttcaagttatgcaggctgtggtgcagaataactcggtatctgaagaaaatgtggtatggacaacagtggcttctaggaactttgggacggctgagcttgtcagctgccaggttctagatgtttaaaatgtgggtcgcaagttacgctttgtagaggatatagtatgccatagaccaacgatttagccaagaaaaatattacatagtttttgctttgtgtgtgtgtggaacaagagttcaatttgacgtggagggagatcaattacagatattcagatatgtataactgtataagctaactcatttgctgggacactgtgtatagacatacgatcgacgtgttaatgtacagtgctcaattctagtttcctttttttttaaaacatgtttctgatccttaacttttcggagatcatttattacattggaaggctgctgttctcctgtcttttgttgatgccgacccgtaatgtttggcaagcatgagagcatggtgcgcagagccggatctgctagcaaagcatgtcgactgccgagtgccatttc

SEQ ID NO: 40128 - DNA, 2201 bp, Zea Mays
ccactctgtacgcaacgcaaggcgccgttcgcacttcgcacgcaaacccctcctctcctctgctgacccctcctctcctggtctggattccaccaagccgtgtccaccaaccggccaccacccccgctgccggctcgcacctctctgcgccgtgctcagatttgcccccctctgcctgcctgcttctactacctgctgacacggcggtgcgggtcgtgctcggtggacgccagggggctacccctacccgggatccaggatcgtgctgtctgctcgccctctcctgctccttcaatcccatcggagatccgtgctggcgtttcctcccacatatattgaagctcatgcagctcctattctcaaacccagtttcagcgcccaattgtttggtttgaagaaatcaagttcagatgggctccattctaagtgctactagtactacggctaagtctatggatcagcatgaggcatctggaacagatcctaataagagggtgaagatatctacttatgagtatgggtcaaacccaaggataattccaactcttcctgatgagctctcactccagatcctggcaaggtcaccacggatccattaccttaacttgaagctggtttgccgagcctggaaggcagcaatcatcggctatgaactttcccagctgaggagagagcttggtgtaagtgaggaatgggtgtatgtactgaccaaggctgaggcatacaagctccattggtatgccctggatccagtgtttcagaaatggcagaggttgccaccgatgccttctttcgtcaatcaggaggaatccaatcggacagcatcttcggcgttctggatgtggaatgttgtgggatcaagcattaggattgctgattacgtgaggggcttattttggcgcaggaacagtttggaccagatgcccttttgcggttgttcagtgggtgttgctgatggttacttgtatgtcattggcggtttttccaaagctgttgccctgaatcgcgtttgtagatacgacccttttctcaatttgtggcaggaagtgagcccaatgatgactgggcgggctttctgcaaggcggcatttttgaatggcaagttatatgtagttggtggagtcagcaggggtcggaatggcttgcttcccctgcgttcagctgaggcgttcgaccctaaaactggattgtggagcgacctaccagaaatgcctttcgcaagagcgcaggtactccccactgctttcttggtcgatgtgctgaagcctatcgccacaggaatggcaccctacaagggaaagctgtatgtccctcagagcctgtactcatggccattcttttttgacattggaggtgagatctacgacccagatctgaatgcctggtcaacgatgccggatggtctcggcgatggatggccagccagacaggcaggcacaaagttgggtgttgtgatcgatgacagactttacacgctagagccttccagctctttggacagtggtaagataaaaagatacgactccgaggaggacgcatgggtaactatcaccccacaagttccagttaatgatttcactggtgcagaggccccttatttactcgctggcctcggtggaaggctccatgttataacaaaggcggcgaacaacactcttcaagttatgcaggctgtggtgcagaataactcggtatctgaagaaaatgtggtatggacaacagtggcttctaggaactttgggacggctgagcttgtcagctgccaggttctagatgtttaaaatgtgggtcgcaagttacgctttgtagaggatatagtatgccatagaccaacgatttagccaagaaaaatattacatagtttttgctttgtgtgtgtgtggaacaagagttcaatttgacgtggagggagatcaattacagatattcagatatgtataactgtataagctaactcatttgctgggacactgtgtatagacatacgatcgacgtgttaatgtacagtgctcaattctagtttcctttttttttaaaacatgtttctgatccttaacttttcggagatcatttattacattggaaggctgctgttctcctgtcttttgttgatgccgacccgtaatgtttggcaagcatgagagcatggtgcgcagagccggatctgctagcaaagcatgtcgactgccgagtgccatttc

SEQ ID NO: 40129 - DNA, 513 bp, Zea Mays
gccgttcgcacttcgcacgcaaacccctcctctcctctgctgacccctcctctcctggtctggattccaccaagccgtgtccaccaaccggccaccacccccgctgccggctcgcacctctctgcgccgtgctcagatttgcccccctctgcctgcctgcttctactacctgctgacacggcggtgcgggtcgtgctcggtggacgccagggggctacccctacccgggatccaggatcgtgctgtctgctcgccctctcctgctccttcaatcccatcggagatccgtgctggcgtttcctcccgtaagcccgaccacggtcaacatccaatttctcgtccgattcatgcaaaaaccattatgggccccgcgtaccgtgcgttgtttagccatcttgaatttccatttttttccaggatcgatgaattagccttgtttaggtttggcggaacacgtaccgtgcgttgccaaattcgagcattttgctatcattatatttgtcatgaatttta

SEQ ID NO: 40130 - DNA, 2200 bp, Zea Mays
gccgttcgcacttcgcacgcaaacccctcctctcctctgctgacccctcctctcctggtctggattccaccaagccgtgtccaccaaccggccaccacccccgctgccggctcgcacctctctgcgccgtgctcagatttgcccccctctgcctgcctgcttctactacctgctgacacggcggtgcgggtcgtgctcggtggacgccagggggctacccctacccgggatccaggatcgtgctgtctgctcgccctctcctgctccttcaatcccatcggagatccgtgctggcgtttcctcccgatgtgttcattttcaagtattttatcgctttgccagaaatcttttttatgatgacttaaaattttcagcgcccaattgtttggtttgaagaaatcaagttcagatgggctccattctaagtgctactagtactacggctaagtctatggatcagcatgaggcatctggaacagatcctaataagagggtgaagatatctacttatgagtatgggtcaaacccaaggataattccaactcttcctgatgagctctcactccagatcctggcaaggtcaccacggatccattaccttaacttgaagctggtttgccgagcctggaaggcagcaatcatcggctatgaactttcccagctgaggagagagcttggtgtaagtgaggaatgggtgtatgtactgaccaaggctgaggcatacaagctccattggtatgccctggatccagtgtttcagaaatggcagaggttgccaccgatgccttctttcgtcaatcaggaggaatccaatcggacagcatcttcggcgttctggatgtggaatgttgtgggatcaagcattaggattgctgattacgtgaggggcttattttggcgcaggaacagtttggaccagatgcccttttgcggttgttcagtgggtgttgctgatggttacttgtatgtcattggcggtttttccaaagctgttgccctgaatcgcgtttgtagatacgacccttttctcaatttgtggcaggaagtgagcccaatgatgactgggcgggctttctgcaaggcggcatttttgaatggcaagttatatgtagttggtggagtcagcaggggtcggaatggcttgcttcccctgcgttcagctgaggcgttcgaccctaaaactggattgtggagcgacctaccagaaatgcctttcgcaagagcgcaggtactccccactgctttcttggtcgatgtgctgaagcctatcgccacaggaatggcaccctacaagggaaagctgtatgtccctcagagcctgtactcatggccattcttttttgacattggaggtgagatctacgacccagatctgaatgcctggtcaacgatgccggatggtctcggcgatggatggccagccagacaggcaggcacaaagttgggtgttgtgatcgatgacagactttacacgctagagccttccagctctttggacagtggtaagataaaaagatacgactccgaggaggacgcatgggtaactatcaccccacaagttccagttaatgatttcactggtgcagaggccccttatttactcgctggcctcggtggaaggctccatgttataacaaaggcggcgaacaacactcttcaagttatgcaggctgtggtgcagaataactcggtatctgaagaaaatgtggtatggacaacagtggcttctaggaactttgggacggctgagcttgtcagctgccaggttctagatgtttaaaatgtgggtcgcaagttacgctttgtagaggatatagtatgccatagaccaacgatttagccaagaaaaatattacatagtttttgctttgtgtgtgtgtggaacaagagttcaatttgacgtggagggagatcaattacagatattcagatatgtataactgtataagctaactcatttgctgggacactgtgtatagacatacgatcgacgtgttaatgtacagtgctcaattctagtttcctttttttttaaaacatgtttctgatccttaacttttcggagatcatttattacattggaaggctgctgttctcctgtcttttgttgatgccgacccgtaatgtttggcaagcatgagagcatggtgcgcagagccggatctgctagcaaagcatgtcgactgccgagtgccatttc

SEQ ID NO: 40131 - DNA, 625 bp, Zea Mays
gccgttcgcacttcgcacgcaaacccctcctctcctctgctgacccctcctctcctggtctggattccaccaagccgtgtccaccaaccggccaccacccccgctgccggctcgcacctctctgcgccgtgctcagatttgcccccctctgcctgcctgcttctactacctgctgacacggcggtgcgggtcgtgctcggtggacgccagggggctacccctacccgggatccaggatcgtgctgtctgctcgccctctcctgctccttcaatcccatcggagatccgtgctggcgtttcctcccaagtctccagttgaagaagcaccggaggaatttgaccacataatcttctctgtcaatcataaccattccatttgtctagcagaaggcttggccctcaacttactgggggtggcgtaaaggaaaccttttgtatttgaatattagtgatacatgtatggatacggatcccaccacatcccatgaactaaagtatcattgattggaaggagctgaacaagatggaagcctgaatcgactgcccgatcaacaagacgtttaagatttagaaattctccaacgccaaggtgattgtctgatctgattgaaaacatgggtacaac

SEQ ID NO: 40132 - DNA, 465 bp, Zea Mays
gataaaagcaaggatggcgtacccggccaacacgagcgcggcgcgtcatgatgcgcggctccacgagtgctgcggttggcacgctcaacggcgcccagcgatgttgacctcgatcgcctgccactccccggtcacctctccgccgaagtctccagttgaagaagcaccggaggaatttgaccacataatcttctctgtcaatcataaccattccatttgtctagcagaaggcttggccctcaacttactgggggtggcgtaaaggaaaccttttgtatttgaatattagtgatacatgtatggatacggatcccaccacatcccatgaactaaagtatcattgattggaaggagctgaacaagatggaagcctgaatcgactgcccgatcaacaagacgtttaagatttagaaattctccaacgccaaggtgattgtctgatctgattgaaaacatgggtacaac

SEQ ID NO: 40133 - DNA, 2701 bp, Zea Mays
ccgcaccacagccccagtgctactccgtcaccgtcagcccgacgccccgccagaccaccctcttctgcctctccataataaaatctccctccctcctctcttctctctctctccttctctgcgctcgtgtaattctcttcagctgggatgcaagtactgcagtctgaagaattcagtggcaccacctctgcttcttattgatgataaactgtcagtgaacataagtcaccatctcctggatcacagtttttgtactggagcaagacagtaatggaccgggcagacacatctggctttgttagcggtggatcagatggtacttcactgctgctgatattctttcacttcgtctactcgactctgcacgtataagagatcagtaaaccaccttcactgtatttttcaagtacgtagcctagatgaataccatggatgattctgcagtgtcaattggtttctcggtgacgaactacacaacaggtagccatggtcagagtcaggtaacattaggcatagaccagctgggttcagcagtgaacaatagcagcggccatggccgcagaggttttcagaggtcgattcatgcgcctgctcaagatgatggatgcaggctagtcctcggactgggtccgacgcccgccccagacgttaactcttgtgattgtgatcagcagcctgccggagcagacaagtcgagaccacctgtaactttgtttggccagagcttctccttcgctgatccaggggcgctcagccttggaattcatcgggggcgtgataatgctggagcaactaaacacttgggcgtgcccgtgcctgccggaaccgtcatctccttttccactgttgacgagggctccacgtctgccaggagaagctccggcggctacatgccattgctgctcttggcgcctctgccaaactattcgacagctgaagaggagcagggtttgctagatgacacggacaacagtaataatggtggcactgatccccgcggttttcggttcagccctgaaccttcggcatccatgacggaagcttcctttggtggcgcgagctctgatgttgtgacggtggcaagcaatcctggacagcagactcaacgccggcatcccaagaagtgcaggttcaaagggtgctccaagggcgcgcgaggcgcgtcgggcctgtgcatcgctcacggtggcgggcagaggtgccagaagcccgggtgctacaagggcgccgagagccgcacggcctactgcaaggcccacggcgggggacgccggtgcctgcagctcggctgcaccaagagcgccgaagggaagacggatcactgcatcgcccatggcggcggccgacggtgcggctaccttgactgccctaaagccgcgcggggcaagtccgggcggtgcatcaagcacggcggcgggaagaggtgctcggtcgagggttgcatcaggagcgccgaggggagggtggggctgtgcatctcccacggcggcgggcggcggtgccagttcccggactgccgcaaaggagcccagggcagcaccctgtactgcaagtcgcacggcggcgggaagcggtgcgtcttcgaggggtgcggcaagggggccgaaggcagcacgccgctgtgcaaggcgcacggcggcgggaagcggtgcatgtacgagggcggcggcgtgtgccccaagagcgtccacggcggcacggacttctgcgtggcgcacggcggcgggaagcggtgcgcggtgcctgagtgcagcaagagcgcgcgcgggcgcacggactgttgcgtgaagcacggcggtggcaagcggtgcagggtggatgggtgcggcaagagcgcacaggggagcaccgagtactgcaaggcccacggcggcgggaagcgctgcaacttcggaggcgtctgcgagaagttcgcgcgcggccggagcgggctctgcgcggcgcacggcacgctggtggcctcgcggcagcgccgcagcggcggcggtggcatgattgggccaggcctcttccgcggcatcgttcggtccgccagcgcggcgaacatgtatagcgagtactcgtcgtcgggcgtgagcacggtgtcggactgcgacggctcgcctgaggcggcgacagggaggcatgagttgatccctccccaggtgctggtcccccactctatgaaatctttgacagcggcagccgtgcagccaccggcgaggagcagagagggaggggtggtcgctgtccccgaggggagggtgcacggcggtggtctgctgtcgttgcttggcgggagcttcaggaacgtcgacgtcgacaagctctgaaaatctgaagcaggctgcagcaggcagcgcttgaggctcgaattctacttctacgcctacgcctctttttcttaaaaaaggacggaagatcttccttttttccagtcatagctgtcagattattgtctgtgtataaaaatgtttcttgtctgcagatcgatcttatatggtaaaatttagattaatttcgtttcccttgtgtcaacataataagggtgaagacatgaatttgtcggggcttgtatatggttgaattattcgtagcagatccgaaaagcttcccacggcatcctgtacttgtcgtgaataagatcaatgtgtaacaatcgaacttattgctaaactgtggtatcagatgatcattctgagtaacacgtgttgctgtagat

SEQ ID NO: 40134 - DNA, 1833 bp, Zea Mays
aagcagccgagcaggaccgtgcgcctagaatgtggacgactatggtacaaacataagtattagaggtttgcacgacgtctggtgtgtgcgagctcacagtcacaaaagaaacgatgtccactggcgaactgacggctccgtcatgcggcgatcgataaaaatgccgcgaggccaccacgcgagacgaacgcaaacgaagtgcggaaaataggcctattttttcttcttcctcgtagagatatttcggaagagggaacgagggcttcgattcgatccaggagtcgcccaaatcgtcttgtcttcgacttcggacacgagatcctctagagggttgtgctgtttggcgtgaggctttgggggcgatttgctttgctcgcatgggggatcatgtcgctgtggatgttggggagctcgttgcgtcccgagtcggtgaggcagcggggctattgtccggcggcaaggaggaaatgaaggcgctggctgggatggtggagtgccgcatttgccaggaggaggacctcgcaaagaacctcgagagcccctgtgcttgcagcggcagcctcaagtatgctcacagggaatgtgtgcaacgttggtgcaatgagaaaggagatataatctgtgaaatctgccatgagtcgtacaagcctggttacactgccccaacccaggtgcatcatgatgaaactaccatagagataagtggtggagattggaccatctctggcaaccgtttggatttacatgatcccagaatattggcaatggctgctgctcaacaccgtttacttgaagacgagtacgatgaatatactgcaacaaacaataacgctgctgtgttttgccgctctatatttctgattttgatggcccttctgctcctgaggcatacattgaccattactaacagtgatgatgaagatgatgcatctgctattttctcgctatttcttttgagagccgctggatttttgctgccatgctatattatggcttgggctattagtatcatgcagcgtcaaagacaaagacaggttggtggctcggtgccaatggaaatgtttctctttcatgtgtatactgtattgacttttgacggaaaagaattccacgaaactatttatacctagcatggattgaatatatatattaacggagttaagcaaccttttttccccattggttgcacacatccttttctttagggatggctgcacacatatccttgtttgaactgaggagttggatcttgggatgatcgtatctgtcctttctgatcaaacatgagatttctaagttagagaaaattgagatcatttgttgtctgtttagtatttccgtagttttataccccattaagtgcgtgggctgggctacatagtctttgttcctaattgccataccagtgaagaacgcatggatggttcttgttcatttttgatatgtcaggaagaagcaatgctgttaccaacggaagtggcgatcattctgcacccggacggaagaacaatgcaatttgcggtggcaccagcggaatctcctgcatcacatcagtgacaggctcacaggcctgcctcggaatctcagcatctggtcttaaaggtggaaagacgaggacgttgtgcaattcatgttgtgccttcgaatttagttaactttcaagcggagattcaatgtttgttcgatgggctctcagcaccttctgtacataaagagatttatctaataactaataagtgaatataagttaaatcaacacaaagtttgattttgtattgtggtatatacgaccgctgaacagatttctcacgtttggggaaagccatatttttg

SEQ ID NO: 40135 - DNA, 1745 bp, Zea Mays
ctagaatgtggacgactatggtacaaacataagtattagaggtttgcacgacgtctggtgtgtgcgagctcacagtcacaaaagaaacgatgtccactggcgaactgacggctccgtcatgcggcgatcgataaaaatgccgcgaggccaccacgcgagacgaacgcaaacgaagtgcggaaaataggcctattttttcttcttcctcgtagagatatttcggaagagggaacgagggcttcgattcgatccaggagtcgcccaaatcgtcttgtcttcgacttcggacacgagatcctctagagggttgtgctgtttggcgtgaggctttgggggcgatttgctttgctcgcatgggggatcatgtcgctgtggatgttggggagctcgttgcgtcccgagtcggtgaggcagcggggctattgtccggcggcaaggaggaaatgaaggcgctggctgggatggtggagtgccgcatttgccaggaggaggacctcgcaaagaacctcgagagcccctgtgcttgcagcggcagcctcaagtatgctcacagggaatgtgtgcaacgttggtgcaatgagaaaggagatataatctgtgaaatctgccatgagtcgtacaagcctggttacactgccccaacccaggtgcatcatgatgaaactaccatagagataagtggtggagattggaccatctctggcaaccgtttggatttacatgatcccagaatattggcaatggctgctgctcaacaccgtttacttgaagacgattgatggcccttctgctcctgaggcatacattgaccattactaacagtgatgatgaagatgatgcatctgctattttctcgctatttcttttgagagccgctggatttttgctgccatgctatattatggcttgggctattagtatcatgcagcgtcaaagacaaagacaggttggtggctcggtgccaatggaaatgtttctctttcatgtgtatactgtattgacttttgacggaaaagaattccacgaaactatttatacctagcatggattgaatatatatattaacggagttaagcaaccttttttccccattggttgcacacatccttttctttagggatggctgcacacatatccttgtttgaactgaggagttggatcttgggatgatcgtatctgtcctttctgatcaaacatgagatttctaagttagagaaaattgagatcatttgttgtctgtttagtatttccgtagttttataccccattaagtgcgtgggctgggctacatagtctttgttcctaattgccataccagtgaagaacgcatggatggttcttgttcatttttgatatgtcaggaagaagcaatgctgttaccaacggaagtggcgatcattctgcacccggacggaagaacaatgcaatttgcggtggcaccagcggaatctcctgcatcacatcagtgacaggctcacaggcctgcctcggaatctcagcatctggtcttaaaggtggaaagacgaggacgttgtgcaattcatgttgtgccttcgaatttagttaactttcaagcggagattcaatgtttgttcgatgggctctcagcaccttctgtacataaagagatttatctaataactaataagtgaatataagttaaatcaacacaaagtttgattttgtattgtggtatatacgaccgctgaacagatttctcacgtttggggaaagccatatttttg

SEQ ID NO: 40136 - DNA, 1248 bp, Zea Mays
gtgtgcgagctcacagtcacaaaagaaacgatgtccactggcgaactgacggctccgtcatgcggcgatcgataaaaatgccgcgaggccaccacgcgagacgaacgcaaacgaagtgcggaaaataggcctattttttcttcttcctcgtagagatatttcggaagagggagtgcgtgccttcctctcagctgattcgccgaggacacgagatcctctagagggttgtgctgtttggcgtgaggctttgggggcgatttgctttgctcgcatgggggatcatgtcgctgtggatgttggggagctcgttgcgtcccgagtcggtgaggcagcggggctattgtccggcggcaaggaggaaatgaaggcgctggctgggatggtggagtgccgcatttgccaggaggaggacctcgcaaagaacctcgagagcccctgtgcttgcagcggcagcctcaagtatgctcacagggaatgtgtgcaacgttggtgcaatgagaaaggagatataatctgtgaaatctgccatgagtcgtacaagcctggttacactgccccaacccaggtgcatcatgatgaaactaccatagagataagtggtggagattggaccatctctggcaaccgtttggatttacatgatcccagaatattggcaatggctgctgctcaacaccgtttacttgaagacgattgatggcccttctgctcctgaggcatacattgaccattactaacagtgatgatgaagatgatgcatctgctattttctcgctatttcttttgagagccgctggatttttgctgccatgctatattatggcttgggctattagtatcatgcagcgtcaaagacaaagacaggaagaagcaatgctgttaccaacggaagtggcgatcattctgcacccggacggaagaacaatgcaatttgcggtggcaccagcggaatctcctgcatcacatcagtgacaggctcacaggcctgcctcggaatctcagcatctggtcttaaaggtggaaagacgaggacgttgtgcaattcatgttgtgccttcgaatttagttaactttcaagcggagattcaatgtttgttcgatgggctctcagcaccttctgtacataaagagatttatctaataactaataagtgaatataagttaaatcaacacaaagtttgattttgtattgtggtatatacgaccgctgaacagatttctcacgtttggggaaagccatatttttg

SEQ ID NO: 40137 - DNA, 1499 bp, Zea Mays
gtgtgcgagctcacagtcacaaaagaaacgatgtccactggcgaactgacggctccgtcatgcggcgatcgataaaaatgccgcgaggccaccacgcgagacgaacgcaaacgaagtgcggaaaataggcctattttttcttcttcctcgtagagatatttcggaagagggagtgcgtgccttcctctcagctgattcgccgagacgagggcttcgattcgatccaggagtcgcccaaatcgtcttgtcttcgacttcggttcaacccccgaaacgaaatttctagggttttagtgtcaattttgtcccccttcattacatttgattggcggtggattggttcccgttttgatgattccctgggttcgttggacggcaggacacgagatcctctagagggttgtgctgtttggcgtgaggctttgggggcgatttgctttgctcgcatgggggatcatgtcgctgtggatgttggggagctcgttgcgtcccgagtcggtgaggcagcggggctattgtccggcggcaaggaggaaatgaaggcgctggctgggatggtggagtgccgcatttgccaggaggaggacctcgcaaagaacctcgagagcccctgtgcttgcagcggcagcctcaagtatgctcacagggaatgtgtgcaacgttggtgcaatgagaaaggagatataatctgtgaaatctgccatgagtcgtacaagcctggttacactgccccaacccaggtgcatcatgatgaaactaccatagagataagtggtggagattggaccatctctggcaaccgtttggatttacatgatcccagaatattggcaatggctgctgctcaacaccgtttacttgaagacgagtacgatgaatatactgcaacaaacaataacgctgctgtgttttgccgctctatatttctgattgtgagttttgtgttgatggcccttctgctcctgaggcatacattgaccattactaacagtgatgatgaagatgatgcatctgctattttctcgctatttcttttgagagccgctggatttttgctgccatgctatattatggcttgggctattagtatcatgcagcgtcaaagacaaagacaggaagaagcaatgctgttaccaacggaagtggcgatcattctgcacccggacggaagaacaatgcaatttgcggtggcaccagcggaatctcctgcatcacatcagtgacaggctcacaggcctgcctcggaatctcagcatctggtcttaaaggtggaaagacgaggacgttgtgcaattcatgttgtgccttcgaatttagttaactttcaagcggagattcaatgtttgttcgatgggctctcagcaccttctgtacataaagagatttatctaataactaataagtgaatataagttaaatcaacacaaagtttgattttgtattgtggtatatacgaccgctgaacagatttctcacgtttggggaaagccatatttttg

SEQ ID NO: 40138 - DNA, 496 bp, Zea Mays
ggcaccagcatcacatcgagccgggagattggaatccagttgagatttcgctcctctcctcccctcccccgccctggtgagcccctccgggcgacgtgtgtcccgttgcctttccttcgctcgacggccacctgttgccctcgcatggctctgcctgctcctgccaagcgtccaagctcccgctcgcccggcggctgcacgccgcagcgtctatccacccagatccgcacgatccccgctaatcgccgcaccccctacctcccatgcaacttctctagctcacccgcatcccggctcggcactgccttctccttgcacttcacttctgtatctagaccacctcatcacaattcgtcgtcagcgtcgcgccgtcgtctcagttggggatcgatcggaattcggaaggattgcagaatgaatgctcctgaatggaccagctgactagatggcaattgaagttgcagtgctactaatgaatttatcaagtcatttttac

SEQ ID NO: 40139 - DNA, 1915 bp, Zea Mays
  misc_feature (1914)..(1915): n is a, c, g, or t
ggcaccagcatcacatcgagccgggagattggaatccagttgagatttcgctcctctcctcccctcccccgccctggtgagcccctccgggcgacgtgtgtcccgttgcctttccttcgctcgacggccacctgttgccctcgcatggctctgcctgctcctgccaagcgtccaagctcccgctcgcccggcggctgcacgccgcagcgtctatccacccagatccgcacgatccccgctaatcgccgcaccccctacctcccatgcaacttctctagctcacccgcatcccggctcggcactgccttctccttgcacttcacttctgtatctagaccacctcatcacaattcgtcgtcagcgtcgcgccgtcgtctcagattgatgcaaggcgtgatgagaagctagaggcagcaactgcatatattgcaagaaaattgaacatctctggtttctactactgcaaagttgaatggagttggtggctcccgattaactccacttggtccttcagtctcatagatctgacaacagttaatatcatgtcatatatgtggttacttagtgatatttttgttcagttcgttcagttcatcagctacctttttatgtaattcagcattttcttggtgaatcaggttgatcttattgtacaagtctgtgttttcttggtgaaataaacttgcctgcgaccaacaaagtagttagtcagtgttactaaaccaaataaaacacttaacacagttataaagtcatcatactgcagacctttcgattcaattcgtggatctcatctatcaagagatggtcctgttaagagcaccaacagtactaacgatctttagtaatttgttaaacaactgattatagaaatttgattaagaaccgaaccttctttgtgcggacaccacgcaggcttgtctccaactgattctctagggactgcagttctttaacattcagcccagaaagatcctctcccatcaactgcctgtaataaccaattaatatgcagtaccaattaatgtagtgttttatacaattctacagagactagccatgatgtttgtcaatttttgatatatgtggtttggcatcagtgttttgtgtatatatatctagagcatcatcagaatatgttttgatatactcttttttttatgggaaaaggctgttttacaaaatttgactgacagttaataaaattatacgcaggcttagtgtatgaaaaatctatcatattcatatctcacaaagctttgaaaacaacattgatttttctgggtttcgtttattgtaatgtcccgtttgtttcctttcattttgaggaattagaatcttactaatagaacagtctattttttttagaatgtgacattctaccactttccaaagttatcatataagtctatctcaaattcatggagtgggagatagaaattgattctatagatttacatgttatttttccgatgtacaacttatagcatactcttatacttgtttcgctataacataaatgtagtatataactatctctctcatatgatttaggataatatacaaatatattacatatataaatatataaacttaattagttttgtctaaattataattattaaaatggaattcaattccaacgaaacaaacggggcctaagagaaatttatggtcaaagtacacttaaagccttatttgaatcctaatgcacctctaaaatgaagcaggggaagtagtttagctgtgatagccctgtttttgttttattgttggccatagaataacttccacttgctcaacttatctcgtatgaaatattttggtgtctactgtctagcctttcacatgataatttggctcttgctaattgtttttgtacctatgaatgtgcaatagttgtagcagcatttnn

SEQ ID NO: 40140 - DNA, 1917 bp, Zea Mays
  misc_feature (1916)..(1917): n is a, c, g, or t
ggcaccagcatcacatcgagccgggagattggaatccagttgagatttcgctcctctcctcccctcccccgccctggtgagcccctccgggcgacgtgtgtcccgttgcctttccttcgctcgacggccacctgttgccctcgcatggctctgcctgctcctgccaagcgtccaagctcccgctcgcccggcggctgcacgccgcagcgtctatccacccagatccgcacgatccccgctaatcgccgcaccccctacctcccatgcaacttctctagctcacccgcatcccggctcggcactgccttctccttgcacttcacttctgtatctagaccacctcatcacaattcgtcgtcagcgtcgcgccgtcgtctcagattgatgcaaggcgtgatgagaagctagaggcagcaactgcatatattgcaagaaaattgtgaacatctctggtttctactactgcaaagttgaatggagttggtggctcccgattaactccacttggtccttcagtctcatagatctgacaacagttaatatcatgtcatatatgtggttacttagtgatatttttgttcagttcgttcagttcatcagctacctttttatgtaattcagcattttcttggtgaatcaggttgatcttattgtacaagtctgtgttttcttggtgaaataaacttgcctgcgaccaacaaagtagttagtcagtgttactaaaccaaataaaacacttaacacagttataaagtcatcatactgcagacctttcgattcaattcgtggatctcatctatcaagagatggtcctgttaagagcaccaacagtactaacgatctttagtaatttgttaaacaactgattatagaaatttgattaagaaccgaaccttctttgtgcggacaccacgcaggcttgtctccaactgattctctagggactgcagttctttaacattcagcccagaaagatcctctcccatcaactgcctgtaataaccaattaatatgcagtaccaattaatgtagtgttttatacaattctacagagactagccatgatgtttgtcaatttttgatatatgtggtttggcatcagtgttttgtgtatatatatctagagcatcatcagaatatgttttgatatactcttttttttatgggaaaaggctgttttacaaaatttgactgacagttaataaaattatacgcaggcttagtgtatgaaaaatctatcatattcatatctcacaaagctttgaaaacaacattgatttttctgggtttcgtttattgtaatgtcccgtttgtttcctttcattttgaggaattagaatcttactaatagaacagtctattttttttagaatgtgacattctaccactttccaaagttatcatataagtctatctcaaattcatggagtgggagatagaaattgattctatagatttacatgttatttttccgatgtacaacttatagcatactcttatacttgtttcgctataacataaatgtagtatataactatctctctcatatgatttaggataatatacaaatatattacatatataaatatataaacttaattagttttgtctaaattataattattaaaatggaattcaattccaacgaaacaaacggggcctaagagaaatttatggtcaaagtacacttaaagccttatttgaatcctaatgcacctctaaaatgaagcaggggaagtagtttagctgtgatagccctgtttttgttttattgttggccatagaataacttccacttgctcaacttatctcgtatgaaatattttggtgtctactgtctagcctttcacatgataatttggctcttgctaattgtttttgtacctatgaatgtgcaatagttgtagcagcatttnn

SEQ ID NO: 40141 - DNA, 1719 bp, Zea Mays
cctgcgactgcgagctgcgtagtccgtcgcctaccggctatcatcagcacgcaccgccgccgcctctcatctcatcgccgcgctgcttccccgcccgcccccggattggcgctgccgcacccagatcttccccacccaaatcgactccgccatcgtccggatccacgcagagccgtcgcggatcgacgtgctgccgccacagattgcgcgctgtcgtacggatcgagagacacccaccgcaagccttccgcgctggcgccgttcgggaagtaaggaggctacggagagggcacaagctggggggtgtcgaactccgtggagaacgcgcgggcggtggatgcctagctctggtagtctggtgggagggtgaggaaaatctagtggctgacccacgggcacggctgtcccgattcgccggccatgaagtgccgctctgattcgtcaggcggtggcgacgaccacccgggccccagcacccgctgccacgggcgtcggtggtggctcgcccgtgggcgaaccgagtaagaagcagcggacggaggagccggtcgcaagctccagcatggcgggcgagtgctcgtcttcgttcttgcaggctccaccgccgctggcggagcagttgccacaggacgcaagagtgggcgagcagccgccgccaggttcggaggccggaggtgacgagcaggccagggtgccggatctcggggaggacctggtgttcgaggtgctgatgcgagcggaggcccggacgctggcggccgcggcgtgcgtgagccgcgggtggcgactgctggcgcgggacgagcggctgtgggaggcggcgtgcgtgcgggagtgggcctacactggattctccgagcagatgcttcgcagcgtcgtgctttcgcttggcggcttccggcggctacacgagatgtacattcgtccggtccagcagcgtgctgctggagcgccgcccgggcagcagaggcggcagttgccggtgaggatgggccgtgaccaggtccaagtctcactctctctgctctcgacttcgttctttctgaagatgcctaatgctcctccacctcctcctaaggacaaggatagagatagagataagaatggaggtggccaatcatttaactcaaaaatttcccttgaaattcgagttgattctgagaagtatgaagagctgattgagttcatggagaaggtggctaagacagttgattctgaggagcactacgttctgtcaattgcttacaagattgtcatggaacccaatgtgcttcatggtgcatcatatcctccattgagtagggggaagaaggccgtgtcaacgtggactgtgtcactctcattgaggactaccataacaagattgaagttgaactcagcaagatctgtgatggaatcctcaagctccttgattcccaccgtttccgcctcattaacagctgcagagtccaaggtcttctacctcaagatgaagggtgattactacggtatctttttagttgaattcatgtgtattaggtaccttgcggagtttgaaactggatctaggagaaaagatgcagctagaataccatggtggcacacaaacctgctcagataatttgcttctccttcatttcacagttctcattaaattttgttggctaggacattgacctttttatacgtacaatttcattcaatgtgatgtgttgctaattcttttcctgctaaatcttt

SEQ ID NO: 40142 - DNA, 2048 bp, Zea Mays
cctgcgactgcgagctgcgtagtccgtcgcctaccggctatcatcagcacgcaccgccgccgcctctcatctcatcgccgcgctgcttccccgcccgcccccggattggcgctgccgcacccagatcttccccacccaaatcgactccgccatcgtccggatccacgcagagccgtcgcggatcgacgtgctgccgccacagattgcgcgctgtcgtacggatcgagagacacccaccgcaagccttccgcgctggcgccgttcgggaagtaaggaggctacggagagggcacaagctggggggtgtcgaactccgtggagaacgcgcgggcggtggatgcctagctctggtagtctggtgggagggtgaggaaaatctagtggctgacccacgggcacggctgtcccgattcgccggccatgaagtgccgctctgattcgtcaggcggtggcgacgaccacccgggccccagcacccgctgccacgggcgtcggtggtggctcgcccgtgggcgaaccgagtaagaagcagcggacggaggagccggtcgcaagctccagcatggcgggcgagtgctcgtcttcgttcttgcaggctccaccgccgctggcggagcagttgccacaggacgcaagagtgggcgagcagccgccgccaggttcggaggccggaggtgacgagcaggccagggtgccggatctcggggaggacctggtgttcgaggtgctgatgcgagcggaggcccggacgctggcggccgcggcgtgcgtgagccgcgggtggcgactgctggcgcgggacgagcggctgtgggaggcggcgtgcgtgcgggagtgggcctacactggattctccgagcagatgcttcgcagcgtcgtgctttcgcttggcggcttccggcggctacacgagatgtacattcgtccggtccagcagcgtgctgctggagcgccgcccgggcagcagaggcggcagttgccggtgaggatgggccgtgaccaggtccaagtctcactctctctgctctcgacttcgttctttctgaagatgcctaatgctcctccacctcctcctaaggacaaggatagagatagagataagaatggaggtggccaatcatttaactcaaaaatttcccttgaaattcgagttgattctgagaagtatgaagagctgattgagttcatggagaaggtggctaagacagttgattctgaggagcactacgttctgtcaattgcttacaagattgtcatggaacccaatgtgcttcatggtgcatcatatcctccattgagtagggggaagaaggccgtgtcaacgtggactgtgtcactctcattgaggactaccataacaagattgaagttgaactcagcaagatctgtgatggaatcctcaagctccttgattcccaccgtttccgcctcattaacagctgcagagtccaaggtcttctacctcaagatgaagggtgattactacgggtaccttgcggagtttgaaactggatctaggagaaaagatgcagctagaataccatggtggcacacaaacctgctcagataatttgcttctccttcatttcacagttctcattaaattttgttggctaggacattgacctttttatacgtacaatttcattcaatgtgatgtgttgctaattcttttcctgctaaatctttcaggatattgctctggaggaattggcccccacccatcctattaggctttggctggtgctgaacttctcaactcgcctgaccatgcgtccatgcttgcagtctcgccaaataggaccgtgagatgatgatcgagccagggatgtggtgccaaccacaagatgccgtggtggacgaccggaaaaatgatggacttacccagtggatgctcgccaagcgagtacctcccccagcaaacactatttaagtgttaaaataaaggcaagccccggttttatgcataaccgttatatatgctattttactgcacttaatgtttgtaggcttgtactgtgcacttaagtgtaggagttgactgaaac

SEQ ID NO: 40143 - DNA, 1291 bp, Zea Mays
gcgactgcgagctgcgtagtccgtcgcctaccggctatcatcagcacgcaccgccgccgcctctcatctcatcgccgcgctgcttccccgcccgcccccggattggcgctgccgcacccagatcttccccacccaaatcgactccgccatcgtccggatccacgcagagccgtcgcggatcgacgtgctgccgccacagattgcgcgctgtcgtacggatcgagagacacccaccgcaagccttccgcgctggcgccgttcgggaagtaaggaggctacggagagggcacaagctggggggtgtcgaactccgtggagaacgcgcgggcggtggatgcctagctctggtagtctggtgggagggtgaggaaaatctagtatgaagagctgattgagttcatggagaaggtggctaagacagttgattctgaggagcactacgttctgtcaattgcttacaagattgtcatggaacccaatgtgcttcatggtgcatcatatcctccattgagtagggggaagaaggccgtgtcaacgtggactgtgtcactctcattgaggactaccataacaagattgaagttgaactcagcaagatctgtgatggaatcctcaagctccttgattcccaccgtttccgcctcattaacagctgcagagtccaaggtcttctacctcaagatgaagggtgattactacggtatctttttagttgaattcatgtgtattaggtaccttgcggagtttgaaactggatctaggagaaaagatgcagctagaataccatggtggcacacaaacctgctcagataatttgcttctccttcatttcacagttctcattaaattttgttggctaggacattgacctttttatacgtacaatttcattcaatgtgatgtgttgctaattcttttcctgctaaatctttcaggatattgctctggaggaattggcccccacccatcctattaggctttggctggtgctgaacttctcaactcgcctgaccatgcgtccatgcttgcagtctcgccaaataggaccgtgagatgatgatcgagccagggatgtggtgccaaccacaagatgccgtggtggacgaccggaaaaatgatggacttacccagtggatgctcgccaagcgagtacctcccccagcaaacactatttaagtgttaaaataaaggcaagccccggttttatgcataaccgttatatatgctattttactgcacttaatgtttgtaggcttgtactgtgcacttaagtgtaggagttgactgaaac

SEQ ID NO: 40144 - DNA, 1554 bp, Zea Mays
ctttcttaaccctcttcctctctaaccgacttactcaaaaaaaaaaaaaactataccgtacaagtagcaatagcagaattatcaggagttgtgacaggaggccggcagccgtggcctcacctgaaggctgagttgctcctgccgcgtgtctcccctgcatccggcggtgcccgcgaacgtgcgcgttgcatccgggacggggagccactgcagccacgcgccagccgtggggaacaccacagggaaaaagagtggtgagatcagcacaactgatatagcgtgactatgcccccaaggtgtttgctcaaatgccagtaagtgccacagtgccactggtgtggagtacgctgtattttgcaaggccctgaaagtctgcgtattttagtctgcttgataggttctttgatacgccgtgtaactggacagtgcagtacgtgcccagtctcaggatgagaataaaaaaaggaggaatcaagttcatccttgaacattgtccgagctgctattctcaggtttgtgcttgtgtaaatagtcttttattgtagcatacatcattacttgatccaggcgtaatgggttagcttgataactaaaaaatcatatagtcgtgattttgtaaatcagtggcagttagaaattacttttcatcaatcatgatgtcgaatacaaccacatctaaacctcccaatgaaataatggtcaaagtactttgatagtttgtttgaaactcctaatgacatgttggtcaagttaccttgatagttgagacagacattattgtgtacttcgtcagatgcttcccataaacagtaaatttcaggaaaaactgtgtctattttttttccttttgtcaagagtgcagatttatgtctgtaaataaatactctcacatttttgtgttattgtagtattctcaacttttgctataccataggttggtggtcttcttctccaccgaaggtcctaaagtcaaaaataccttcggcaaaatgatacaatagcttgtcgaagctaccttcagcctcggctcagctcctcaagccgaagctcaatagctttggcccagacctagcaaagaaggaaaagaactagatagactttattagttttaattacttgtaaacaagtgtttgggggcatggatgtaatcttatccgggctacgtcccatgcctataaatagatgaacagtgccctgtactgttaaggctggattgcaatcgtgctcgagtcattctcgctctttcaccttccggcaagccgaatgtaccattgtaatatgaatattattaaagtttattcatgtttaatgaagataaataaatcataaatatatgacggatattatcttgattcctctgtattccttcatcttatttatattcatatccatgtttatattatattatagaatgataaaggtgtgtccttcatgaccttcgtctaaagatcgtcgtatccaagaggaaataatgcttaaaaggacgaaagtctttaaccattaacaattgtgttgtcttgttcttaattaatagcatttgagaacaagtgacca

SEQ ID NO: 40145 - DNA, 1132 bp, Zea Mays
ctttcttaaccctcttcctctctaaccgacttactcaaaaaaaaaaaaaactataccgtacaagtagcaatagcagaattatcaggagttgtgacaggaggccggcagccgtggcctcacctgaaggctgagttgctcctgccgcgtgtctcccctgcatccggcggtgcccgcgaacgtgcgcgttgcatccgggacggggagccactgcagccacgcgccagccgtggggaacaccacagggaaaaagagtggtgagatcagcacaactgatatagcgtgactatgcccccaaggtgtttgctcaaatgccagtaagtgccacagtgccactggtgtggagtacgctgtattttgcaaggccctgaaagtctgcgtattttagtctgcttgataggttctttgatacgccgtgtaactggacagtgcagtacgtgcccagtctcaggatgagaataaaaaaaggaggaatcaagttcatccttgaacattgtccgagctgctattctcaggttggtggtcttcttctccaccgaaggtcctaaagtcaaaaataccttcggcaaaatgatacaatagcttgtcgaagctaccttcagcctcggctcagctcctcaagccgaagctcaatagctttggcccagacctagcaaagaaggaaaagaactagatagactttattagttttaattacttgtaaacaagtgtttgggggcatggatgtaatcttatccgggctacgtcccatgcctataaatagatgaacagtgccctgtactgttaaggctggattgcaatcgtgctcgagtcattctcgctctttcaccttccggcaagccgaatgtaccattgtaatatgaatattattaaagtttattcatgtttaatgaagataaataaatcataaatatatgacggatattatcttgattcctctgtattccttcatcttatttatattcatatccatgtttatattatattatagaatgataaaggtgtgtccttcatgaccttcgtctaaagatcgtcgtatccaagaggaaataatgcttaaaaggacgaaagtctttaaccattaacaattgtgttgtcttgttcttaattaatagcatttgagaacaagtgacca

SEQ ID NO: 40146 - DNA, 1000 bp, Zea Mays
gcaatagcagaattatcaggagttgtgacaggaggccggcagccgtggcctcacctgaaggctgagttgctcctgccgcgtgtctcccctgcatccggcggtgcccgcgaacgtgcgcgttgcatccgggacggggagccactgcagccacgcgccagccgtggggaacaccacagggaaaaagagtggtgagatcagcacaactgatatagcgtgactatgcccccaaggtgtttgctcaaatgccagtaagtctgcttgataggttctttgatacgccgtgtaactggacagtgcagtacgtgcccagtctcaggatgagaataaaaaaaggaggaatcaagttcatccttgaacattgtccgagctgctattctcaggttggtggtcttcttctccaccgaaggtcctaaagtcaaaaataccttcggcaaaatgatacaatagcttgtcgaagctaccttcagcctcggctcagctcctcaagccgaagctcaatagctttggcccagacctagcaaagaaggaaaagaactagatagactttattagttttaattacttgtaaacaagtgtttgggggcatggatgtaatcttatccgggctacgtcccatgcctataaatagatgaacagtgccctgtactgttaaggctggattgcaatcgtgctcgagtcattctcgctctttcaccttccggcaagccgaatgtaccattgtaatatgaatattattaaagtttattcatgtttaatgaagataaataaatcataaatatatgacggatattatcttgattcctctgtattccttcatcttatttatattcatatccatgtttatattatattatagaatgataaaggtgtgtccttcatgaccttcgtctaaagatcgtcgtatccaagaggaaataatgcttaaaaggacgaaagtctttaaccattaacaattgtgttgtcttgttcttaattaatagcatttgagaacaagtgacca

SEQ ID NO: 40147 - DNA, 945 bp, Zea Mays
atcaggagttgtgacaggaggccggcagccgtggcctcacctgaaggctgagttgctcctgccgcgtgtctcccctgcatccggcggtgcccgcgaacgtgcgcgttgcatccgggacggggagccactgcagccacgcgccagccgtggggaacaccacagggaaaaagagtggtgagatcagcacaactgatatagcgtgactatgcccccaaggtgtttgctcaaatgccagtaagtgcagtacgtgcccagtctcaggatgagaataaaaaaaggaggaatcaagttcatccttgaacattgtccgagctgctattctcaggttggtggtcttcttctccaccgaaggtcctaaagtcaaaaataccttcggcaaaatgatacaatagcttgtcgaagctaccttcagcctcggctcagctcctcaagccgaagctcaatagctttggcccagacctagcaaagaaggaaaagaactagatagactttattagttttaattacttgtaaacaagtgtttgggggcatggatgtaatcttatccgggctacgtcccatgcctataaatagatgaacagtgccctgtactgttaaggctggattgcaatcgtgctcgagtcattctcgctctttcaccttccggcaagccgaatgtaccattgtaatatgaatattattaaagtttattcatgtttaatgaagataaataaatcataaatatatgacggatattatcttgattcctctgtattccttcatcttatttatattcatatccatgtttatattatattatagaatgataaaggtgtgtccttcatgaccttcgtctaaagatcgtcgtatccaagaggaaataatgcttaaaaggacgaaagtctttaaccattaacaattgtgttgtcttgttcttaattaatagcatttgagaacaagtgacca

SEQ ID NO: 40148 - DNA, 2185 bp, Zea Mays
cctctccaactttccgtttgccacacctctattgcaaccgccacaacccctagctccagcaacaaccaactccctcctcccctaatctcttcccactccaaaatgacggactgccaggtggtggccatgaaaaaggcgtacgccaggatcatgctcaacatggcgcaggagtcggcggcgcgggtgctgacggcggagcgtcgagccgtggccctcgcggccagtctcgaggccgccaaggaggacggcgtcgccgcgctcctgcggctcaaggccatcatggaagtcaggataaaagagaaagaactggaatctttggtgcatgttaagatgatcaaggaactagaagagcaattgaatggttcacaaaatgccatggcctctcttaaggttgagctgcagagggcaaatactgaattagagctgacaaggaaaactttagctgatgaaagaatgaatagccttcccacatccaataatgtttattattctaataaaaacgtcagcccttgttctaagatacatccacaaggaggaaatatattgttaaagaataaaaaaaacgctgacaacagtgatgacacttgccttgttctgataaccgaggagaatgaagcagtggacaaattggaggacaaggatcgtcgcagtcctgatctaccatcattcatgaaaagaaataagaaaccaaagttctgtcataatgggtgtacacagcgtatccatgcacttaaacagcagactcaaagtacagatgcattcctgaagcaaaatcagaagcaggccactgcattcaatagccactcaaaggccagaaagaaaaatgctgccaaaaactcatgccacacaaggtccgtcacggagcagatacttcaaacgaaatttcttggtaagttcaagcgcaagagaggtagaagaaacaggcctagctataagcatgataattccagtgagcacggggaagcagaatacaagttatctgatagatctgaatctgacggaaatggctgcttgctgctacttcaggcacttgaacaggatctttcacctccaaagttgtccactgaacatgatggggaggccttaactgacctgaaggaagatttcgaaatgagcgggggggatgctgagttaagtcggtgtactgctttctcggaactggttaatgtacttgcagtcaacagtgtgcaaatcaaaagaagaaaaagaacaaagactgtcagggttttggaagttgatttttccgatactaaaagtgttcctgaaccagctaacacccagcttaggaccagttcgaaaagcatgtctggtaatcaatcggtctctgagatgactgagaatcgctctgatacacccatcagaaacagtagccctttcttgaaatgtgctactgcaaacttaatgcatcagattgctgctggtaatggtcaatttgatcctgaaatcggctctgcagtgtcccttcagtcgaccaaaagtgaaactacagattatggtaacttggtggtggaccagcaggagctgataacaccaaataataatactacaagcttgaaagaagtaaatgaggatggaagctgcagtttggcttcacctaaggctgatgcttcgactcctgtgcaagctttagagaaatatgatatttcagttggcagctccctgaacaaagaagagcatacaaaggcatcttgtggagcttccatacaagctgaaggatcatttgatagattctccacaaggccacagtcaactagttcaggttgccgaacagctcattttgttgtcagagcatatgtgatgagagttttgaaacataaagctgaaggaatgactagtttggtgatgtaacatttaggaggcttctgataagtgaattttgtaatattctaaatccgtttgatttctttcctggcgtaagagagttccggtggtgacaactgacaacagatgtaccaaggaagcagctcaactcgaggattgctactgtagcagagtgtatagattttaaatactatttagttgatgatgacattgaattattgtttaagtaggtgataaattttagttatcgttatgtagttgtgttatttatcgtctcatcagaattcaaaagggaaagaattgctctctgcatagatgtatttaaattttgaatcaatctctatcacttaatcttaactccaca

SEQ ID NO: 40149 - DNA, 1833 bp, Zea Mays
gtcgcagggaggctcaggcccaaagtaatcgccaaatggcaaaatagcaaatttctcaaactaatcgtacagtagatgggcgcgagtaaaacagaacacagggagaagaaccggtggcaaacgaacagggaaaagggtaaattcgctttcagaggcaagcgctgcgttgccacacagcgggaatcctgcccagagctgccgaatcgggtccaatcccgtcgacctttctggccgccgccgccactggactccatccagaaattaccttcgattcggccggggccgtgggagcggggatggggctcggggaggcggcggggcggctcctggcggccgtggactgggagcgagaggcctacccggcgtacgacgacttcctcgcgctccccgtcttcgtccttttcttccccaccgtccgctacctcctcgaccgcttcgtcttcgagtgggttgcaaggaggcttataaatagaaatggacatcagagcactaataatgaaacagaagaaggaaggaagaagataagaaaattcaaggaatcagcttggaaatgtgtttatttcctgtctggagagcttttagctttgtcggttacatataacgagccttggttcaccaataccagatatttttgggtaggaccaggagaacaggtctggcctgatcaaaagataaaattgaaacttaaggctgtatatatgtatgctgctggattctacacatattccatatttgcacttatgttttgggaaacaaggcgttcagactttggagtgtcaatgtcacatcatgttgctactgtcgtcctgattgttctatcttacgtgttcagatttgctagagttggctctatagtattggcaattcatgatgcaagtgatgttttcctggaagtagggaagatgtccaagtacagtcattgtgattggcttgccaatgtttcgtttctgttttttgttatttcatgggttcttctccgcctcacttattttccattctggattctgagaagtacaagattcgccccattgcagtgttggtctggttcacagtttctttgttgtggtgcttgttgagttgctgtgaggttgtggccttcatcatctatgaggtcttgttgactttggacaaaaagaagcacaattttgatggtcctatatactattatgtgttcaattcccttctattttcactacttgttctccacatatattggtgggtcttaatatatcggatgcttctgagacaaatcaagacaagaaatgttggagatgatgttcgatctgattctgaaggagaagacgaccatgaagactgattggcgtcaccatcttagtttgcatattatgtcggtgctagaagcatcacccccaataccgtccctgagcttatacattctttggctggattccaagaatacgtgcagattatgagaggacgagcatttgttcctcacgagaatcaccgaagccgggctacgatttcttctgtctcgactgctcatttgtgttgtactaagtatgcattagaaacagcgctgcaatgtgttaaaaaagttggatgtcggatataacattcttgtgagtgttcagacaaagtgcagcggtaaatgtagcattccagaaaaaggactggctgtaaactatatggcctttctttcgacaaaccattgtaaaaattgtgtatgccaggatagccttgcttgggatttaccacaatcccaatcagaaactgtcccttctgaagcatgtatttcaccattcagtgattcgcctgatgataatttgataaattcatttatccaacacacctgatgcatatttgctgaaaaat

SEQ ID NO: 40150 - DNA, 2379 bp, Zea Mays
gcaaatttctcaaactaatcgtacagtagatgggcgcgagtaaaacagaacacagggagaagaaccggtggcaaacgaacagggaaaagggtaaattcgctttcagaggcaagcgctgcgttgccacacagcgggaatcctgcccagagctgccgaatcgggtccaatcccgtcgacctttctggccgccgccgccactggactccatccagaaattaccttcgattcggccggggccgtgggagcggggatggggctcggggaggcggcggggcggctcctggcggccgtggactgggagcgagaggcctacccggcgtacgacgacttcctcgcgctccccgtcttcgtccttttcttccccaccgtccgctacctcctcgaccgcttcgtcttcgagtgggttgcaaggaggcttataaatagaaatggacatcagagcactaataatgaaacagaagaaggaaggaagaagataagaaaattcaaggaatcagcttggaaatgtgtttatttcctgtctggagagcttttagctttgtcggttacatataacgagccttggttcaccaataccagatatttttgggtaggaccaggagaacaggtctggcctgatcaaaagataaaattgaaacttaaggctgtatatatgtatgctgctggattctacacatattccatatttgcacttatgttttgggaaacaaggcgttcagactttggagtgtcaatgtcacatcatgttgctactgtcgtcctgattgttctatcttacgtgttcagatttgctagagttggctctatagtattggcaattcatgatgcaagtgatgttttcctggaagtagggaagatgtccaagtacagtcattgtgattggcttgccaatgtttcgtttctgttttttgttatttcatgggttcttctccgcctcacttattttccattctggattctgagaagtacaaggtaaattcttctgttctggctcataagtctatcagattcttatgccaagaaaaatcatcgagttcgtaaaagtttgtttgcatatacagtcgaaagtagattggtatcttatttgttctgtactcaaacggttattgtgaaaacttggacagtgacttcctctagtctaaagaacattcctttatatagtcggacagtagcatcttagactctaaagagaattttactatgtacttccattggccacacaaatgaaggtttggatattttttgtatgcaccactggagacttcacacctttgtggacttggctaatcatataactcagtgtccaaaatatatcataataaacaattatagacatgtcaaattctgacaaggtaccatacagattcgccccattgcagtgttggtctggttcacagtttctttgttgtggtgcttgttgagttgctgtgaggttgtggccttcatcatgtgagttggtgttgttttctgttgtaactgtagttttccctctgttcttctccttctcaattaatacataggcctactgttaacctgctggcttttttaaaacaaacaaacaaacccagtttcaccacttcgctttagaataaactaattgaatgtttctggattcttttcacatgatctgactgaacccatttgtctcagctatgaggtcttgttgactttggacaaaaagaagcacaattttgatggtcctatatactattatgtgttcaattcccttctattttcactacttgttctccacatatattggtgggtcttaatatatcggatgcttctgagacaaatcaagacaagaaatgttggagatgatgttcgatctgattctgaaggagaagacgaccatgaagactgattggcgtcaccatcttagtttgcatattatgtcggtgctagaagcatcacccccaataccgtccctgagcttatacattctttggctggattccaagaatacgtgcagattatgagaggacgagcatttgttcctcacgagaatcaccgaagccgggctacgatttcttctgtctcgactgctcatttgtgttgtactaagtatgcattagaaacagcgctgcaatgtgttaaaaaagttggatgtcggatataacattcttgtgagtgttcagacaaagtgcagcggtaaatgtagcattccagaaaaaggactggctgtaaactatatggcctttctttcgacaaaccattgtaaaaattgtgtatgccaggatagccttgcttgggatttaccacaatcccaatcagaaactgtcccttctgaagcatgtatttcaccattcagtgattcgcctgatgataatttgataaattcatttatccaacacacctgatgcatatttgctgaaaaat

SEQ ID NO: 40151 - DNA, 1967 bp, Zea Mays
tacagtagatgggcgcgagtaaaacagaacacagggagaagaaccggtggcaaacgaacagggaaaagggtaaattcgctttcagaggcaagcgctgcgttgccacacagcgggaatcctgcccagagctgccgaatcgggtccaatcccgtcgacctttctggccgccgccgccactggactccatccagaaattaccttcgattcggccggggccgtgggagcggggatggggctcggggaggcggcggggcggctcctggcggccgtggactgggagcgagaggcctacccggcgtacgacgacttcctcgcgctccccgtcttcgtccttttcttccccaccgtccgctacctcctcgaccgcttcgtcttcgagtgggttgcaaggaggcttataaatagaaatggacatcagagcactaataatgaaacagaagaaggaaggaagaagataagaaaattcaaggaatcagcttggaaatgtgtttatttcctgtctggagagcttttagctttgtcggttacatataacgagccttggttcaccaataccagatatttttgggtaggaccaggagaacaggtctggcctgatcaaaagataaaattgaaacttaaggctgtatatatgtatgctgctggattctacacatattccatatttgcacttatgttttgggaaacaaggcgttcagactttggagtgtcaatgtcacatcatgttgctactgtcgtcctgattgttctatcttacgtgttcagatttgctagagttggctctatagtattggcaattcatgatgcaagtgatgttttcctggaagtagggaagatgtccaagtacagtcattgtgattggcttgccaatgtttcgtttctgttttttgttatttcatgggttcttctccgcctcacttattttccattctggattctgagaagtacaagattcgccccattgcagtgttggtctggttcacagtttctttgttgtggtgcttgttgagttgctgtgaggttgtggccttcatcatgtgagttggtgttgttttctgttgtaactgtagttttccctctgttcttctccttctcaattaatacataggcctactgttaacctgctggcttttttaaaacaaacaaacaaacccagtttcaccacttcgctttagaataaactaattgaatgtttctggattcttttcacatgatctgactgaacccatttgtctcagctatgaggtcttgttgactttggacaaaaagaagcacaattttgatggtcctatatactattatgtgttcaattcccttctattttcactacttgttctccacatatattggtgggtcttaatatatcggatgcttctgagacaaatcaagacaagaaatgttggagatgatgttcgatctgattctgaaggagaagacgaccatgaagactgattggcgtcaccatcttagtttgcatattatgtcggtgctagaagcatcacccccaataccgtccctgagcttatacattctttggctggattccaagaatacgtgcagattatgagaggacgagcatttgttcctcacgagaatcaccgaagccgggctacgatttcttctgtctcgactgctcatttgtgttgtactaagtatgcattagaaacagcgctgcaatgtgttaaaaaagttggatgtcggatataacattcttgtgagtgttcagacaaagtgcagcggtaaatgtagcattccagaaaaaggactggctgtaaactatatggcctttctttcgacaaaccattgtaaaaattgtgtatgccaggatagccttgcttgggatttaccacaatcccaatcagaaactgtcccttctgaagcatgtatttcaccattcagtgattcgcctgatgataatttgataaattcatttatccaacacacctgatgcatatttgctgaaaaat

SEQ ID NO: 40152 - DNA, 2110 bp, Zea Mays
tggcaaacgaacagggaaaagggtaaattcgctttcagaggcaagcgctgcgttgccacacagcgggaatcctgcccagagctgccgaatcgggtccaatcccgtcgacctttctggccgccgccgccactggactccatccagaaattaccttcgattcggccggggccgtgggagcggggatggggctcggggaggcggcggggcggctcctggcggccgtggactgggagcgagaggcctacccggcgtacgacgacttcctcgcgctccccgtcttcgtccttttcttccccaccgtccgctacctcctcgaccgcttcgtcttcgagtgggttgcaaggaggcttataaatagaaatggacatcagagcactaataatgaaacagaagaaggaaggaagaagataagaaaattcaaggaatcagcttggaaatgtgtttatttcctgtctggagagcttttagctttgtcggttacatataacgagccttggttcaccaataccagatatttttgggtaggaccaggagaacaggtctggcctgatcaaaagataaaattgaaacttaaggctgtatatatgtatgctgctggattctacacatattccatatttgcacttatgttttgggaaacaaggcgttcagactttggagtgtcaatgtcacatcatgttgctactgtcgtcctgattgttctatcttacgtgttcagatttgctagagttggctctatagtattggcaattcatgatgcaagtgatgttttcctggaagtagggaagatgtccaagtacagtcattgtgattggcttgccaatgtttcgtttctgttttttgttatttcatgggttcttctccgcctcacttattttccattctggattctgagaagtacaaggtaaattcttctgttctggctcataagtctatcagattcttatgccaagaaaaatcatcgagttcgtaaaagtttgtttgcatatacagtcgaaagtagattggtatcttatttgttctgtactcaaacggttattgtgaaaacttggacagtgacttcctctagtctaaagaacattcctttatatagtcggacagtagcatcttagactctaaagagaattttactatgtacttccattggccacacaaatgaaggtttggatattttttgtatgcaccactggagacttcacacctttgtggacttggctaatcatataactcagtgtccaaaatatatcataataaacaattatagacatgtcaaattctgacaaggtaccatacagattcgccccattgcagtgttggtctggttcacagtttctttgttgtggtgcttgttgagttgctgtgaggttgtggccttcatcatctatgaggtcttgttgactttggacaaaaagaagcacaattttgatggtcctatatactattatgtgttcaattcccttctattttcactacttgttctccacatatattggtgggtcttaatatatcggatgcttctgagacaaatcaagacaagaaatgttggagatgatgttcgatctgattctgaaggagaagacgaccatgaagactgattggcgtcaccatcttagtttgcatattatgtcggtgctagaagcatcacccccaataccgtccctgagcttatacattctttggctggattccaagaatacgtgcagattatgagaggacgagcatttgttcctcacgagaatcaccgaagccgggctacgatttcttctgtctcgactgctcatttgtgttgtactaagtatgcattagaaacagcgctgcaatgtgttaaaaaagttggatgtcggatataacattcttgtgagtgttcagacaaagtgcagcggtaaatgtagcattccagaaaaaggactggctgtaaactatatggcctttctttcgacaaaccattgtaaaaattgtgtatgccaggatagccttgcttgggatttaccacaatcccaatcagaaactgtcccttctgaagcatgtatttcaccattcagtgattcgcctgatgataatttgataaattcatttatccaacacacctgatgcatatttgctgaaaaat

SEQ ID NO: 40153 - DNA, 1682 bp, Zea Mays
ggaaaagggtaaattcgctttcagaggcaagcgctgcgttgccacacagcgggaatcctgcccagagctgccgaatcgggtccaatcccgtcgacctttctggccgccgccgccactggactccatccagaaattaccttcgattcggccggggccgtgggagcggggatggggctcggggaggcggcggggcggctcctggcggccgtggactgggagcgagaggcctacccggcgtacgacgacttcctcgcgctccccgtcttcgtccttttcttccccaccgtccgctacctcctcgaccgcttcgtcttcgagtgggttgcaaggaggcttataaatagaaatggacatcagagcactaataatgaaacagaagaaggaaggaagaagataagaaaattcaaggaatcagcttggaaatgtgtttatttcctgtctggagagcttttagctttgtcggttacatataacgagccttggttcaccaataccagatatttttgggtaggaccaggagaacagattgaaacttaaggctgtatatatgtatgctgctggattctacacatattccatatttgcacttatgttttgggaaacaaggcgttcagactttggagtgtcaatgtcacatcatgttgctactgtcgtcctgattgttctatcttacgtgttcagatttgctagagttggctctatagtattggcaattcatgatgcaagtgatgttttcctggaagtagggaagatgtccaagtacagtcattgtgattggcttgccaatgtttcgtttctgttttttgttatttcatgggttcttctccgcctcacttattttccattctggattctgagaagtacaagattcgccccattgcagtgttggtctggttcacagtttctttgttgtggtgcttgttgagttgctgtgaggttgtggccttcatcatctatgaggtcttgttgactttggacaaaaagaagcacaattttgatggtcctatatactattatgtgttcaattcccttctattttcactacttgttctccacatatattggtgggtcttaatatatcggatgcttctgagacaaatcaagacaagaaatgttggagatgatgttcgatctgattctgaaggagaagacgaccatgaagactgattggcgtcaccatcttagtttgcatattatgtcggtgctagaagcatcacccccaataccgtccctgagcttatacattctttggctggattccaagaatacgtgcagattatgagaggacgagcatttgttcctcacgagaatcaccgaagccgggctacgatttcttctgtctcgactgctcatttgtgttgtactaagtatgcattagaaacagcgctgcaatgtgttaaaaaagttggatgtcggatataacattcttgtgagtgttcagacaaagtgcagcggtaaatgtagcattccagaaaaaggactggctgtaaactatatggcctttctttcgacaaaccattgtaaaaattgtgtatgccaggatagccttgcttgggatttaccacaatcccaatcagaaactgtcccttctgaagcatgtatttcaccattcagtgattcgcctgatgataatttgataaattcatttatccaacacacctgatgcatatttgctgaaaaat

SEQ ID NO: 40154 - DNA, 1689 bp, Zea Mays
ggaaaagggtaaattcgctttcagaggcaagcgctgcgttgccacacagcgggaatcctgcccagagctgccgaatcgggtccaatcccgtcgacctttctggccgccgccgccactggactccatccagaaattaccttcgattcggccggggccgtgggagcggggatggggctcggggaggcggcggggcggctcctggcggccgtggactgggagcgagaggcctacccggcgtacgacgacttcctcgcgctccccgtcttcgtccttttcttccccaccgtccgctacctcctcgaccgcttcgtcttcgagtgggttgcaaggaggcttataaatagaaatggacatcagagcactaataatgaaacagaagaaggaaggaagaagataagaaaattcaaggaatcagcttggaaatgtgtttatttcctgtctggagagcttttagctttgtcggttacatataacgagccttggttcaccaataccagatatttttgggtaggaccaggagaacaggtctggcctgatcaaaagataaaattgaaacttaaggctgtatatatgtatgctgctggattctacacatattccatatttgcacttatgttttgggaaacaaggcgttcagactttggagtgtcaatgtcacatcatgttgctactgtcgtcctgattgttctatcttacgtgttcagatttgctagagttggctctatagtattggcaattcatgatgcaagtgatgttttcctggaagtagggaagatgtccaagtacagtcattgtgattggcttgccaatgtttcgtttctgttttttgttatttcatgggttcttctccgcctcacttattttccattctggattctgagaagtacaagtgttggtctggttcacagtttctttgttgtggtgcttgttgagttgctgtgaggttgtggccttcatcatctatgaggtcttgttgactttggacaaaaagaagcacaattttgatggtcctatatactattatgtgttcaattcccttctattttcactacttgttctccacatatattggtgggtcttaatatatcggatgcttctgagacaaatcaagacaagaaatgttggagatgatgttcgatctgattctgaaggagaagacgaccatgaagactgattggcgtcaccatcttagtttgcatattatgtcggtgctagaagcatcacccccaataccgtccctgagcttatacattctttggctggattccaagaatacgtgcagattatgagaggacgagcatttgttcctcacgagaatcaccgaagccgggctacgatttcttctgtctcgactgctcatttgtgttgtactaagtatgcattagaaacagcgctgcaatgtgttaaaaaagttggatgtcggatataacattcttgtgagtgttcagacaaagtgcagcggtaaatgtagcattccagaaaaaggactggctgtaaactatatggcctttctttcgacaaaccattgtaaaaattgtgtatgccaggatagccttgcttgggatttaccacaatcccaatcagaaactgtcccttctgaagcatgtatttcaccattcagtgattcgcctgatgataatttgataaattcatttatccaacacacctgatgcatatttgctgaaaaat

SEQ ID NO: 40155 - DNA, 1890 bp, Zea Mays
ggaaaagggtaaattcgctttcagaggcaagcgctgcgttgccacacagcgggaatcctgcccagagctgccgaatcgggtccaatcccgtcgacctttctggccgccgccgccactggactccatccagaaattaccttcgattcggccggggccgtgggagcggggatggggctcggggaggcggcggggcggctcctggcggccgtggactgggagcgagaggcctacccggcgtacgacgacttcctcgcgctccccgtcttcgtccttttcttccccaccgtccgctacctcctcgaccgcttcgtcttcgagtgggttgcaaggaggcttataaatagaaatggacatcagagcactaataatgaaacagaagaaggaaggaagaagataagaaaattcaaggaatcagcttggaaatgtgtttatttcctgtctggagagcttttagctttgtcggttacatataacgagccttggttcaccaataccagatatttttgggtaggaccaggagaacaggtctggcctgatcaaaagataaaattgaaacttaaggctgtatatatgtatgctgctggattctacacatattccatatttgcacttatgttttgggaaacaaggcgttcagactttggagtgtcaatgtcacatcatgttgctactgtcgtcctgattgttctatcttacgtgttcagatttgctagagttggctctatagtattggcaattcatgatgcaagtgatgttttcctggaagtagggaagatgtccaagtacagtcattgtgattggcttgccaatgtttcgtttctgttttttgttatttcatgggttcttctccgcctcacttattttccattctggattctgagaagtacaagtgttggtctggttcacagtttctttgttgtggtgcttgttgagttgctgtgaggttgtggccttcatcatgtgagttggtgttgttttctgttgtaactgtagttttccctctgttcttctccttctcaattaatacataggcctactgttaacctgctggcttttttaaaacaaacaaacaaacccagtttcaccacttcgctttagaataaactaattgaatgtttctggattcttttcacatgatctgactgaacccatttgtctcagctatgaggtcttgttgactttggacaaaaagaagcacaattttgatggtcctatatactattatgtgttcaattcccttctattttcactacttgttctccacatatattggtgggtcttaatatatcggatgcttctgagacaaatcaagacaagaaatgttggagatgatgttcgatctgattctgaaggagaagacgaccatgaagactgattggcgtcaccatcttagtttgcatattatgtcggtgctagaagcatcacccccaataccgtccctgagcttatacattctttggctggattccaagaatacgtgcagattatgagaggacgagcatttgttcctcacgagaatcaccgaagccgggctacgatttcttctgtctcgactgctcatttgtgttgtactaagtatgcattagaaacagcgctgcaatgtgttaaaaaagttggatgtcggatataacattcttgtgagtgttcagacaaagtgcagcggtaaatgtagcattccagaaaaaggactggctgtaaactatatggcctttctttcgacaaaccattgtaaaaattgtgtatgccaggatagccttgcttgggatttaccacaatcccaatcagaaactgtcccttctgaagcatgtatttcaccattcagtgattcgcctgatgataatttgataaattcatttatccaacacacctgatgcatatttgctgaaaaat

SEQ ID NO: 40156 - DNA, 1999 bp, Zea Mays
ggaaaagggtaaattcgctttcagaggcaagcgctgcgttgccacacagcgggaatcctgcccagagctgccgaatcgggtccaatcccgtcgacctttctggccgccgccgccactggactccatccagaaattaccttcgattcggccggggccgtgggagcggggatggggctcggggaggcggcggggcggctcctggcggccgtggactgggagcgagaggcctacccggcgtacgacgacttcctcgcgctccccgtcttcgtccttttcttccccaccgtccgctacctcctcgaccgcttcgtcttcgagtgggttgcaaggaggcttataaatagaaatggacatcagagcactaataatgaaacagaagaaggaaggaagaagataagaaaattcaaggaatcagcttggaaatgtgtttatttcctgtctggagagcttttagctttgtcggttacatataacgagccttggttcaccaataccagatatttttgggtaggaccaggagaacaggtctggcctgatcaaaagataaaattgaaacttaaggctgtatatatgtatgctgctggattctacacatattccatatttgcacttatgttttgggaaacaaggcgttcagactttggagtgtcaatgtcacatcatgttgctactgtcgtcctgattgttctatcttacgtgttcagatttgctagagttggctctatagtattggcaattcatgatgcaagtgatgttttcctggaagtagggaagatgtccaagtacagtcattgtgattggcttgccaatgtttcgtttctgttttttgttatttcatgggttcttctccgcctcacttattttccattctggattctgagaagtacaaggtaaattcttctgttctggctcataagtctatcagattcttatgccaagaaaaatcatcgagttcgtaaaagtttgtttgcatatacagtcgaaagtagattggtatcttatttgttctgtactcaaacggttattgtgaaaacttggacagtgacttcctctagtctaaagaacattcctttatatagtcggacagtagcatcttagactctaaagagaattttactatgtacttccattggccacacaaatgaaggtttggatattttttgtatgcaccactggagacttcacacctttgtggacttggctaatcatataactcagtgtccaaaatatatcataataaacaattatagacatgtcaaattctgacaagctatgaggtcttgttgactttggacaaaaagaagcacaattttgatggtcctatatactattatgtgttcaattcccttctattttcactacttgttctccacatatattggtgggtcttaatatatcggatgcttctgagacaaatcaagacaagaaatgttggagatgatgttcgatctgattctgaaggagaagacgaccatgaagactgattggcgtcaccatcttagtttgcatattatgtcggtgctagaagcatcacccccaataccgtccctgagcttatacattctttggctggattccaagaatacgtgcagattatgagaggacgagcatttgttcctcacgagaatcaccgaagccgggctacgatttcttctgtctcgactgctcatttgtgttgtactaagtatgcattagaaacagcgctgcaatgtgttaaaaaagttggatgtcggatataacattcttgtgagtgttcagacaaagtgcagcggtaaatgtagcattccagaaaaaggactggctgtaaactatatggcctttctttcgacaaaccattgtaaaaattgtgtatgccaggatagccttgcttgggatttaccacaatcccaatcagaaactgtcccttctgaagcatgtatttcaccattcagtgattcgcctgatgataatttgataaattcatttatccaacacacctgatgcatatttgctgaaaaat

SEQ ID NO: 40157 - DNA, 5955 bp, Zea Mays
agtcggcccctcgactggtaggcgagcagtcggtctcctggacagcaagttaaaacagcacaacaaggctcagttggcccaacaacgattccaagtttctgaacgaaagatatgcactgcaacacatcctctaaaattgctcttcaacgccagtatttgctgaaatttgatacctgcaacagcgttcattcctcagttggtcatcatctggtacctgaacatccacaggagctgcacaaggacctacatccagaagcatcgaattgctccaaaacatccttaatgaggatgtcaagtttgttatctatcaacaaacaccattccaatgaacttgctacttgccctatgaaactgagaattttttgagtgagataatttttacgatgcatagcatccaacttcggattttcaattacgcttcttccatggttatcctatacatctccatagtatgcttctcatgtccatcgcttcaatatatattgtggtggtagtgtcttgatgttcatcaaatcaagaactttcaaagcatgaccgtattattttcatgtttggtgtaatgttatttttatgtactcgttgtctatctatatgtattgctacgtatagaaacgaggtgacgggaatttgaagaccaacattggagaagtaactggagttgcaccaaaaaggcaagttgcgcccttaatcactttctttacctaataatgttctcaataatcatcgtgacatgctcagcttaacttgatgggacctaataggttaccctagttttgttcaccctacaccttgcaaacaaatgaactattgggtaatcttggtattgctctacctagttttgggattaatattatatctgaatgatgatcatattccattattattgttggtttaattattgtccatgataagattattgtgttaattagaacatagagcgaccaaccgagaaaacattgctaccacaagggtggaatggaactgttgggggtctgcttcgtcgccgaaggtcccatgagaagaaacaccttcggaagattgacacaaagccgaagctatcaatcagaaggcttcggagtacatttccaaaggcaccgacttaaagatgaaatgaccaatcggcccatgataatttgtattatgattgtaaacctttgtaaagggcatgaatgtaattcccaacaggctgcgtcctgtgcctataaatagatgaacagtacccctgtactgttcacgctatcatgtaatcactcgcgcgcaacacttggatttttgccttctgtcaagccaaatgtataaatatgattaaacatcgtgtttaaatattcaagtttgtataatgaaacatatgaatgacataatgtgtttgttcgtgctatctttcatgtttcatatgtttcaccttttattatcttataaccgtgatgatgaaggtatgtccttcatgaccttcgtccgaagatcgttatatcctaagggaaataatgtttcgatggacaaaggactttaacatttaatactttgtgttgccttgttcttgattcatagcatttgagaacaagtccccaacaggaacgcccttggttgattaattaggaaagctagtgtgagttaatcctttcccgaaaggggcaagcggggtgtggggagctgccggtataggaaggttctcgggtcgatctgtgtgtgatagcttttcaaatgagggattcctatattgccccctcctgcctgattccgtagcgagttctctcatgctagtggaactttggaaagacctcgtaatgctaccctgcctcgcctcctcggtagaggtgtatgaggtccgtacaaccccgtggcagataggtatcacggcttgtggataaagatgtgcaacctctgcagagtgtaaaactggtatatcagtcgtgctcacggtcaagagcggctcggaccctcacatgagtaacttatgaaattaaacttaatctgtcatttgcattgcattgtgggatttattatcaattgtgatcaattatctaattgggttgggatttattatcaattgtgctcaattatctaattgctaataaaattttaaccaacttattaaaagcaatgttcagccttaaccactttctccttggtaagccttacacttcacatgagccccatcgtaagtgagctcatgcacattatcccccacaacttgttgagcgatgaacgtatgtgagctcactcttgctaaactcacaccaggtcatgaacaagtaccgatggagaaagatgaaggatgctacaatgagtttcggagaggtctaggtcgtcgtttcccagtcaactatggtgttgtggaggatcgttgtcgtcatatgaagtatttatttagttattttgtacaaaccccccatatgtgataaagatgtgacattgatttctgtatcatgagccatcatgtgtgagacttgatcctagcacacatttgagacccgcccgggtttgcccttaaatccgagtgtgacactttggaggtcaactcgtgagaggacaccactatgccatccccgctcgagccaactttggcgtagggatcaatgacatagctctgttggccatgtcatctttctgttaccggaaccgcaatgctctaagccagactgctttcaggtactacccacagcgtcggtctagataggttctcacccgaatccactcgggcacaacagagggcaacattcgcttagagactttgctagagtacactacaactttgaacacagagcatgatgctgccctaatagagcttgactacataaggaggaagtatgccagactatagacttagctggataacggaggacaacaccaaccagatatggatccagcaaactcaccagagcacccagctctcccataccatcacttcgatgtctgtacccatctaggtttcccttgagatgtaataggagcagggctaaggaataaaagtgtattagaacaatgttgctattattaaatgatgtaatggtttgatgtttgaataaatgaatgagttggatctttgattgagtgtttaggtcttgtggattgatgaccacaagagcttttataatctatttgaactcagaatgatactgtgttcaagatagttttaccaaaatccttaccatttgcatcttttctaaggcctcattttctaaccctccagatggtaaatactaggggacagagtcaaggcctcattttacaatacgcacatcttttccattcttctatcgagggaattgtatgcgacatttaatgttgtcattcttaagtaactcatcaaatattttatcacacttagcaacactaaatgtgaacttaactttccccttttgtgccaagtgcaggtgagagtgagcagaagatttagtcttagtaggccaaacaagcttagcgacatgtaactttttccatcccctgaactaccattgtcgtgatattcatcctagggctcaggtggccaactatctttttgtcggtcttctgcactagaagtctagaacggtcacaggtgacttcgatattccggatggtccgacctgtgtgaccaggcttcaccttcgagcattgtggtgggctccgtgtgacttcggactgtccggcataaggtgtcgaacggtccgatgaagggccaaacggtctgagatcgtgcgtagactgtctggtcgtgctcagagccgatccaccgtataatgaagaagacaactacagtttccccggatacaagttcatcgacatatcataatatagttgggactgagaaaacacatttgttgtcgatgtgtttggcacaattgtttcggtgcccaattcatgtgacaaaaaattaggcgtatgagattttacaaatgcatgcgtcattttctctatatcctatgtcatactttcaatccggttatcaaaagaaattttaatagattgaatatcatcgaatgatgcggtgtcacttacaatggggagttgctgcaacaagctgacagtgaatcgcagtttatttcattctcccggacgaccttctggtggcaatctatgctgaagcgcgagaggtaccgcttctccatcccctcatgcttctaagcttgttgtcgctagaactcctcgtcccacttctttatgtactcttttaattcctcatgctcaatggccgataaattagttagccttgtgtcgctgtctagagaaacatcgttgagacctttagaatcggacatagaaaccgatttttgtagatttgcaatcttcgcccctagcggaatcaccaaaaagtgtactggctccgatgtggtaccaaacactagataaaataacctgacggtgctctctgtaggagcacgagaggtccgcgacctcgctacaggagcgagtctcctctggtcgcgtgcaggacggtttgctctctgggcaggacggtccgcgacggcgcagggtcttcttcgcaggaacctgaatcttgcctcccgggagggacctcgtcgaggaggagagatcatagggttgtcttggggtcgataggccacccaagacgcctctagatgacgtcgagccgaagagaggtgaagaaaaaggtggaggaaaagtaatactagggctaaactaaggctaggttactcctactcctaatgaaaagaaaaaaacaatgcaaataaggtagatttgataaatagatttgattggatcaattatggcgtgtcaatcggtcgtaccccttcgtttatataagggtgaggtctcaacccgttacaagtcggtttccaaacaaatcccatggaatttgctaacaaatcccgcaacaaatcaggaaccctaattgattctatccacacgcggaccgtctgcaccgctcccacggcccgtccggcatgcaggccggaccatccagctgcacatttttgtgctcatcaaggttccttgtaaactcactcttctactcgcagcaatacaaataaataggcaaacaataaataaaaataggattacaccaaacaatgaaacaaactatgtaagactaatacatgcattgagatgaattcgtaggttcaagaaccaccaaaatcggagttaaaacgcaaaaatatgaaataaacaagtgtatgggttatttttagggacttatttgtgaattccatggacctacacataattatatatacaaagttgagggctttggtgtaaaccttctctgctaggatggcgggttccatgtttatgaagttcagggtctaatctatgaaagacagggacctgtgtaatgatatttaaattcaggcggactacgagttatttgttataaacatcagggtatgtctagcaaaacagctcggccggctactcgtgcgcgctctggaccattcatctaacgatctacggttccgacctaatcacaccgaactgttatcctcgttataatcatatccgctcgttgtcgaatcaatgatcacgatgtgtctttgtcccctaacaacgctcagtgcgacggagcacccgcccctacggcggcgagctcgccgacatgatgtgccatcgcccctagtgcatgatttaccatgctacctactgcgacatcatgcaaaaaccttagcgaacacattcaaggagacataccaatggttgaggcgacgacaagtgctgaccatggcgaacggaggctccaccatgacgctcggctcctttgctcgactttcttgtgctccaaaagatctcatgcccatctacgcactcgtgcacattccacttgatcttgcgatgctcccttactcgccccaaggcctcgccaccaacccgatcgtgactagcagcagcaaaaagcaaaaggaaagcacaactacaaactattttcctaaaccgtgcaatgaacgtgtccatctacaattctcttggactggctcgattacacatggtactaagataagggatgttcaaaaaccataa

SEQ ID NO: 40158 - DNA, 1244 bp, Zea Mays
gtcctttttcatggccgcgttcgtgatccgttcgtgatccgctagatggatctacagtgcttcgcaaccctctaaaacgcgtatctgcgacgctttacgcgagcagggcgagctgttggactcagccttatctagtcaacgcatccactcacttcctttcgtcctcctgctctctgtgtgtgccacgcaagcgccctatccaccattagagtcgctcgttctacaacgacgtgctagctagccgatggctacgaccacgaaaccactcagatcgtccgctgctctgccgcacggggatgctggatcggatcgatccagtttaggagcattggaataacatatcttgtattcaagtgcaagtattgtaaggaacaatggaaggagggcggtgctactcgttttagacaataccttacatcacgtggacgaaatgtgcaaggttgtcgcaacgttccgtcggacgtttgcaattactttcgacgggagcttgacaagggacaatatagaagggaaagcaagaatactggaggaggtatgaaagttagcattggcgggttcacctcaatgatgacgatgttgagttgcaggtcgcattacatgctttaagagatgaggaggaacttaggaggcatgcttgcgcgagtagtggcacgtatgagagggtgatggctcctcccatgggggtgttcatggcatgtttggaagaacaccttttaggaaggagaaaccacgcatggtccgaccaaggattgataaggcctcgttttcgaaggcagtaaggaatgacgtccatttcattggtaagcctattggacccccgagtctggtagtgatagacaaggttcatcttcaccccttcttccctatatcaattatccaattggtgaagtgactcagtaacccatgaggtgggtgtatcaatgggaggagcctgagtactaaatattaatggactcatggagtacgacttctgcgtggaccagacagacttggacggagtacaaaggaatgttgatgtgtgagcaaggtattatattattctcatcggaagggtataatgtgacatatgatcaatggaatgcttacccgtgggcatgatgttcaccggagggtgtattgtatctttgatgctattcatgaactatgaaattgtggcattaatgtatttgcacttctaaatattgtgattggacttgtgataagatatggaccatttttgttgaatttttgtaatcataatggac

SEQ ID NO: 40159 - DNA, 938 bp, Zea Mays
ttttatgattttttgaataagacaaatagttaaagttagggttaaaaaagtcaaacaaattatattttgaatcgaagggagtacaatataaactctattttttttcaagatccacttctagagcggttaggcaaaaccgcgcgccatttggccagagcccaccgcccagccagcgaggaatcctgatttggagcactggacgggacgcgttgccattagctgtcgcgtcagttacgttttgcttgccctgttctcgttcggccttgacaacccggaaatcctccagccctctagtccccaacgacgcaggaagcaggatcgagccgaatcctccggaactcgccgccggggccaaccgacctcacactattgatcgaggatgtcgtacgcctacctcttcaagtacatcatcatcggcgacacaggcgtggggaagtcatgcctgctgctgcagttcaccatcggcgttgaatttggcgcccgcatgatcaccatcgacaacaagcccatcaaactccagatttgggacacggctggccaagaatcattcagatctattactaggtcatactacagaggagctgctggagcccttttggtttatgatatcactaggagggagaccttcaatcatctcgcaagttggctagaagatgccaggcaacatgcaaatgctaacatgacagtgatgctgattggaaacaaatgtgacctttctcataggcgtgctgtcagctatgaggaaggcgaacagtttgccaaggagcatggtctggtttttatggaggcatctgctaaaactgcacaaaacgtcgaggaggcattcattaagaccgctggtacaatatacaagaaaatccaagatggcatatttgatgtatcaaatgagttcgggatggagggagtgcatgtcttccgtatgaattgtccaggggcag

SEQ ID NO: 40160 - DNA, 2822 bp, Zea Mays
tcttgtatcacacacagacacagctcagcagcagcagtatcgccccgccacccggtgcttttgtctctctctcgctgggtcttaaaaatccaacgccaacgcggccgccggatgcgcattgcccccctcctccctgtctcgtctcctcgtcgtggccacctcttcctctgctcccccttccaggggtcgttcttggagccccagttcctcgagctgcgtccgccggtggtcgcgtaggtggcggatgcccgcaatggggaggagcagccgcgcctgctcccttcttggttcaactcacctgctcctcctgctgctgctctcggtcggctccgccgtcgcccagaatggctctacctggaagaccctgagcggcaaggctccagcagtcgttgctaagggcgggttctccggactatttcccgattccagtgactatgcttatcagtttgttggcatatctagttcccctgacaccaccgtgtggtgtgatgttcggctgacgaaggatggtgctggtatctgcctaccgagcataaacatggataactgcacaataatagccagtgttttcccacaagggaagaagacctacaaggttaatggtgtatctacagcgggctggttctccgtagactatacaagcactgttctgctgcaaaacgtatctttgaagcaatcggtcctatctcgtacccctgcatatgatggtttgttccaaataaatcctgttgaaaatattttcaccttatataaggcacctgctgtttggttaaatgtccagcacgacagtttctacagccagtttaagcttagcatgagaagctatatcctgtccttatcgaaacaattcattgtcgattacatctcatcgcctgaagtgaacttcctcaccagtatatctggaagagttagcaagaagacaaagcttgtgttccgatttctcgacgaacgctctattgagccatcaacaaaccagacatatggctcaatgctgaaaaatctgacatttgtcaagacttttgcctctggaatacttgttcccaaaagctatatctggcctgttacaccagataattacctgctgccttatacttcagtggttgatgatgctcacaaagcaggactagaaatctatgctgctgattttgcaaatgacttaaccatcagctataactacagctttgatccattagcggaatatcttttcttcattgataacggtgccttctctgttgatggtgtattgactgatttcccgattactccttcagaggcagttggttgctttagtaacctgaacaccagcaagattgatcatgctaaacctctagttatctcgcataatggtgctagtggtgactacccagactgcactgaccaagcttatgaaaaggcagttgccgatggtgcggatgtcattgactgtcctgttcaagtgactaaagatggcatactgatatgcatgagctctgttgacctaatggatgttactactgttgcaaaatcacaatttgcttcgcaagtaactaccatcaacagtctgaaggctgggtctggagtcttcaccttcaaccttacttgggatgatatttctaagaacctaaagccatgctgcattcatggcagaggagcttgggtttggtgtggtagatgcagtgatcaaagcacttgatgactctggttatagcaaacagactgcccagaatgttatgattcagtcaaccaacagctcagttctggtgaagttcaagcaggaaaccaagtacaaccttgtctacatgatcgaagaaagtgtccgagatgccgcaccttcctcccttgcggacattaagaagtttgctgatgctgtttctgttggcaccacatctgttttcccggaaacccattactatttgacaaaccagaccaataagcttgttccgacccttaagtctgccggcctccaagtttacgtttacgtgctcatgaatgagtttgcttcccagccaaatgacttcttcgcagacgccacttcacagatcaatgcttatgtgcaaagtgctaaggtggatggtgtcatcactgatttccctgggactgctcacagatacaaactgaactcctgcacgagcatgggaaagaacatgccactattcatgcagcctccgcaaccaggtggcctcctttcaaccattctcccagatgcacagccaccagcagcagcgccaatgccgctcttgacggacgctgacgtcgcagaaccagcccttcctccggtcagcaacaccaccacggctgcatcgccttcgcatgccgccctcagaatgcgaacccatgtcttgagcatcgccacattgctgatgctatgtgcttccctcctcatctgaagatagtcctgctcaacatcatacgcggcgtggcgcattagagctgaggattttcacattgagctgctaatagcaattctttccaccacctttatgtagctatttttttcttgttctgtccggtgttttggaggatggatggatgttcagcttgatacctcaaaggtggcacttgagcgtgctgccagctgtctctaggtacattttggtacatacgtgtggtgatacattgtccatgtcaccgtttctactgccaacctgcctgtggagggcaaaatattccctacaaacatacagtttagggtctgtcttggatacacctcaatcctgtcagggtgttctatgatttggtaagaggctgtctccaatagatctacatatagttatgcaaaatactattttgtattgtagattattgtttacagagtgaagtttggaatagaaaacacgataata

SEQ ID NO: 40161 - DNA, 2783 bp, Zea Mays
aaccattagctgctggtgtctactgttcatgggctgcgtatgacccatatgggcgtattgctattttgagaacgggatgggagtggatcagttcgatggatgttaattcgggcggtgttttgagttaaccccggtaataagagacgataatttcagatggtcatgcgtgcttacgagttttatgtccgtccggcaaggctccagcagtcgttgctaagggcgggttctccggactatttcccgattccagtgactatgcttatcagtttgttggcatatctagttcccctgacaccaccgtgtggtgtgatgttcggctgacgaaggatggtgctggtatctgcctaccgagcataaacatggataactgcacaataatagccagtgttttcccacaagggaagaagacctacaaggttaatggtgtatctacagcgggctggttctccgtagactatacaagcactgttctgctgcaaaacgtatctttgaagcaatcggtcctatctcgtacccctgcatatgatggtttgttccaaataaatcctgttgaaaatattttcaccttatataaggcacctgctgtttggttaaatgtccagcacgacagtttctacagccagtttaagcttagcatgagaagctatatcctgtccttatcgaaacaattcattgtcgattacatctcatcgcctgaagtgaacttcctcaccagtatatctggaagagttagcaagaagacaaagcttgtgttccgatttctcgacgaacgctctattgagccatcaacaaaccagacatatggctcaatgctgaaaaatctgacatttgtcaagacttttgcctctggaatacttgttcccaaaagctatatctggcctgttacaccagataattacctgctgccttatacttcagtggttgatgatgctcacaaagcaggactagaaatctatgctgctgattttgcaaatgacttaaccatcagctataactacagctttgatccattagcggaatatcttttcttcattgataacggtgccttctctgttgatggtgtattgactgatttcccgattactccttcagaggcagttggttgctttagtaacctgaacaccagcaagattgatcatgctaaacctctagttatctcgcataatggtgctagtggtgactacccagactgcactgaccaagcttatgaaaaggcagttgccgatggtgcggatgtcattgactgtcctgttcaagtgactaaagatggcatactgatatgcatgagctctgttgacctaatggatgttactactgttgcaaaatcacaatttgcttcgcaagtaactaccatcaacagtctgaaggctgggtctggagtcttcaccttcaaccttacttgggatgatatttctaagaacctaaagcccatgatatcgaacccaatgagcacctataatctgtacagaaatcctagaaacaagaacgcaggaaacttcatgagattgtcagactttttgacctttgcaaacggaaaggatttgtcaggaatcatgataactgttgagcatgctgcattcatggcagaggagcttgggtttggtgtggtagatgcagtgatcaaagcacttgatgactctggttatagcaaacagactgcccagaatgttatgattcagtcaaccaacagctcagttctggtgaagttcaagcaggaaaccaagtacaaccttgtctacatgatcgaagaaagtgtccgagatgccgcaccttcctcccttgcggacattaagaagtttgctgatgctgtttctgttggcaccacatctgttttcccggaaacccattactatttgacaaaccagaccaataagcttgttccgacccttaagtctgccggcctccaagtttacgtttacgtgctcatgaatgagtttgcttcccagccaaatgacttcttcgcagacgccacttcacagatcaatgcttatgtgcaaagtgctaaggtggatggtgtcatcactgatttccctgggactgctcacagatacaaactgaactcctgcacgagcatgggaaagaacatgccactattcatgcagcctccgcaaccaggtggcctcctttcaaccattctcccagatgcacagccaccagcagcagcgccaatgccgctcttgacggacgctgacgtcgcagaaccagcccttcctccggtcagcaacaccaccacggctgcatcgccttcgcatgccgccctcagaatgcgaacccatgtcttgagcatcgccacattgctgatgctatgtgcttccctcctcatctgaagatagtcctgctcaacatcatacgcggcgtggcgcattagagctgaggattttcacattgagctgctaatagcaattctttccaccacctttatgtagctatttttttcttgttctgtccggtgttttggaggatggatggatgttcagcttgatacctcaaaggtggcacttgagcgtgctgccagctgtctctaggtacattttggtacatacgtgtggtgatacattgtccatgtcaccgtttctactgccaacctgcctgtggagggcaaaatattccctacaaacatacagtttagggtctgtcttggatacacctcaatcctgtcagggtgttctatgatttggtaagaggctgtctccaatagatctacatatagttatgcaaaatactattttgtattgtagattattgtttacagagtgaagtttggaatagaaaacacgataata

SEQ ID NO: 40162 - DNA, 1087 bp, Zea Mays
acctgtaagccgccgcacagatatatatgccgtgaccaaaccgtcgcttccatttttcgcccgccgcccccagtcccgatccgaagctgtgcctcgtaccatttcgatccaatggcgccgacgtcgaagctgtcgacgggcatcaagcgcgcttcgcggtcgcacgcgtaccatcgccgtgggctgtgggccatcaaggccaagaacggcggcgccttccccaaggccgacaaggccgccgccgccgtggaacccaagttctaccctgccgacgacgtcaagccccgcgttcccagcacccgcaagcctaagcctaccaagctcaggtcgagcatcacgcctgggacggtgctgatcctcctcgcagggcgcttcatggggaagagagtggtgtttctcaagcagctcaagtccggcctgctccttatctctgggcctttcaagatcaatggagtaccgatccgccgtgtgaaccagacctatgtcattgctacatcaaccaaagttgacatctctggtgttgatgtcgccaagtttgatgacaagtactttgccagggagaagaagcagaaggtgaagaagaccgagggcgaactttttgagacagaaaaggagtcactgcctgacttcaagaaggatgaccagaaggctgtggattctgctctgatcaaggctattgaggctgttccggagctgaaaacctatcttggcgcccggttctctctcagggatggtgacaagccccatgagatggtcttctaagctcttagttttggagttcggaggaagctgttttgtctgtgttcttgtacttctgagttttgtaccagtagcgaatgtttcattgtggttgaagtcttcctgccaaatattataagatctaagaaagttctatccgtgttggtggttcagcattgcactatctgcatttggttccttaggtagtccatggtatcttgaggtcccattttgtttgaattgctgactgtccggtgtttttgctgttggtttggaataaacttggcatgtcgcttgccaaaactggaataaacttgacatgcatcgtacaaatgagtcaatagcatgg

SEQ ID NO: 40163 - DNA, 1066 bp, Zea Mays
acctgtaagccgccgcacagatatatatgccgtgaccaaaccgtcgcttccatttttcgcccgccgcccccagtcccgatccgaagctgtgcctcgtaccatttcgatccaatggcgccgacgtcgaagctgtcgacgggcatcaagcgcgcttcgcggtcgcacgcgtaccatcgccgtgggctgtgggccatcaaggccaagaacggcggcgccttccccaaggccgacaaggccgccgccgccgtggaacccaagttctaccctgccgacgacgtcaagccccgcgttcccagcacccgcaagcctaagcctaccaagctcaggtcgagcatcacgcctgggacggtgctgatcctcctcgcagggcgcttcatggggaagagagtggtgtttctcaagcagctcaagtccggcctgctccttatctctgggcctttcaagatcaatggagtaccgatccgccgtgtgaaccagacctatgtcattgctacatcaaccaaagttgacatctctggtgttgatgtcgccaagtttgatgacaagtactttgccagggagaagaagcagaaggtgaagaagaccgagggcgaactttttgagacagaaaaggaggatgaccagaaggctgtggattctgctctgatcaaggctattgaggctgttccggagctgaaaacctatcttggcgcccggttctctctcagggatggtgacaagccccatgagatggtcttctaagctcttagttttggagttcggaggaagctgttttgtctgtgttcttgtacttctgagttttgtaccagtagcgaatgtttcattgtggttgaagtcttcctgccaaatattataagatctaagaaagttctatccgtgttggtggttcagcattgcactatctgcatttggttccttaggtagtccatggtatcttgaggtcccattttgtttgaattgctgactgtccggtgtttttgctgttggtttggaataaacttggcatgtcgcttgccaaaactggaataaacttgacatgcatcgtacaaatgagtcaatagcatgg

SEQ ID NO: 40164 - DNA, 2570 bp, Zea Mays
ggccacaccccaaccagggccaccacccacgaccaggccaccacttcgccatcgccacggctccacccacgtctcggcttttgcttgcttgcttcctcctctcccgtcgggcactcgggctcgtcagactgcgcccgggcgccgaatctccagacgggatcgcgccccccatctgacgccaccggcgccggagcccacggcgaccgcgcgcctctgcctccgatctaaaagaaacattggagaaccgtactgaacaaaataagtactggtatttcatcatttgtctcggtattccaataatgtggaaactcaatccctttggagaatcgcttgatcttgtcatgaaggagatccaggttatgaacctcctcaaagggcatcctaatgtggtcacacttgttgcccatgatgtttttgacatgggtcgtacaaaagaggcacttcttgtaatggagttctgtgagaagtctttggttagtgcaatggagagcagaggtagtggttactatgaggagaagaaggtgcttttgattttcagagatgtctgcaatgctgtctttgctatgcatggacaatcaccgccaattgcacatagggatctgaaagctgaaaatgttcttcttggttgtgacggtgtatggaaaatatgtgattttggaagcacatcaactaatcacaaatgctttaacaaaccagaagagatgggcattgaggaagatgtcatcaggaagcatacaaccccagcctacaggcccccagagatgtgggatctctacagaagagaagttattagcgaaaaagttgacatttgggctttggggtgccttctatatagaatatgctacttcaagtctgcatttgatggagaatccaagttgcagatactcaatggcaattatcgtatccctgagcaacccaagtatagcactgctgtcacagggttgatcaaagatatgctggaagcctctccaaattcccgaccagacatcacacaggcaagagtttgattgattggccattcatctccatggtactaggtctggtttcgtgttaatgagctactgccgcttgagttacaaaaaagtttacctgacggaccttcgccagccgtttccttgagtttgcaagatgaaggtgctcataaaagggcacatgtgatgcctagaaggaaccctcctccacctccaagagagcaatctaatagttctctatcgcatggaagctcaaaggcaggagatgcacccttaggtgcattttgggcaacacagcatgcacaaggtgctcaagctgcagataataggaatcctttgtttgacgaggagccaagtaaggtatcattgtcatcaaagcagaaccaaagtcgggtggacaccagcatcagtattcctggtgataggcatggtcattctggtcagacgtcacgaataagcaaaacaccgaataactccttgtccaatgatggtttcagaggtgtctctgacacggagatacataattctgtgaaaactaaagtgcaacaacctcaacccaagccaaaatgtgataaagatccattcaacatctttgttgcagattttgacactcacaatctcaacattgccgttggtaaggcatccgaacttgaacttgaagtgtccagtctgaaggagcagttgaagaaaaccacattagaaaaggctgagatgacagccaagtatgaaaagttatctgcaatctgccgatcacagcgtcaggagatccaagagctgaagcgcacccttgctgaggcaacgcctccctcaaacaaagtcagctcaaggacacaagactctggatctcagcgaaaggaaaagatccaaggaaccttgtgggagcttgaacaagggatgcttgctagcaatacctcatcagccagttctgacgtcaaaacatggcaggctttccctgatacacagactcaggcccgaccaaaggtcgatcatggaactaacggaagccaaaacataaccaagaacacaacatcaggtgcttcccccgacgcgtggggttttggtactgatagtttcagaacatcgtcagcaccagtaaaggctgctacacagatcaacagggctgcccaagggagctcatcccaaagatttaattctggtgtggccaagaaggtagagcaaccatctggatgggctggtttttaactccacatcgacatgcgttaaccatcattctggtcaaaatttgcaatctgcgttacgcaacagttgccgacggagttgtgatccttggccggcccctgggcgtcaaaatcggttatcttgagcgtgttcatcattttggttgaaccaacttagacattggttcatgggatcactttacccgttaataagtaaatgtgtattgacagtattgtgagtgtttctgtgtatggtgattatgaacatgaacggatgaatgtaatgtctaaatgccaagatataccgtctcataacaaagacttgagccttctgagctcaaaacagagagctagtcatatttgtcttttttggaaccagtccattttaaccattatcattgacgcccaattttattccttg

SEQ ID NO: 40165 - DNA, 2547 bp, Zea Mays
ggccacaccccaaccagggccaccacccacgaccaggccaccacttcgccatcgccacggctccacccacgtctcggcttttgcttgcttgcttcctcctctcccgtcgggcactcgggctcgtcagactgcgcccgggcgccgaatctccagacgggatcgcgccccccatctgacgccaccggcgccggagcccacggcgaccgcgcgcctctgcctccgatctaaaagaaacattggagaaccgtactgaacaaaataagtactggtatttcatcatttgtctcggtattccaataatgtggaaactcaatccctttggaggagatccaggttatgaacctcctcaaagggcatcctaatgtggtcacacttgttgcccatgatgtttttgacatgggtcgtacaaaagaggcacttcttgtaatggagttctgtgagaagtctttggttagtgcaatggagagcagaggtagtggttactatgaggagaagaaggtgcttttgattttcagagatgtctgcaatgctgtctttgctatgcatggacaatcaccgccaattgcacatagggatctgaaagctgaaaatgttcttcttggttgtgacggtgtatggaaaatatgtgattttggaagcacatcaactaatcacaaatgctttaacaaaccagaagagatgggcattgaggaagatgtcatcaggaagcatacaaccccagcctacaggcccccagagatgtgggatctctacagaagagaagttattagcgaaaaagttgacatttgggctttggggtgccttctatatagaatatgctacttcaagtctgcatttgatggagaatccaagttgcagatactcaatggcaattatcgtatccctgagcaacccaagtatagcactgctgtcacagggttgatcaaagatatgctggaagcctctccaaattcccgaccagacatcacacaggcaagagtttgattgattggccattcatctccatggtactaggtctggtttcgtgttaatgagctactgccgcttgagttacaaaaaagtttacctgacggaccttcgccagccgtttccttgagtttgcaagatgaaggtgctcataaaagggcacatgtgatgcctagaaggaaccctcctccacctccaagagagcaatctaatagttctctatcgcatggaagctcaaaggcaggagatgcacccttaggtgcattttgggcaacacagcatgcacaaggtgctcaagctgcagataataggaatcctttgtttgacgaggagccaagtaaggtatcattgtcatcaaagcagaaccaaagtcgggtggacaccagcatcagtattcctggtgataggcatggtcattctggtcagacgtcacgaataagcaaaacaccgaataactccttgtccaatgatggtttcagaggtgtctctgacacggagatacataattctgtgaaaactaaagtgcaacaacctcaacccaagccaaaatgtgataaagatccattcaacatctttgttgcagattttgacactcacaatctcaacattgccgttggtaaggcatccgaacttgaacttgaagtgtccagtctgaaggagcagttgaagaaaaccacattagaaaaggctgagatgacagccaagtatgaaaagttatctgcaatctgccgatcacagcgtcaggagatccaagagctgaagcgcacccttgctgaggcaacgcctccctcaaacaaagtcagctcaaggacacaagactctggatctcagcgaaaggaaaagatccaaggaaccttgtgggagcttgaacaagggatgcttgctagcaatacctcatcagccagttctgacgtcaaaacatggcaggctttccctgatacacagactcaggcccgaccaaaggtcgatcatggaactaacggaagccaaaacataaccaagaacacaacatcaggtgcttcccccgacgcgtggggttttggtactgatagtttcagaacatcgtcagcaccagtaaaggctgctacacagatcaacagggctgcccaagggagctcatcccaaagatttaattctggtgtggccaagaaggtagagcaaccatctggatgggctggtttttaactccacatcgacatgcgttaaccatcattctggtcaaaatttgcaatctgcgttacgcaacagttgccgacggagttgtgatccttggccggcccctgggcgtcaaaatcggttatcttgagcgtgttcatcattttggttgaaccaacttagacattggttcatgggatcactttacccgttaataagtaaatgtgtattgacagtattgtgagtgtttctgtgtatggtgattatgaacatgaacggatgaatgtaatgtctaaatgccaagatataccgtctcataacaaagacttgagccttctgagctcaaaacagagagctagtcatatttgtcttttttggaaccagtccattttaaccattatcattgacgcccaattttattccttg

SEQ ID NO: 40166 - DNA, 2589 bp, Zea Mays
cacaccccaaccagggccaccacccacgaccaggccaccacttcgccatcgccacggctccacccacgtctcggcttttgcttgcttgcttcctcctctcccgtcgggcactcgggctcgtcagactgcgcccgggcgccgaatctccagacgggatcgcgccccccatctgacgccaccggcgccggagcccacggcgaccgcgcgcctctgcctccgatctaaaagaaacattggagaaccgtactgaacaaaataagtactggtatttcatcatttgtctcggtattccaataatgtggaaactcaatccctttggaggtaaagcacagagtgggttggatggtcgtactattgatgttggaaatttgaagatcacagtacaaaatgccattgcacaaggaggtttctcttgtgtatatctggcatgtgacacagtacatccatcaaagatgtatgcactaaagcacattatttgcaatgactcagaatcgcttgatcttgtcatgaaggagatccaggttatgaacctcctcaaagggcatcctaatgtggtcacacttgttgcccatgatgtttttgacatgggtcgtacaaaagaggcacttcttgtaatggagttctgtgagaagtctttggttagtgcaatggagagcagaggtagtggttactatgaggagaagaaggtgcttttgattttcagagatgtctgcaatgctgtctttgctatgcatggacaatcaccgccaattgcacatagagatgggcattgaggaagatgtcatcaggaagcatacaaccccagcctacaggcccccagagatgtgggatctctacagaagagaagttattagcgaaaaagttgacatttgggctttggggtgccttctatatagaatatgctacttcaagtctgcatttgatggagaatccaagttgcagatactcaatggcaattatcgtatccctgagcaacccaagtatagcactgctgtcacagggttgatcaaagatatgctggaagcctctccaaattcccgaccagacatcacacaggtctggtttcgtgttaatgagctactgccgcttgagttacaaaaaagtttacctgacggaccttcgccagccgtttccttgagtttgcaagatgaaggtgctcataaaagggcacatgtgatgcctagaaggaaccctcctccacctccaagagagcaatctaatagttctctatcgcatggaagctcaaaggcaggagatgcacccttaggtgcattttgggcaacacagcatgcacaaggtgctcaagctgcagataataggaatcctttgtttgacgaggagccaagtaaggtatcattgtcatcaaagcagaaccaaagtcgggtggacaccagcatcagtattcctggtgataggcatggtcattctggtcagacgtcacgaataagcaaaacaccgaataactccttgtccaatgatggtttcagaggtgtctctgacacggagatacataattctgtgaaaactaaagtgcaacaacctcaacccaagccaaaatgtgataaagatccattcaacatctttgttgcagattttgacactcacaatctcaacattgccgttggtaaggcatccgaacttgaacttgaagtgtccagtctgaaggagcagttgaagaaaaccacattagaaaaggctgagatgacagccaagtatgaaaagttatctgcaatctgccgatcacagcgtcaggagatccaagagctgaagcgcacccttgctgaggcaacgcctccctcaaacaaagtcagctcaaggacacaagactctggatctcagcgaaaggaaaagatccaaggaaccttgtgggagcttgaacaagggatgcttgctagcaatacctcatcagccagttctgacgtcaaaacatggcaggctttccctgatacacagactcaggcccgaccaaaggtcgatcatggaactaacggaagccaaaacataaccaagaacacaacatcaggtgcttcccccgacgcgtggggttttggtactgatagtttcagaacatcgtcagcaccagtaaaggctgctacacagatcaacagggctgcccaagggagctcatcccaaagatttaattctggtgtggccaagaaggtagagcaaccatctggatgggctggtttttaactccacatcgacatgcgttaaccatcattctggtcaaaatttgcaatctgcgttacgcaacagttgccgacggagttgtgatccttggccggcccctgggcgtcaaaatcggttatcttgagcgtgttcatcattttggttgaaccaacttagacattggttcatgggatcactttacccgttaataagtaaatgtgtattgacagtattgtgagtgtttctgtgtatggtgattatgaacatgaacggatgaatgtaatgtctaaatgccaagatataccgtctcataacaaagacttgagccttctgagctcaaaacagagagctagtcatatttgtcttttttggaaccagtccattttaaccattatcattgacgcccaattttattccttg

SEQ ID NO: 40167 - DNA, 2402 bp, Zea Mays
cccacgaccaggccaccacttcgccatcgccacggctccacccacgtctcggcttttgcttgcttgcttcctcctctcccgtcgggcactcgggctcgtcagactgcgcccgggcgccgaatctccagacgggatcgcgccccccatctgacgccaccggcgccggagcccacggcgaccgcgcgcctctgcctccgatctaaaagaaacattggagaaccgtactgaacaaaataagtactggtatttcatcatttgtctcggtattccaataatgtggaaactcaatccctttggagaatcgcttgatcttgtcatgaaggagatccaggttatgaacctcctcaaagggcatcctaatgtggtcacacttgttgcccatgatgtttttgacatgggtcgtacaaaagaggcacttcttgtaatggagttctgtgagaagtctttggttagtgcaatggagagcagaggtagtggttactatgaggagaagaaggtgcttttgattttcagagatgtctgcaatgctgtctttgctatgcatggacaatcaccgccaattgcacatagaagagatgggcattgaggaagatgtcatcaggaagcatacaaccccagcctacaggcccccagagatgtgggatctctacagaagagaagttattagcgaaaaagttgacatttgggctttggggtgccttctatatagaatatgctacttcaagtctgcatttgatggagaatccaagttgcagatactcaatggcaattatcgtatccctgagcaacccaagtatagcactgctgtcacagggttgatcaaagatatgctggaagcctctccaaattcccgaccagacatcacacaggtctggtttcgtgttaatgagctactgccgcttgagttacaaaaaagtttacctgacggaccttcgccagccgtttccttgagtttgcaagatgaaggtgctcataaaagggcacatgtgatgcctagaaggaaccctcctccacctccaagagagcaatctaatagttctctatcgcatggaagctcaaaggcaggagatgcacccttaggtgcattttgggcaacacagcatgcacaaggtgctcaagctgcagataataggaatcctttgtttgacgaggagccaagtaaggtatcattgtcatcaaagcagaaccaaagtcgggtggacaccagcatcagtattcctggtgataggcatggtcattctggtcagacgtcacgaataagcaaaacaccgaataactccttgtccaatgatggtttcagaggtgtctctgacacggagatacataattctgtgaaaactaaagtgcaacaacctcaacccaagccaaaatgtgataaagatccattcaacatctttgttgcagattttgacactcacaatctcaacattgccgttggtaaggcatccgaacttgaacttgaagtgtccagtctgaaggagcagttgaagaaaaccacattagaaaaggctgagatgacagccaagtatgaaaagttatctgcaatctgccgatcacagcgtcaggagatccaagagctgaagcgcacccttgctgaggcaacgcctccctcaaacaaagtcagctcaaggacacaagactctggatctcagcgaaaggaaaagatccaaggaaccttgtgggagcttgaacaagggatgcttgctagcaatacctcatcagccagttctgacgtcaaaacatggcaggctttccctgatacacagactcaggcccgaccaaaggtcgatcatggaactaacggaagccaaaacataaccaagaacacaacatcaggtgcttcccccgacgcgtggggttttggtactgatagtttcagaacatcgtcagcaccagtaaaggctgctacacagatcaacagggctgcccaagggagctcatcccaaagatttaattctggtgtggccaagaaggtagagcaaccatctggatgggctggtttttaactccacatcgacatgcgttaaccatcattctggtcaaaatttgcaatctgcgttacgcaacagttgccgacggagttgtgatccttggccggcccctgggcgtcaaaatcggttatcttgagcgtgttcatcattttggttgaaccaacttagacattggttcatgggatcactttacccgttaataagtaaatgtgtattgacagtattgtgagtgtttctgtgtatggtgattatgaacatgaacggatgaatgtaatgtctaaatgccaagatataccgtctcataacaaagacttgagccttctgagctcaaaacagagagctagtcatatttgtcttttttggaaccagtccattttaaccattatcattgacgcccaattttattccttg

SEQ ID NO: 40168 - DNA, 2618 bp, Zea Mays
gccttcttaccgagattcggcgagcttcagtagcaaggaacgagggacatcggggcagtggttagattggcttgcctgggagggatcggagccggacctgcattttgcgtgaaacattggagaaccgtactgaacaaaataagtactggtatttcatcatttgtctcggtattccaataatgtggaaactcaatccctttggaggtaaagcacagagtgggttggatggtcgtactattgatgttggaaatttgaagatcacagtacaaaatgccattgcacaaggaggtttctcttgtgtatatctggcatgtgacacagtacatccatcaaagatgtatgcactaaagcacattatttgcaatgactcagaatcgcttgatcttgtcatgaaggagatccaggttatgaacctcctcaaagggcatcctaatgtggtcacacttgttgcccatgatgtttttgacatgggtcgtacaaaagaggcacttcttgtaatggagttctgtgagaagtctttggttagtgcaatggagagcagaggtagtggttactatgaggagaagaaggtgcttttgattttcagagatgtctgcaatgctgtctttgctatgcatggacaatcaccgccaattgcacatagggatctgaaagctgaaaatgttcttcttggttgtgacggtgtatggaaaatatgtgattttggaagcacatcaactaatcacaaatgctttaacaaaccagaagagatgggcattgaggaagatgtcatcaggaagcatacaaccccagcctacaggcccccagagatgtgggatctctacagaagagaagttattagcgaaaaagttgacatttgggctttggggtgccttctatatagaatatgctacttcaagtctgcatttgatggagaatccaagttgcagatactcaatggcaattatcgtatccctgagcaacccaagtatagcactgctgtcacagggttgatcaaagatatgctggaagcctctccaaattcccgaccagacatcacacaggcaagagtttgattgattggccattcatctccatggtactaggtctggtttcgtgttaatgagctactgccgcttgagttacaaaaaagtttacctgacggaccttcgccagccgtttccttgagtttgcaagatgaaggtgctcataaaagggcacatgtgatgcctagaaggaaccctcctccacctccaagagagcaatctaatagttctctatcgcatggaagctcaaaggcaggagatgcacccttaggtgcattttgggcaacacagcatgcacaaggtgctcaagctgcagataataggaatcctttgtttgacgaggagccaagtaaggtatcattgtcatcaaagcagaaccaaagtcgggtggacaccagcatcagtattcctggtgataggcatggtcattctggtcagacgtcacgaataagcaaaacaccgaataactccttgtccaatgatggtttcagaggtgtctctgacacggagatacataattctgtgaaaactaaagtgcaacaacctcaacccaagccaaaatgtgataaagatccattcaacatctttgttgcagattttgacactcacaatctcaacattgccgttggtaaggcatccgaacttgaacttgaagtgtccagtctgaaggagcagttgaagaaaaccacattagaaaaggctgagatgacagccaagtatgaaaagttatctgcaatctgccgatcacagcgtcaggagatccaagagctgaagcgcacccttgctgaggcaacgcctccctcaaacaaagtcagctcaaggacacaagactctggatctcagcgaaaggaaaagatccaaggaaccttgtgggagcttgaacaagggatgcttgctagcaatacctcatcagccagttctgacgtcaaaacatggcaggctttccctgatacacagactcaggcccgaccaaaggtcgatcatggaactaacggaagccaaaacataaccaagaacacaacatcaggtgcttcccccgacgcgtggggttttggtactgatagtttcagaacatcgtcagcaccagtaaaggctgctacacagatcaacagggctgcccaagggagctcatcccaaagatttaattctggtgtggccaagaaggtagagcaaccatctggatgggctggtttttaactccacatcgacatgcgttaaccatcattctggtcaaaatttgcaatctgcgttacgcaacagttgccgacggagttgtgatccttggccggcccctgggcgtcaaaatcggttatcttgagcgtgttcatcattttggttgaaccaacttagacattggttcatgggatcactttacccgttaataagtaaatgtgtattgacagtattgtgagtgtttctgtgtatggtgattatgaacatgaacggatgaatgtaatgtctaaatgccaagatataccgtctcataacaaagacttgagccttctgagctcaaaacagagagctagtcatatttgtcttttttggaaccagtccattttaaccattatcattgacgcccaattttattccttg

SEQ ID NO: 40169 - DNA, 1997 bp, Zea Mays
  misc_feature (1996)..(1997): n is a, c, g, or t
attttctgaaaataggacttaaaaacaaaaaattcggcccagttgggagttgcccacccagttccgaacttcgaacacgacgttctccctcaccccaccctccaggctccgagctccaaaaccctagctatgcagaaacagacgggcaagtccggcgggaccggtgggggcacgccggcgaagcgcggccgcccgtttgggagcaccaccggcggaggggccgctgctgctgccgcggcggcggcggtcgttgacccgggtgcacccgccgctctggtcgggccgtccctccaagtcctatcagccctgtcagatcagaacaacaaaagaattgtccttgcattgcaaagtgggttgaagtcagagatactgtgggcactgaatgcccttacagtactctcatttaaggagaaggatgacctccgacgtgatgcaacacctcttgctaaagttcctgggctcctagatgctcttcttcaagttattgatgaatggagcgatatttcaatgcctaaggaccatacgaaaccacccagactaagaactttgggtgccaacacaacactctcgggctttggccaggagaatatggaaaaatacctctaatgaccaatccaaggcggaagattccagtgtcacaaagaagcgcgctgcaagcttttggtttgatgaggatgggttgtttaacaacgatgatgaagggagggcggaaaggcagcagtgtgctattgcagcctccaatataatccgcaatttctcttttatgccagaaaatgagattatcatggttcaacataggcattgcttggaaactatatttcattgcttagaaaaccagaatagaggtaaatattgaaatattgtcctgcgtctttgtttttttagtttatagattaacttggtgatggtcaaatgaggctatgtgaatgtgtttggcacttcaaatgtgctgtagtttatgggttgtccaattattacctgcatatgcagcaagcagcatctatgttgtttattactctgcgaaaaatccccacaaggtaacttccccttggctctgtcttcggtgccgtttgaatcccaaggtattctgcgaattcggataaaaagaaatcctaacagttttattggatttcgagattcaaaaaatctgagttaaaatccctctaaaaactaggctgtttcgatgagatactggaattatgggattttctatccataatttcaaaatctagaggaatcaaatagggccttatggtgacactgtgccagacccttaagggaggtacatacatgacctgtgactgtcgaaacctgggtggacagcctctcaactggaggttccgcaaccgagctattgctcagtctccacaagctttggaaagaaactggcgatttaatgttcccattttaactttgtgtttggtctaactctgcaaaaatatggatgatgtgaagtttatatatttttttggtatgtttgtactcctattcgactatctatctgctgccaacttgagtgagctatgtatcctggggctatgtgacatgtcatggcagttcaaatctagccatttttctggcagactttaatacataattgggaactcatgttctactggtatttgtcattgaacagaagatgatgagctcataacaaacatgctggagacccttgtcaatttagcacctgtgctggacctgaggatcttcagctcatcgaagccttcgttcattaaaatgaccgagaaaggtgcaattcatgccataatgggtatgctttcttcttccgtaaagccatggcactgtgctgctgctgaattgattggccgtctgataataaatccagacaacgagccatttcttcttcctatcattccacaaatatacaaacgactcgttgacctattgagtgtaccagcatatgatgcacaggctgctgctgttagtgcactctacaatgtagccgaagtgaatatggattgcaggctcaagcttnn

SEQ ID NO: 40170 - DNA, 764 bp, Zea Mays
  misc_feature (763)..(764): n is a, c, g, or t
agccatgatcaaatacaggagattgatgaatggagcgatatttcaatgcctaaggaccatacgaaaccacccagactaagaactttgggtgccaacacaacactctcgggctttggccaggagaatatggaaaaagtatactctgacactgccactacctctaatgaccaatccaaggcggaagattccagtgtcacaaagaagcgcgctgcaagcttttggtttgatgaggatgggttgtttaacaacgatgatgaagggagggcggaaaggcagcagtgtgctattgcagcctccaatataatccgcaatttctcttttatgccagaaaatgagattatcatggttcaacataggcattgcttggaaactatatttcattgcttagaaaaccagaatagagaagatgatgagctcataacaaacatgctggagacccttgtcaatttagcacctgtgctggacctgaggatcttcagctcatcgaagccttcgttcattaaaatgaccgagaaaggtgcaattcatgccataatgggtatgctttcttcttccgtaaagccatggcactgtgctgctgctgaattgattggccgtctgataataaatccagacaacgagccatttcttcttcctatcattccacaaatatacaaacgactcgttgacctattgagtgtaccagcatatgatgcacaggctgctgctgttagtgcactctacaatgtagccgaagtgaatatggattgcaggctcaagcttnn

SEQ ID NO: 40171 - DNA, 745 bp, Zea Mays
  misc_feature (744)..(745): n is a, c, g, or t
aagagggttggcttatcctgagattgatgaatggagcgatatttcaatgcctaaggaccatacgaaaccacccagactaagaactttgggtgccaacacaacactctcgggctttggccaggagaatatggaaaaatacctctaatgaccaatccaaggcggaagattccagtgtcacaaagaagcgcgctgcaagcttttggtttgatgaggatgggttgtttaacaacgatgatgaagggagggcggaaaggcagcagtgtgctattgcagcctccaatataatccgcaatttctcttttatgccagaaaatgagattatcatggttcaacataggcattgcttggaaactatatttcattgcttagaaaaccagaatagagaagatgatgagctcataacaaacatgctggagacccttgtcaatttagcacctgtgctggacctgaggatcttcagctcatcgaagccttcgttcattaaaatgaccgagaaaggtgcaattcatgccataatgggtatgctttcttcttccgtaaagccatggcactgtgctgctgctgaattgattggccgtctgataataaatccagacaacgagccatttcttcttcctatcattccacaaatatacaaacgactcgttgacctattgagtgtaccagcatatgatgcacaggctgctgctgttagtgcactctacaatgtagccgaagtgaatatggattgcaggctcaagcttnn

SEQ ID NO: 40172 - DNA, 327 bp, Zea Mays
gattatattgaaacttggatacttacactaatttcacatgtaactcatacaaataagtgaaagtgaaaggaaagaaacgtggatatcttatagatcttatgatccaaacattttttatggttacatatggacatatgttgtatctccataaaatttcacgattttttgaggctatttatgtattattaatttcttgtcatagaaaatcatcaaaatacaattaaatcattaaaatattgtttaaacaaaaaattgatgtattacaaagtcatagatctcttcaagctctacaattttcatataaactttatcttcatccgatttcat

SEQ ID NO: 40173 - DNA, 2372 bp, Zea Mays
cctcaacacagtaatcaaacaaagccttacagacgcacgtaatcgtcgtgatgagcaatacttgttttgtattatgccattattttacatcgcgggtatttagcggtttctcacagacgttgtaaatatggccacaaattagtagcagcccactgcccaccgaggcagagtagaaaccccatcatgccgcatcacggcatcacgcgcgtgccttcctcgaccctcgctactgctactgtctcgtctcttgctcgcatcgtctggggaccgcggagcggcggcggcgtggcgcagcggcacggcagcctccccctcgctcctcctactccggctcttcccctctccccctcagccctacgcccctgcgcggctgcgtgacctgcgtccagccgcagcggctggtgcccatcggcggcaagtagcagagcagcagcagccgccggcggtcctcccctccccctcggcctcgctccggctctcccagtcccagctcgagctccgtactgaaggttgaagcaaggacccaaaacagattgccgccatcaaagatggaatctgggagcacgttctatggaggggaaggtctctccatcgaccccaagtggtttatcgacccgaagcttctctttgttgggccacgcatcggcgagggcgctcatgcaaaggtctatgaggggaagtataagaaccaaaatgttgctatcaagattgtgcacaaaggggacacccctgaggagatgaccaagagggaggggagattcttgagagaggtgaccatgctgtcaagggtgcagcacaagaacctcgtcaagtttattggggcctgcctagaacctgtcatggtggtcgtgacagagctactagtggggggttcgttgcgcaagtatttggtcagtctccgacctaggagccttgagcctcgtgtagcagtggggtttgcattggacattgcccgagctatggaatgcttacatgcacatgggatcattcatcgtgatcttaagcctgagaatctgttgctgactgcagaccagagaacagtaaaacttgttgatcttggtttggctagggaagagacactaacggagatgatgactgctgagacaggaacataccgttggatggctccagagttgtacagcacagtaacactgaggcatggagaaaagaagcattacaaccacaaagtagatgtctacagctttgcaattgtgttgtgggaactcctccacaataaactgcccttcgagggaatgtctaaccttcaagctgcctacgctgccgctttcaagaatatcagaccaagtgccgataacttgcccgaggagctgtcagaaatcctaacatcctgctggaaggaagacccaaacgacagaccaaacttcacacagataatacagatgctcctacactacctatccaccctttcgccacaagagaccttggcgggcccccgccgcacgttcagttcggagaacacaatcctgcccccagagtctcccgggacaagctcgctgatggcttcgcggggcgacctcggcgacacgcccaagggcaagaaggaagacaagccgaggggcttcttcttctgtttcagcgagtgctattagcacgagcccccccaaagggggaacactccgataagcttgcaaatactgaacgaacaccgtctctccccagctccgatgccctgcgactcaagccatgtccagccggtcaagtcccaggcatccatagtccgcaccctgaagaacggaagtgtagtcgaacactgttttgttttcttctgctaatcaaggtctcctgcatcgctgacatgctgatgacatataccagcagggtaaaacgacgggtaaaccttttgactccagatagtaatggtgggaatagcttacctcccctgtgttttctggcgcaccatggtgtaacggagttgctagagcgcgactatagattgccttcctgcctgcctgtctcgcccgacatcgtatagaaataaaaccaataattcgcatctgtcggtttgtctggttgcaaagggtaagctgccagtccttttgtgttcttgttctgccagttctttgtgttcttggcctggtcgtcttccgttgctgtacagctgcgttttgttgcagctgcaagatttgtgtagcaggggagactgttgcagctatgtgtatgcgttgcagcagcagcaataaggcaacacactactacaggggagggataaactgttcggtctctcctggcagcagttgcagctgcgggtaaaaaggccagccgaatcggggaaagggttccaaaagccaagccctgccctgatcggttgtcattgctgcaggggctgctgctcccacagacgcacagctgca

SEQ ID NO: 40174 - DNA, 2502 bp, Zea Mays
cctcaacacagtaatcaaacaaagccttacagacgcacgtaatcgtcgtgatgagcaatacttgttttgtattatgccattattttacatcgcgggtatttagcggtttctcacagacgttgtaaatatggccacaaattagtagcagcccactgcccaccgaggcagagtagaaaccccatcatgccgcatcacggcatcacgcgcgtgccttcctcgaccctcgctactgctactgtctcgtctcttgctcgcatcgtctggggaccgcggagcggcggcggcgtggcgcagcggcacggcagcctccccctcgctcctcctactccggctcttcccctctccccctcagccctacgcccctgcgcggctgcgtgacctgcgtccagccgcagcggctggtgcccatcggcggcaagtagcagagcagcagcagccgccggcggtcctcccctccccctcggcctcgctccggctctcccagtcccagctcgagctccgtactgaaggttgaagcaaggcctccatctttgagaccctcgcgggcgacgagctctagtcttctgttcctgctgtgcgagacggagcacccaaacccaagctatttatattcggatctgatctgatccaattacaagtgtagtttacacgacccaaaacagattgccgccatcaaagatggaatctgggagcacgttctatggaggggaaggtctctccatcgaccccaagtggtttatcgacccgaagcttctctttgttgggccacgcatcggcgagggcgctcatgcaaaggtctatgaggggaagtataagaaccaaaatgttgctatcaagattgtgcacaaaggggacacccctgaggagatgaccaagagggaggggagattcttgagagaggtgaccatgctgtcaagggtgcagcacaagaacctcgtcaagtttattggggcctgcctagaacctgtcatggtggtcgtgacagagctactagtggggggttcgttgcgcaagtatttggtcagtctccgacctaggagccttgagcctcgtgtagcagtggggtttgcattggacattgcccgagctatggaatgcttacatgcacatgggatcattcatcgtgatcttaagcctgagaatctgttgctgactgcagaccagagaacagtaaaacttgttgatcttggtttggctagggaagagacactaacggagatgatgactgctgagacaggaacataccgttggatggctccagagttgtacagcacagtaacactgaggcatggagaaaagaagcattacaaccacaaagtagatgtctacagctttgcaattgtgttgtgggaactcctccacaataaactgcccttcgagggaatgtctaaccttcaagctgcctacgctgccgctttcaagaatatcagaccaagtgccgataacttgcccgaggagctgtcagaaatcctaacatcctgctggaaggaagacccaaacgacagaccaaacttcacacagataatacagatgctcctacactacctatccaccctttcgccacaagagaccttggcgggcccccgccgcacgttcagttcggagaacacaatcctgcccccagagtctcccgggacaagctcgctgatggcttcgcggggcgacctcggcgacacgcccaagggcaagaaggaagacaagccgaggggcttcttcttctgtttcagcgagtgctattagcacgagcccccccaaagggggaacactccgataagcttgcaaatactgaacgaacaccgtctctccccagctccgatgccctgcgactcaagccatgtccagccggtcaagtcccaggcatccatagtccgcaccctgaagaacggaagtgtagtcgaacactgttttgttttcttctgctaatcaaggtctcctgcatcgctgacatgctgatgacatataccagcagggtaaaacgacgggtaaaccttttgactccagatagtaatggtgggaatagcttacctcccctgtgttttctggcgcaccatggtgtaacggagttgctagagcgcgactatagattgccttcctgcctgcctgtctcgcccgacatcgtatagaaataaaaccaataattcgcatctgtcggtttgtctggttgcaaagggtaagctgccagtccttttgtgttcttgttctgccagttctttgtgttcttggcctggtcgtcttccgttgctgtacagctgcgttttgttgcagctgcaagatttgtgtagcaggggagactgttgcagctatgtgtatgcgttgcagcagcagcaataaggcaacacactactacaggggagggataaactgttcggtctctcctggcagcagttgcagctgcgggtaaaaaggccagccgaatcggggaaagggttccaaaagccaagccctgccctgatcggttgtcattgctgcaggggctgctgctcccacagacgcacagctgca

SEQ ID NO: 40175 - DNA, 2243 bp, Zea Mays
cactgcccaccgaggcagagtagaaaccccatcatgccgcatcacggcatcacgcgcgtgccttcctcgaccctcgctactgctactgtctcgtctcttgctcgcatcgtctggggaccgcggagcggcggcggcgtggcgcagcggcacggcagcctccccctcgctcctcctactccggctcttcccctctccccctcagccctacgcccctgcgcggctgcgtgacctgcgtccagccgcagcggctggtgcccatcggcggcaagtagcagagcagcagcagccgccggcggtcctcccctccccctcggcctcgctccggctctcccagtcccagctcgagctccgtactgaaggttgaagcaagtcggttcatgtgaccccacaggacccaaaacagattgccgccatcaaagatggaatctgggagcacgttctatggaggggaaggtctctccatcgaccccaagtggtttatcgacccgaagcttctctttgttgggccacgcatcggcgagggcgctcatgcaaaggtctatgaggggaagtataagaaccaaaatgttgctatcaagattgtgcacaaaggggacacccctgaggagatgaccaagagggaggggagattcttgagagaggtgaccatgctgtcaagggtgcagcacaagaacctcgtcaagtttattggggcctgcctagaacctgtcatggtggtcgtgacagagctactagtggggggttcgttgcgcaagtatttggtcagtctccgacctaggagccttgagcctcgtgtagcagtggggtttgcattggacattgcccgagctatggaatgcttacatgcacatgggatcattcatcgtgatcttaagcctgagaatctgttgctgactgcagaccagagaacagtaaaacttgttgatcttggtttggctagggaagagacactaacggagatgatgactgctgagacaggaacataccgttggatggctccagagttgtacagcacagtaacactgaggcatggagaaaagaagcattacaaccacaaagtagatgtctacagctttgcaattgtgttgtgggaactcctccacaataaactgcccttcgagggaatgtctaaccttcaagctgcctacgctgccgctttcaagaatatcagaccaagtgccgataacttgcccgaggagctgtcagaaatcctaacatcctgctggaaggaagacccaaacgacagaccaaacttcacacagataatacagatgctcctacactacctatccaccctttcgccacaagagaccttggcgggcccccgccgcacgttcagttcggagaacacaatcctgcccccagagtctcccgggacaagctcgctgatggcttcgcggggcgacctcggcgacacgcccaagggcaagaaggaagacaagccgaggggcttcttcttctgtttcagcgagtgctattagcacgagcccccccaaagggggaacactccgataagcttgcaaatactgaacgaacaccgtctctccccagctccgatgccctgcgactcaagccatgtccagccggtcaagtcccaggcatccatagtccgcaccctgaagaacggaagtgtagtcgaacactgttttgttttcttctgctaatcaaggtctcctgcatcgctgacatgctgatgacatataccagcagggtaaaacgacgggtaaaccttttgactccagatagtaatggtgggaatagcttacctcccctgtgttttctggcgcaccatggtgtaacggagttgctagagcgcgactatagattgccttcctgcctgcctgtctcgcccgacatcgtatagaaataaaaccaataattcgcatctgtcggtttgtctggttgcaaagggtaagctgccagtccttttgtgttcttgttctgccagttctttgtgttcttggcctggtcgtcttccgttgctgtacagctgcgttttgttgcagctgcaagatttgtgtagcaggggagactgttgcagctatgtgtatgcgttgcagcagcagcaataaggcaacacactactacaggggagggataaactgttcggtctctcctggcagcagttgcagctgcgggtaaaaaggccagccgaatcggggaaagggttccaaaagccaagccctgccctgatcggttgtcattgctgcaggggctgctgctcccacagacgcacagctgca

SEQ ID NO: 40176 - DNA, 2301 bp, Zea Mays
cactgcccaccgaggcagagtagaaaccccatcatgccgcatcacggcatcacgcgcgtgccttcctcgaccctcgctactgctactgtctcgtctcttgctcgcatcgtctggggaccgcggagcggcggcggcgtggcgcagcggcacggcagcctccccctcgctcctcctactccggctcttcccctctccccctcagccctacgcccctgcgcggctgcgtgacctgcgtccagccgcagcggctggtgcccatcggcggcaagtagcagagcagcagcagccgccggcggtcctcccctccccctcggcctcgctccggctctcccagtcccagctcgagctccgtactgaaggttgaagcaagaagccgcgcataaaaaggtggcccttctggaaggatcgcgcgggccaagcatgtctatcaccatcatgagtaataccgggacccaaaacagattgccgccatcaaagatggaatctgggagcacgttctatggaggggaaggtctctccatcgaccccaagtggtttatcgacccgaagcttctctttgttgggccacgcatcggcgagggcgctcatgcaaaggtctatgaggggaagtataagaaccaaaatgttgctatcaagattgtgcacaaaggggacacccctgaggagatgaccaagagggaggggagattcttgagagaggtgaccatgctgtcaagggtgcagcacaagaacctcgtcaagtttattggggcctgcctagaacctgtcatggtggtcgtgacagagctactagtggggggttcgttgcgcaagtatttggtcagtctccgacctaggagccttgagcctcgtgtagcagtggggtttgcattggacattgcccgagctatggaatgcttacatgcacatgggatcattcatcgtgatcttaagcctgagaatctgttgctgactgcagaccagagaacagtaaaacttgttgatcttggtttggctagggaagagacactaacggagatgatgactgctgagacaggaacataccgttggatggctccagagttgtacagcacagtaacactgaggcatggagaaaagaagcattacaaccacaaagtagatgtctacagctttgcaattgtgttgtgggaactcctccacaataaactgcccttcgagggaatgtctaaccttcaagctgcctacgctgccgctttcaagaatatcagaccaagtgccgataacttgcccgaggagctgtcagaaatcctaacatcctgctggaaggaagacccaaacgacagaccaaacttcacacagataatacagatgctcctacactacctatccaccctttcgccacaagagaccttggcgggcccccgccgcacgttcagttcggagaacacaatcctgcccccagagtctcccgggacaagctcgctgatggcttcgcggggcgacctcggcgacacgcccaagggcaagaaggaagacaagccgaggggcttcttcttctgtttcagcgagtgctattagcacgagcccccccaaagggggaacactccgataagcttgcaaatactgaacgaacaccgtctctccccagctccgatgccctgcgactcaagccatgtccagccggtcaagtcccaggcatccatagtccgcaccctgaagaacggaagtgtagtcgaacactgttttgttttcttctgctaatcaaggtctcctgcatcgctgacatgctgatgacatataccagcagggtaaaacgacgggtaaaccttttgactccagatagtaatggtgggaatagcttacctcccctgtgttttctggcgcaccatggtgtaacggagttgctagagcgcgactatagattgccttcctgcctgcctgtctcgcccgacatcgtatagaaataaaaccaataattcgcatctgtcggtttgtctggttgcaaagggtaagctgccagtccttttgtgttcttgttctgccagttctttgtgttcttggcctggtcgtcttccgttgctgtacagctgcgttttgttgcagctgcaagatttgtgtagcaggggagactgttgcagctatgtgtatgcgttgcagcagcagcaataaggcaacacactactacaggggagggataaactgttcggtctctcctggcagcagttgcagctgcgggtaaaaaggccagccgaatcggggaaagggttccaaaagccaagccctgccctgatcggttgtcattgctgcaggggctgctgctcccacagacgcacagctgca

SEQ ID NO: 40177 - DNA, 1260 bp, Zea Mays
caggaacataccgttggatggctccagagcacagtaacactgaggcatggagaaaagaagcattacaaccacaaagtagatgtctacagctttgcaattgtgttgtgggaactcctccacaataaactgcccttcgagggaatgtctaaccttcaagctgcctacgctgccgctttcaagaatatcagaccaagtgccgataacttgcccgaggagctgtcagaaatcctaacatcctgctggaaggaagacccaaacgacagaccaaacttcacacagataatacagatgctcctacactacctatccaccctttcgccacaagagaccttggcgggcccccgccgcacgttcagttcggagaacacaatcctgcccccagagtctcccgggacaagctcgctgatggcttcgcggggcgacctcggcgacacgcccaagggcaagaaggaagacaagccgaggggcttcttcttctgtttcagcgagtgctattagcacgagcccccccaaagggggaacactccgataagcttgcaaatactgaacgaacaccgtctctccccagctccgatgccctgcgactcaagccatgtccagccggtcaagtcccaggcatccatagtccgcaccctgaagaacggaagtgtagtcgaacactgttttgttttcttctgctaatcaaggtctcctgcatcgctgacatgctgatgacatataccagcagggtaaaacgacgggtaaaccttttgactccagatagtaatggtgggaatagcttacctcccctgtgttttctggcgcaccatggtgtaacggagttgctagagcgcgactatagattgccttcctgcctgcctgtctcgcccgacatcgtatagaaataaaaccaataattcgcatctgtcggtttgtctggttgcaaagggtaagctgccagtccttttgtgttcttgttctgccagttctttgtgttcttggcctggtcgtcttccgttgctgtacagctgcgttttgttgcagctgcaagatttgtgtagcaggggagactgttgcagctatgtgtatgcgttgcagcagcagcaataaggcaacacactactacaggggagggataaactgttcggtctctcctggcagcagttgcagctgcgggtaaaaaggccagccgaatcggggaaagggttccaaaagccaagccctgccctgatcggttgtcattgctgcaggggctgctgctcccacagacgcacagctgca

SEQ ID NO: 40178 - DNA, 769 bp, Zea Mays
atggtggtggtgttcgaggacttcccgacggagaaggcggccgaggtcatgcgcctcgcgaccggcgatgacctgcccatcgcccggaaggcgtcgctgcagcggttcctggccaagcgcaaggaccgcctcgtccagcgcgcgccctacgcccgcccgtcgtaccccacggaggagccggagaagaagacggtcaagccagcctcggccttggcctcctggctcgggctcggcagcacggaagccgaccgcctcaccatcgcgctgttctgcggttctgcccaccctcgacagatcgaggatgccgttcttgaggcgtgccctgaacgaatccagccccttcctagcaatgtagctgaaccggtggatgtcaaggtccacctcaaggtagtcctctccctggcgatgcaaacatggcagattcgaagggttttttcatggatctttaaccatctaaagaagagatgtttcaagcagtttgtaaatcctaaatacatcatgctttactctggtgctacaactactgttttaaaggagaaactattagctttgggatcatccagaatattagcagagcatcaacttcaggcacaattacaagagcagcacttgaaggggatttggttcagcttctcactttgttttttaaatgagaagaagcagacaacaaattatagtgaaggctcctctcatcccctgtcgcatggtggatcacccccatggaaccagcctagccaaagacaggtgttctatacactgttcttaaggc

SEQ ID NO: 40179 - DNA, 2525 bp, Zea Mays
actcgggtccctctttcgaggccgatgttgcatggcatggcatagccttcttccatgccaatcgccaaccacacaaaagcaagctgctccgttccgcagaggactcgagagcacgagaccgcagcaggcagcagctgaggcggcgctatattctccgaaactcctgatcaagatctgaagacacctcgggtccctctccttctcttctctccatctctctcctccctccaatgccccaaccacctcgccatgacataggtacaggcagagctaggcaccaaagagccatttccaagggctctacacgaagttaggcggccaaagcgtttgtaaccaactcctctccttcttgtccactggaaaggttcagactcccgttttggcatcgctagccaccgagacagagaggagagctcggcctggcctggccttgtctggccaggatgaagtttatgaaactcggcacccgcccggacaccttcttcaccgccggctccgtgaggtctgtctgcacagaggtggccacagacctgcagatccttgtggataactgcctctaccatctccacaagttccctctgctctcgaaatgcatgctcctgcaagcgctctgcgccgacgccgtcgccggcgacgtcgtcgagctccggggattcccgggcggcggtgaggcgttcgaggcctgcgccaggttctgctacggcatcaccgtcacagtgagcgcgcgcaacctcgtgccgctccggtgcgcggccgcgcacctcgggatgtccgaggccaccgacaggggcaacctggccgccaagctcgacgcgttcctcgcctcctgcctcctccggcgctggaaggacgcgctgggcgtgctgcactccacgcgccactacgccccgctctgcgaggacctcggcctcacgtcccgctgcgtcgacgccgtggccgccctcatcgccagcccggataccgccctgccgtctaggtcgacgtcggcgtcgccgtggtgggcgcacgacatcgccgagctcggggtcgacctcttctggcggatcatagtcgctgtcaaggcgaccggtgccatccacgacaggaccgtcggcgacgcgctcaaggcgtacgcgcggcgttggctgcccaacgtcgccaaggatgggcacgggctctcggcgggccagccgttcgaccacgacgccggcagtgcggtcgtgaagcaggtcaccacgaggcaccgcctcctgctcgagacgatcgtgagcctgctcccagcggagagggacgccgtctcctgcagcttcctgctcaggctcctcgaggctgccaacatcctgagcgcgtccaaggcggagctggtcaagagggtggcgtggcagctggaggaggccagcgtcgccgacctgctgatcccgtcgctgtcctgcgtcagcgagacgctgtacgacgtggacgccgtgtcggccatcatcgacgagttcgcactgcggtgcgcggcggtcccgccggcgctggctctgtccgggagccccgacgacagcccggcgcactcggccgggcaccggcggtcacgttcggcggagagcgtgagcttcgacggcacgcgacgctccctgtcagccgcacccgtgtcgcagggcgctctggtgcaggtgggcaggttggtggacgggttcttgattgaggcggcaaaggatcccaacatgccgctggacaagctgctcgccattgccgaggccgtgccagacagcgcccggccggagcacgatggcatgtacaaagtcgtcgacacatacctcaaggcgcatccggagatgagcaaaagcgcgaggaagcggctgtgccgggtgctcaactgccggaagctgtcggagaaagcgtgcacacacgcggcgcagaacgagctcctcccgctgcgcgtggtcgtgcaggtgctcttcttcgagcacgcgcgcgccgcggcgctggcgccgggcgcgcacgccctggccgcggctgacctgccgagcaacatccgggcgctgctgtccaagtccgggtcgtccgaggacgaggaggcggagcgcgccgacgagcagcggctccgggcgctggccgccggcgcgtctcccggcggcgactggagcgtggagggcctccgtcgcgccgcgtccaagatcgccacgctgcggatgaagctggcggaggacgaagaccgtgacgccgacgagttcgcgcgcaaggccggcgtggcgcgcagcgcgtcgctgcggttcagggcgttctgcgcctttcccgccgggaagccgaagcggatgctcagcaggctgtggccgctgggcagaaacggcgttagccactagtagcagccatggttaggtacttaggtcctgtgatctcctgcctttttcttttctgagggtgatctgtttgtctcttctactagtactttctcggctcctccccttttgagttataattccaaggcaaattgtaccttgcattgcatgtagttgtgaattcaatggcaacaataaagatagaaattgcgctgggaactt

SEQ ID NO: 40180 - DNA, 974 bp, Zea Mays
tatttcacaaacacgaacacaatcatattgtatatatatctactaatattcttcacataaatctgtatctaaaatctagacttcaacacctaacgcgaccacttcacaatcatctcactgaatgaaacgatgtgtttgaacaacactaatataatcacaagatcatcacgactaacacagctagcctagccattcatcaaactagctaacaaaaataataaatcagctcactctagctaaatccgacttgaaaccatgaaattgacgacgatgtccggcttgcgcatatcatcgaacacctgatggggcatcgtactgcattgtgcttctccgacgacaggctggcggggtccgagacgtccggcatggtgatgaggagacggcgacgagcaccatgaagggatcgacgacgctgcctcacatggtgtggaggcgaacgacggcaacttcacaatgacttcacggacacggcgagaacgcagggcacgacaactatgcttcaccggcgaaaaacgccttggcgagctagtcgacggtgagctacaaaccacggatttgaaactcagactaagcagtcatatggcctggcagaggaactgagtagcagtgacggccaacttggacaaacacaacaaaggtgaggccatccaccgtggctgcttgagggaggaccggagctggacgtggcgaaggggactcgcggtggcgtaggtggctagcacgacgaccaaaggccagaggcacggctggtgcttggacgaggacctgggcacgcaccggcgtagagaggagcagggcaaggtccacggcaatggcaagaacgccgggcacggccacaggagacgagcgcagggatgtcttcagccggacacgagacgactcgccagcgttgatgcgcaggaacgatgcggcggccaagctgaaggcaccgacgagcagagactgtgggcgcgacggcggagagcagaacagcg

SEQ ID NO: 40181 - DNA, 1465 bp, Zea Mays
cttttcttccctggttatccaggactaccatttgcatgctacacatgccaaaattgccacaggcctttttcacctcatccctgttaatccacgggaaaacaaaaaaactactctggcctcgtgtttatcgttcctgtctctctgctagttcgtctctgtcgcagcagccatggcggctagagtttacgccgccggcttccatccataggaaaaacctcctcatctagtcgttgccctccatccccacatgcccacgctgctcgtcgcccctctccaccaccaggaatcattcagttcacccgatccagcgcatcgcatctacaaccgtgcgtccagttcctgctttgctcagctgacgtggtctctgtagtagatcaggcctgagctatgagtaaaggagaaaactctagggctcattggaacttcaataaagaaaaggcctagttgatatattgaacgagcacaatcatcaaaggttccgggggcaaaatggatgggcgaccgaagggtggaagagcattgtgaagagttttaatgaaaagtttccatctgatcggtttacaaagggccaaatacaagaaaaggagaaagaggataaagcaaactacaaggcaatccgtgatggaaaaaagaaaagtggtgcaggatggaatgaacctttgtgcatgattaatgctgagccagtaatatgggaaaagcttatccatgaagcattgctacaggtgatctaaacttcacatcaactgaaccagcaccccaaccaactgaacatgttagcactattgatattgatgctcatgattctcaccttaaccctttccttgcaaatgtggatgatcacatgccatctagtggacccatagacatagaatagatagaaacatcatcttcatcttgctctaaaaatcttgaaaataggactgggaagaaaagaaagctcggtattgctggagttttacaaaactatatggacattagggcaaatgaaacaaaaatatttatgaatgaactcaatgagacaactaaggaagcaggtgactattctatcaagcagtgtctggatcttccagaatcaattgaagaactttcagatgaggaaaaggcgcaagcaacaaatgtgctgaagtctgaggtcaacagagaaattttcatgaacttcaagattccaaaggttcgtttgttatgggtcaaaggcgaaatcgctcccaaggtctaatctacattgtatcgtggttgctggtggtgtttacaagctgatggctgcagatggtgcatttttggcttctttgtatctggttttgagacattgtagtgaaggttgacatgagaaactcttgtatgaactttggaatggttatctttggagtgccttgtgacaatttacctttttatgtacttcggatatgtatggaatatttttctttgatgcatgtacttcggatttgtatgaatatttttatccttg

SEQ ID NO: 40182 - DNA, 1509 bp, Zea Mays
caaaattgccacaggcctttttcacctcatccctgttaatccacgggaaaacaaaaaaactactctggcctcgtgtttatcgttcctgtctctctgctagttcgtctctgtcgcagcagccatggcggctagagtttacgccgccggcttccatccataggaaaaacctcctcatctagtcgttgccctccatccccacatgcccacgctgctcgtcgcccctctccaccaccaggaatcattcagttcacccgatccagcgcatcgcatctacaaccgtgcgtccagttcctgctttgctcagctgacgtggtctctgtagtagatcaggcctgaggtgttttttcttagtatagctatgagtaaaggagaaaactctagggctcattggaacttcaataaagaaaaggcctagttgatatattgaacgagcacaatcatcaaaggttccgggggcaaaatggatgggcgaccgaagggtggaagagcattgtgaagagttttaatgaaaagtttccatctgatcggtttacaaagggccaaatacaagaaaaggagaaagaggataaagcaaactacaaggcaatccgtgatggaaaaaagaaaagtggtgcaggatggaatgaacctttgtgcatgattaatgctgagccagtaatatgggaaaagcttatccatgatattccaaggctaaagaaattccaagcaaaatcattcactttgttttatgaactagaaaagctgcatgaaggaagcattgctacaggtgatctaaacttcacatcaactgaaccagcaccccaaccaactgaacatgttagcactattgatattgatgctcatgattctcaccttaaccctttccttgcaaatgtggatgatcacatgccatctagtggacccatagacatagaatagatagaaacatcatcttcatcttgctctaaaaatcttgaaaataggactgggaagaaaagaaagctcggtattgctggagttttacaaaactatatggacattagggcaaatgaaacaaaaatatttatgaatgaactcaatgagacaactaaggaagcaggtgactattctatcaagcagtgtctggatcttccagaatcaattgaagaactttcagatgaggaaaaggcgcaagcaacaaatgtgctgaagtctgaggtcaacagagaaattttcatgaacttcaagattccaaaggttcgtttgttatgggtcaaaggcgaaatcgctcccaaggtctaatctacattgtatcgtggttgctggtggtgtttacaagctgatggctgcagatggtgcatttttggcttctttgtatctggttttgagacattgtagtgaaggttgacatgagaaactcttgtatgaactttggaatggttatctttggagtgccttgtgacaatttacctttttatgtacttcggatatgtatggaatatttttctttgatgcatgtacttcggatttgtatgaatatttttatccttg

SEQ ID NO: 40183 - DNA, 1490 bp, Zea Mays
caaaattgccacaggcctttttcacctcatccctgttaatccacgggaaaacaaaaaaactactctggcctcgtgtttatcgttcctgtctctctgctagttcgtctctgtcgcagcagccatggcggctagagtttacgccgccggcttccatccataggaaaaacctcctcatctagtcgttgccctccatccccacatgcccacgctgctcgtcgcccctctccaccaccaggaatcattcagttcacccgatccagcgcatcgcatctacaaccgtgcgtccagttcctgctttgctcagctgacgtggtctctgtagtagatcaggcctgagctatgagtaaaggagaaaactctagggctcattggaacttcaataaagaaaaggcctagttgatatattgaacgagcacaatcatcaaaggttccgggggcaaaatggatgggcgaccgaagggtggaagagcattgtgaagagttttaatgaaaagtttccatctgatcggtttacaaagggccaaatacaagaaaaggagaaagaggataaagcaaactacaaggcaatccgtgatggaaaaaagaaaagtggtgcaggatggaatgaacctttgtgcatgattaatgctgagccagtaatatgggaaaagcttatccatgatattccaaggctaaagaaattccaagcaaaatcattcactttgttttatgaactagaaaagctgcatgaaggaagcattgctacaggtgatctaaacttcacatcaactgaaccagcaccccaaccaactgaacatgttagcactattgatattgatgctcatgattctcaccttaaccctttccttgcaaatgtggatgatcacatgccatctagtggacccatagacatagaatagatagaaacatcatcttcatcttgctctaaaaatcttgaaaataggactgggaagaaaagaaagctcggtattgctggagttttacaaaactatatggacattagggcaaatgaaacaaaaatatttatgaatgaactcaatgagacaactaaggaagcaggtgactattctatcaagcagtgtctggatcttccagaatcaattgaagaactttcagatgaggaaaaggcgcaagcaacaaatgtgctgaagtctgaggtcaacagagaaattttcatgaacttcaagattccaaaggttcgtttgttatgggtcaaaggcgaaatcgctcccaaggtctaatctacattgtatcgtggttgctggtggtgtttacaagctgatggctgcagatggtgcatttttggcttctttgtatctggttttgagacattgtagtgaaggttgacatgagaaactcttgtatgaactttggaatggttatctttggagtgccttgtgacaatttacctttttatgtacttcggatatgtatggaatatttttctttgatgcatgtacttcggatttgtatgaatatttttatccttg

SEQ ID NO: 40184 - DNA, 1066 bp, Zea Mays
ctagttcgtctctgtcgcagcagccatggcggctagagtttacgccgccggcttccatccataggaaaaacctcctcatctagtcgttgccctccatccccacatgcccacgctgctcgtcgcccctctccaccaccaggaatcattcagttcacccgatccagcgcatcgcatctacaaccgtgcgtccagttcctgctttgctcagctgacgtggtctctgtagtagatcaggcctgaggtgttttttcttagtatagctatgagtaaaggagaaaactctagggctcattggaacttcaataaagaaaaggcctagttgatatattgaacgagcacaatcatcaaaggttccgggggcaaaatggatgggcgaccgaagggtggaagagcattgtgaagagttttaatgaaaagtttccatctgatcggtttacaaagggccaaatacaagaaaaggagaaagaggataaagcaaactacaaggcaatccgtgatggaaaaaagaaaagtggtgcaggatggaatgaacctttgtgcatgattaatgctgagccagtaatatgggaaaagcttatccatgatattccaaggctaaagaaattccaagcaaaatcattcactttgttttatgaactagaaaagctgcatgaagtgtctggatcttccagaatcaattgaagaactttcagatgaggaaaaggcgcaagcaacaaatgtgctgaagtctgaggtcaacagagaaattttcatgaacttcaagattccaaaggttcgtttgttatgggtcaaaggcgaaatcgctcccaaggtctaatctacattgtatcgtggttgctggtggtgtttacaagctgatggctgcagatggtgcatttttggcttctttgtatctggttttgagacattgtagtgaaggttgacatgagaaactcttgtatgaactttggaatggttatctttggagtgccttgtgacaatttacctttttatgtacttcggatatgtatggaatatttttctttgatgcatgtacttcggatttgtatgaatatttttatccttg

SEQ ID NO: 40185 - DNA, 438 bp, Zea Mays
atggggaaggccaagcgcgaccgcgaggagggcagctgcaagacagatacaccacatgctcatccacggggtggcggagctagagctagagttcctggtagtgaccgccgctgctggtcatggagcgctgtgggatttcggaccccccgccccccggaccacactcaccgcgagatctacgagcttggcctccctgacaatggtcacaaacacaactacctctacgagctccatcttgacaccgctgcaatatcatccttcgtccccaactccaccggttgccttgatcccctcccgctcgatgtcaaggttgatgatgcatgcaggttagggaattgccatagcgacgttgaagtggtcaactgaaattttatttgtttctcgggaataataatagcctttcaggagttgcaattgtaagtgattgacttctataac

SEQ ID NO: 40186 - DNA, 1140 bp, Zea Mays
gataagtttaaatgacaagttattgtattaaactttgaatatgtctgttataaattgagaaaaattatttagaaggcttggagtttatatccacataatattaagtaatacaatttagggagaacatatatgagactaaaatggagagactaatctttagtctctggaaccaaataggttcttagtgaatctaaaggccgaattttattattatagtacagtttcttaaaaggtgctacattaacttaagtttattggagttcataaaaaataaacaataatgcaaccattcacaagataccattatttttttttcttttccacttcttctcccaacacttttcttctgtctcagtcactcgtctctctctaccacatggtcaccactccaatctctccaccacacagtcctggacgaggaacccgccctcatgcctcgctgttgcctcaatcttgcctcatgccttgtcgctaactctgatgcacatagacacctgcacacattcctagtctaccccttcttgcatggggtcgcgttggcctatgcatgcctcttcacacgcaactgggttcagactagcctcttctagaccgctacctgtcggcaaccttgtttcctctaatacatggtggtagccacactaaaatacagttaatatgatctcagaaaactacaagcctctttagtacaactacaatagtgttcgcaaacaccaaaggataaaagttattctaatctcactcaaacactagagccaggggcgggcctagaatttagacaatgggtattcgaaattttactagagaaaaaaatgttttgatagcctaaaatctatccgagtatccttagtcatatataattgagggtctaaaacttattataatagcctttagatatatataattgattcacagaatagcctttagatatatataattgattcacatgcacagacgagcagctccttcccttgagcctcggcgagcggcacagcaggcgtcgaggtcaggccatcggttgctcactcgcttcacgctcccgcccccgacacggtagtctggcttcgtggctcctccactcctgcaaacccggcgtgccgccaccagtggttgagcccttgaagccttgaaggaagcgac

SEQ ID NO: 40187 - DNA, 2075 bp, Zea Mays
atcacacactcctggggacgccgtacgtagccaacagagattccccccgcacgtacaccatgtggctagtgtcctccctccgtgccgctctgtgcctgttgctcgccgtcctcgccagccaccgccagcctgcggcggccgtcgtcacgctgtcgacgtcgtcgcggtggatcgtggacccggccgggcaccgggtgaagctggcctgcgtcaactggccgtcgcacctggagtccgtggtgaccgaggggctcggcaggcagcccgtgggcgccatctccgggatgatcgtctccatggggttcaactgcgtccgcctcacgtaccccatcgcgctggtgaccaacgcctctctgtcggtgctcaccgtgcgccagtccctcctggccaacggcctcgccgagacggtcggcggcgtcgaggtcaacaaccccagcttccttgacctcacgctcatcgagtcgctcaaggctgtggtgaacgccctgggggagaagaacgtcatggtgatcctggacaaccacgtgagcacgccggggtggtgctgcagcaacgacgacggcaatgggttcttcggcgacagggacttcgacccaaacgtctgggtggacgggctgggcagcatggccaccatcttcgccgacgtgcccaacgtcgtcggcatgagcctgcggaacgagctccgaggcccgaggcagaatccccaagattggtacacgtacatgcagaggggcgcggaggcggttcacgcggcgagcccgagggcgctggtgatcatgggcggcctgagctacgactacgacctgtccttcctcgccgcgaggcaggtgggcgtgagcttcgcggcggagaacaagctggtgttcgaggtgcactggtacagcttctcggacgcgcgcgcgtgggagacggagagcgccaacgaggtgtgcggccgcgccgcgcgcgacttcgcgcgccgcggcgggttcctgctcgcacggggcttcccgctcttcctcagcgagttcggcgccgactcccgcggcggcgaccccaaggacaaccggttcttcccgtgcgcggccgccgtggccgcggagcacgacgtggactgggcgtactgggcgctgcagggcagctacgcgctgcggcagggcgtcgccgggatggacgaggtgtacggcgtcctcgactggtcctggagcaagccccgcaacgagaccgtgctcccgaggatccaggcgctgcagcggccgctccaagggcctggctacggcgaggcgctgccgtacaccgtgctgttccacccgctcacggggctctgcgcggtgcgtcgcgcagccgcggtgacgacgacgctggagctgggcccgtgcaacgagacggacgcgtgggcgtacgcgccgccgtcgtcgacgctcgttctaagggacgctgcggccgcggggctcccgtgcctgcgggccgaggggcctggccagcccgcgcggctcggcatcagggactgcggcgaccccatgtcgacgtggcgcctggcgacagactccgggatgcatgtcgccgtcgacgccgctcttgggctgggcggcggcgaggacggcggcggtggcggtggcatgctgtgcctggacgtgggcacggacggcaggagcattgtgacgaacccgtgcgcgtgccagcgcggggacgggacgtgcgacccggagggccagtggttcaaactggtcaccagcacgaggcgcgtcgtgcgcaggccgccaacgctcgcctaggtcgttctgcggcgctttcataatctttccggattcattcatagcgctcagtcatttcttgataaatttggtatttatttcaaacctctaatctcgaaaacttattgccacataaactcatcgaatgtgcctttgcaattttctctccatgaggaaattagaatgttctcttcttcccacttcacaaacacaaggttcggtccgacaccaattttcaattatactatacgccaaaagcttcggtcctctcgaaaacattggtattttgagctagagctgttatttgccttgtggaaagttgaacctacaattgcgggtgat

SEQ ID NO: 40188 - DNA, 2741 bp, Zea Mays
ccaccttccaacaggcagcgaaacgcctggagagcggagaaaagcggacgtgcacgcaggcgtcggtggcggtgtcgctaactcgccatcatcctgcacgccaccagcgtaccaacccgaagacgaacacgcgcacacgccgcactcgaacacacactcgacgcaatgcaacgcagcgcagcgttgtcacaatgtcacgccaggacaaatccagcgctccctgaagcagagaaagaccgcgaccaaaagcaagttcgatctccgctcctccagtctccaccgcccgccaaccccgagatatacctcccttcctctcgaagcttcgtctccagagtccagacgacgtcgccggctcttcactcggcgctggtgctggtggttgccagtggcggtggctgggtggccgggtggcggtgttgctgggatgcccgccgcgacggcgaccgccgcccgcctccgactgccgctgccaaaagcagcccaccgctcgccctgctcgagccggcgcctctccaattgccaccgccactgacgagcgaccacacgcttggcgcccgccatggacgccttgtcccgccccgctgttgtcatcgacaacggcaccgggtacacgaagatggggttcgcggggaacgtggagccctgcttcatcacccccactgtcgtcgccgtcaacgattccttttccggttcaggccagccggcggcgaggggcgcccctgccagggggaactggctcgctcagcacagtgccggcgtcatggctgacctcgacttctacatcggccaggaggcgctggcccgatcccgcgccagcagctcgcacagcttgagctatcccatccgcaacggccaggtggaaaattgggattctatggagaggttttggcaacagtgcatcttcaattacctccggtgcgacccagaagatcattattttcttctaactgagagccctctgactgcccctgagatccgggagtataccggggagatcatgttcgagacgttcaatgtgcccggcctctatattgctgtccaacctgtccttgctctagctgctgggtacactacaaccaagtgtgaaatgacaggtgttgtagttgatgtgggtgatggggctacccacatcgttccagttgctgatggttatgtcattgggagcagtatcagatctattccaattacaggcaaggatgttacccaatttattcatcaacttctaaaggaaagaggtgagaacattccaccagaagaatcttttgatgtagcaaggaggatcaaagaaatgtactgttatacttcttcagacgttgtgaaggaattcaataaacatgacagggaaccatcaaagtatgttaaacactggacgggcatcaaaccaaaaactggtgcgaaatacacatgtgacattggatacgagcggttcctggggcctgagatcttcttcaacccagagatgtataacaatgacttcaccactcccttgcaagttgttatcgacaggtgcatccaatcatccccaattgacacaaggagggctctttataagaatattgtcttgtctggaggctcgactatgtttaaagatttccataggaggttacagcgggacctcaaaaagatagtggatgcacgggtccgtgcatctaatagtcggcttcttagtggagatgctaaggcccagcctatagaagtgaatgtggtcagtcatcctattcagagatatgcggtatggtttggtggatctgtgcttgcttcaactgccgaattctacgaggcttgccgcacaaaagcagagtatgaagagtacggtgcgagcatctgccgatcgaaccctgttttcaaagggatgtactgactcagcctatcatagtcctgttctcaagggtatatatgtatttaaaccgagatctgttccctgtggctgacgtcgtgaatggcgtccactcaagcgtaaatggggagatctgacagcggaaacggactgccaagagggatcctggagaatcctagccgtaggagctgtacaaaagtaaagtgcaaatataggttcattttttatcatacaatttagatgctggtaggcctgacgggatgggtttgccacctctgctgaactgggtggcattgtaatttgtagcgtcaacattggtgcttgtatacatgtagggatggcgttgggggggggggggggggcggcggttgggtcgtggttccgttaccccaaaccaattctccatcgtgccttgttgggacaggagagaattagggggattaagggtatgtttggtttgctatctaatttgtcacactttgtctaacttttctgtctaagattagttctttaattaaactactaaacttagataaaatgtgacatagttagctataatctaaacatgccctaaatctctttctacacaacattggcaagacaacttgccactaaacctctttctacacaacattggcaagacaacttaggcaaggaagggatttaatctccttttaactcttttcaatccatctatccatttctaactgaacaagatcgatcttaacagcgacaaatcttttgtccctatcttgagggaagggattggaggtgattagatatggcaatttgacctgcggataggggtgacaataggttttaaattttacactataagatttaatgattggatcagattagaatcagactctatttctattcatttttgaactacaaattattt

SEQ ID NO: 40189 - DNA, 2632 bp, Zea Mays
cacgccaccagcgtaccaacccgaagacgaacacgcgcacacgccgcactcgaacacacactcgacgcaatgcaacgcagcgcagcgttgtcacaatgtcacgccaggacaaatccagcgctccctgaagcagagaaagaccgcgaccaaaagcaagttcgatctccgctcctccagtctccaccgcccgccaaccccgagatatacctcccttcctctcgaagcttcgtctccagagtccagacgacgtcgccggctcttcactcggcgctggtgctggtggttgccagtggcggtggctgggtggccgggtggcggtgttgctgggatgcccgccgcgacggcgaccgccgcccgcctccgactgccgctgccaaaagcagcccaccgctcgccctgctcgagccggcgcctctccaattgccaccgccactgacgagcgaccacacgcttggcgcccgccatggacgccttgtcccgccccgctgttgtcatcgacaacggcaccgggtacacgaagatggggttcgcggggaacgtggagccctgcttcatcacccccactgtcgtcgccgtcaacgattccttttccggttcaggccagccggcggcgaggggcgcccctgccagggggaactggctcgctcagcacagtgccggcgtcatggctgacctcgacttctacatcggccaggaggcgctggcccgatcccgcgccagcagctcgcacagcttgagctatcccatccgcaacggccaggtggaaaattgggattctatggagaggttttggcaacagtgcatcttcaattacctccggtgcgacccagaagatcattattttcttctaactgagagccctctgactgcccctgagatccgggagtataccggggagatcatgttcgagacgttcaatgtgcccggcctctatattgctgtccaacctgtccttgctctagctgctgggtacactacaaccaaggtgttgtagttgatgtgggtgatggggctacccacatcgttccagttgctgatggttatgtcattgggagcagtatcagatctattccaattacaggcaaggatgttacccaatttattcatcaacttctaaaggaaagaggtgagaacattccaccagaagaatcttttgatgtagcaaggaggatcaaagaaatgtactgttatacttcttcagacgttgtgaaggaattcaataaacatgacagggaaccatcaaagtatgttaaacactggacgggcatcaaaccaaaaactggtgcgaaatacacatgtgacattggatacgagcggttcctggggcctgagatcttcttcaacccagagatgtataacaatgacttcaccactcccttgcaagttgttatcgacaggtgcatccaatcatccccaattgacacaaggagggctctttataagaatattgtcttgtctggaggctcgactatgtttaaagatttccataggaggttacagcgggacctcaaaaagatagtggatgcacgggtccgtgcatctaatagtcggcttcttagtggagatgctaaggcccagcctatagaagtgaatgtggtcagtcatcctattcagagatatgcggtatggtttggtggatctgtgcttgcttcaactgccgaattctacgaggcttgccgcacaaaagcagagtatgaagagtacggtgcgagcatctgccgatcgaaccctgttttcaaagggatgtactgactcagcctatcatagtcctgttctcaagggtatatatgtatttaaaccgagatctgttccctgtggctgacgtcgtgaatggcgtccactcaagcgtaaatggggagatctgacagcggaaacggactgccaagagggatcctggagaatcctagccgtaggagctgtacaaaagtaaagtgcaaatataggttcattttttatcatacaatttagatgctggtaggcctgacgggatgggtttgccacctctgctgaactgggtggcattgtaatttgtagcgtcaacattggtgcttgtatacatgtagggatggcgttgggggggggggggggggcggcggttgggtcgtggttccgttaccccaaaccaattctccatcgtgccttgttgggacaggagagaattagggggattaagggtatgtttggtttgctatctaatttgtcacactttgtctaacttttctgtctaagattagttctttaattaaactactaaacttagataaaatgtgacatagttagctataatctaaacatgccctaaatctctttctacacaacattggcaagacaacttgccactaaacctctttctacacaacattggcaagacaacttaggcaaggaagggatttaatctccttttaactcttttcaatccatctatccatttctaactgaacaagatcgatcttaacagcgacaaatcttttgtccctatcttgagggaagggattggaggtgattagatatggcaatttgacctgcggataggggtgacaataggttttaaattttacactataagatttaatgattggatcagattagaatcagactctatttctattcatttttgaactacaaattattt

SEQ ID NO: 40190 - DNA, 2461 bp, Zea Mays
ccaaaagcaagttcgatctccgctcctccagtctccaccgcccgccaaccccgagatatacctcccttcctctcgaagcttcgtctccagagtccagacgacgtcgccggctcttcactcggcgctggtgctggtggttgccagtggcggtggctgggtggccgggtggcggtgttgctgggatgcccgccgcgacggcgaccgccgcccgcctccgactgccgctgccaaaagcagcccaccgctcgccctgctcgagccggcgcctctccaattgccaccgccactgacgagcgaccacacgcttggcgcccgccatggacgccttgtcccgccccgctgttgtcatcgacaacggcaccgggtacacgaagatggggttcgcggggaacgtggagccctgcttcatcacccccactgtcgtcgccgtcaacgattccttttccggttcaggccagccggcggcgaggggcgcccctgccagggggaactggctcgctcagcacagtgccggcgtcatggctgacctcgacttctacatcggccaggaggcgctggcccgatcccgcgccagcagctcgcacagcttgagctatcccatccgcaacggccaggtggaaaattgggattctatggagaggttttggcaacagtgcatcttcaattacctccggtgcgacccagaagatcattattttcttctaactgagagccctctgactgcccctgagatccgggagtataccggggagatcatgttcgagacgttcaatgtgcccggcctctatattgctgtccaacctgtccttgctctagctgctgggtacactacaaccaagtgtgaaatgacaggtgttgtagttgatgtgggtgatggggctacccacatcgttccagttgctgatggttatgtcattgggagcagtatcagatctattccaattacaggaaagaggtgagaacattccaccagaagaatcttttgatgtagcaaggaggatcaaagaaatgtactgttatacttcttcagacgttgtgaaggaattcaataaacatgacagggaaccatcaaagtatgttaaacactggacgggcatcaaaccaaaaactggtgcgaaatacacatgtgacattggatacgagcggttcctggggcctgagatcttcttcaacccagagatgtataacaatgacttcaccactcccttgcaagttgttatcgacaggtgcatccaatcatccccaattgacacaaggagggctctttataagaatattgtcttgtctggaggctcgactatgtttaaagatttccataggaggttacagcgggacctcaaaaagatagtggatgcacgggtccgtgcatctaatagtcggcttcttagtggagatgctaaggcccagcctatagaagtgaatgtggtcagtcatcctattcagagatatgcggtatggtttggtggatctgtgcttgcttcaactgccgaattctacgaggcttgccgcacaaaagcagagtatgaagagtacggtgcgagcatctgccgatcgaaccctgttttcaaagggatgtactgactcagcctatcatagtcctgttctcaagggtatatatgtatttaaaccgagatctgttccctgtggctgacgtcgtgaatggcgtccactcaagcgtaaatggggagatctgacagcggaaacggactgccaagagggatcctggagaatcctagccgtaggagctgtacaaaagtaaagtgcaaatataggttcattttttatcatacaatttagatgctggtaggcctgacgggatgggtttgccacctctgctgaactgggtggcattgtaatttgtagcgtcaacattggtgcttgtatacatgtagggatggcgttgggggggggggggggggcggcggttgggtcgtggttccgttaccccaaaccaattctccatcgtgccttgttgggacaggagagaattagggggattaagggtatgtttggtttgctatctaatttgtcacactttgtctaacttttctgtctaagattagttctttaattaaactactaaacttagataaaatgtgacatagttagctataatctaaacatgccctaaatctctttctacacaacattggcaagacaacttgccactaaacctctttctacacaacattggcaagacaacttaggcaaggaagggatttaatctccttttaactcttttcaatccatctatccatttctaactgaacaagatcgatcttaacagcgacaaatcttttgtccctatcttgagggaagggattggaggtgattagatatggcaatttgacctgcggataggggtgacaataggttttaaattttacactataagatttaatgattggatcagattagaatcagactctatttctattcatttttgaactacaaattattt

SEQ ID NO: 40191 - DNA, 2453 bp, Zea Mays
ccaaaagcaagttcgatctccgctcctccagtctccaccgcccgccaaccccgagatatacctcccttcctctcgaagcttcgtctccagagtccagacgacgtcgccggctcttcactcggcgctggtgctggtggttgccagtggcggtggctgggtggccgggtggcggtgttgctgggatgcccgccgcgacggcgaccgccgcccgcctccgactgccgctgccaaaagcagcccaccgctcgccctgctcgagccggcgcctctccaattgccaccgccactgacgagcgaccacacgcttggcgcccgccatggacgccttgtcccgccccgctgttgtcatcgacaacggcaccgggtacacgaagatggggttcgcggggaacgtggagccctgcttcatcacccccactgtcgtcgccgtcaacgattccttttccggttcaggccagccggcggcgaggggcgcccctgccagggggaactggctcgctcagcacagtgccggcgtcatggctgacctcgacttctacatcggccaggaggcgctggcccgatcccgcgccagcagctcgcacagcttgagctatcccatccgcaacggccaggtggaaaattgggattctatggagaggttttggcaacagtgcatcttcaattacctccggtgcgacccagaagatcattattttcttctaactgagagccctctgactgcccctgagatccgggagtataccggggagatcatgttcgagacgttcaatgtgcccggcctctatattgctgtccaacctgtccttgctctagctgctgggtacactacaaccaagtgtgaaatgacaggtgttgtagttgatgtgggtgatggggctacccacatcgttccagttgctgatggttatgtcattgggagcagtatcagatctattccaattacaggcaaggatgttacccaatttattcatcaacttctaaaggaaagaggtgagaacattccaccagaagaatcttttgatgtagcaaggaggatcaaagaaatgtactgttatacttcttcagacgttgtgaaggaattcaataaacatgacagggaaccatcaaagtatgttaaacactggacgggcatcaaaccaaaaactggtgcgaaatacacatgtgacattggatacgagcggttcctggggcctgagatcttcttcaacccagagatgtataacaatgacttcaccactcccttgcaagttgttatcgacagaatattgtcttgtctggaggctcgactatgtttaaagatttccataggaggttacagcgggacctcaaaaagatagtggatgcacgggtccgtgcatctaatagtcggcttcttagtggagatgctaaggcccagcctatagaagtgaatgtggtcagtcatcctattcagagatatgcggtatggtttggtggatctgtgcttgcttcaactgccgaattctacgaggcttgccgcacaaaagcagagtatgaagagtacggtgcgagcatctgccgatcgaaccctgttttcaaagggatgtactgactcagcctatcatagtcctgttctcaagggtatatatgtatttaaaccgagatctgttccctgtggctgacgtcgtgaatggcgtccactcaagcgtaaatggggagatctgacagcggaaacggactgccaagagggatcctggagaatcctagccgtaggagctgtacaaaagtaaagtgcaaatataggttcattttttatcatacaatttagatgctggtaggcctgacgggatgggtttgccacctctgctgaactgggtggcattgtaatttgtagcgtcaacattggtgcttgtatacatgtagggatggcgttgggggggggggggggggcggcggttgggtcgtggttccgttaccccaaaccaattctccatcgtgccttgttgggacaggagagaattagggggattaagggtatgtttggtttgctatctaatttgtcacactttgtctaacttttctgtctaagattagttctttaattaaactactaaacttagataaaatgtgacatagttagctataatctaaacatgccctaaatctctttctacacaacattggcaagacaacttgccactaaacctctttctacacaacattggcaagacaacttaggcaaggaagggatttaatctccttttaactcttttcaatccatctatccatttctaactgaacaagatcgatcttaacagcgacaaatcttttgtccctatcttgagggaagggattggaggtgattagatatggcaatttgacctgcggataggggtgacaataggttttaaattttacactataagatttaatgattggatcagattagaatcagactctatttctattcatttttgaactacaaattattt

SEQ ID NO: 40192 - DNA, 873 bp, Zea Mays
aaacgttttagccatggtgagaacacctgtcatgtcacggtgaacatcgcggagaataattctaccacgacatcggcgacatcggtcaaattacccacggccattgtatcttcctttaaattgagcactagagcctccaaatgtcttcttccttgaactggtcaccggtgctgctgtgaacaaggctctcgtggacaggactttgtgaactatttcttcagaacgccgctgtgccaccggagaacgtccttattattctggcctcctcagtaccccctaaagcttacacgtcttagcttcactgatgtcgatgaaggaagaagttcaagaagcacgaagagtgaaaatgttgtgttgcccaagcaaggcaatggacactgagaacgagatccaagttttgtgtgatcaactggctgaaaaatctccagattctctttgccttttgaaagaggcgaagagccacaatccatatgcttttgctgcatgagggttcttccacctccggatgaccttctaggaccgtaataagttggaaggttcctaccttccaggactgtaataagttttatcacactttagaaaccaagttttgtaataataatgactcctatatcataagtttagaacatatgaatgtaaattaaattattatactcttttcgcttttacctcgatctatgttgtatgaaatgtcaacttactgtaatgtcatgaggtcctcttcgagggatcaagaaagatgattcaagaatctaaagaaccctaatagattctgttaagttatatggtacacgtgtatagttatctaaggtttttagataaaaatggaccctataacttggaggaggttatgctatagagccgatctcttat

SEQ ID NO: 40193 - DNA, 770 bp, Zea Mays
agaacacctgtcatgtcacggtgaacatcgcggagaataattctaccacgacatcggcgacatcggtcaaattacccacggccattgtatcttcctttaaattgagcactagagcctccaaatgtcttcttccttgaactggtcaccggtgctgctgtgaacaaggctctcgtggacaggactttgtgaactatttcttcagaacgccgctgtgccaccggagaacgtccttattattctggcctcctcagtaccccctaaagcttacacgtcttagcttcactgatgtcgatgaaggaagaagttcaagaagcacgaagagtgaaaatgttgtgttgcccaagcaaggcgaagagccacaatccatatgcttttgctgcatgagggttcttccacctccggatgaccttctaggaccgtaataagttggaaggttcctaccttccaggactgtaataagttttatcacactttagaaaccaagttttgtaataataatgactcctatatcataagtttagaacatatgaatgtaaattaaattattatactcttttcgcttttacctcgatctatgttgtatgaaatgtcaacttactgtaatgtcatgaggtcctcttcgagggatcaagaaagatgattcaagaatctaaagaaccctaatagattctgttaagttatatggtacacgtgtatagttatctaaggtttttagataaaaatggaccctataacttggaggaggttatgctatagagccgatctcttat

SEQ ID NO: 40194 - DNA, 347 bp, Zea Mays
gaacaaggctctcgtggacaggactttgtgaactatttcttcagaacgccgctgtgccaccggagaacgtccttattattctggcctcctcagtaccccctaaagcttacacgtcttagcttcactgatgtcgatgaaggaagaagttcaagaagcacgaagagtgaaaatgttgtgttgcccaagcaaggcaatggacactgagaacgagatccaagttttgtgtgatcaactggctgaaaaatctccagattctctttgccttttgaaagagggcgtaccgggtggagggttgtggagagaggctgttgcgagttgcgaccgatggtgacggcgacctccccgac

SEQ ID NO: 40195 - DNA, 1524 bp, Zea Mays
cttaagtgcccaagtcgcacccttaagggcagcaacacacttaaacaggaataacccgtcagtccctcggatctagtccgataaagccacttatccaggatcgaataccactagctcactcgaaggtgaggcacagagaaatacaataaaacataataccacaatttaataagtatcattagtgattacattatcggagtttcaaaaatgataaacataaatttattgcagcggaaataactaacggagaaaaccgagtaacatggcgaagcctggccacgctactcctcctggtcctctcctgcggaagcagtaacccactcgaccgtctatcccggtggcagggatgaaggccaagtcacaccatcaacaaaccatcctaaggagtacctgcaaaaattatgccacaagcaaggctgagtatactaatactcagctagacttacccggtgtgaggagtctactcctctacctctagacatgcagctgtttggctgaggggtttggtttgccaaaagcactagctgagtctaaaatcaagttttagcttttcaagttttagtatgctcctttttaaactaggtgagtacctagctactcatacatggtatcaaacattttatcaatcaacatcttttgccagtcacctcatttccacttattactcaatgcagtacaatggatcaagcagtctcattagctgcgagaagcagacgattcggatcgagtttttatccttgcaaggtaaacctaaacacacgacaagtaggggcactccgtccccacacacatcaaccgtccccatcgattccccgtcagcagatcagggctcaccgccttggcgtacaatgcctcactgaccccgactgccgtcgtgcagtgaccgcacttgtacccaccataaccggaatgggagaccacgtctcaggtcgcgtgaggggatatgtccactgtcaggttcactcaggtactaggcttaccgatttaccatatttctcggcatatgtttagtacattcaaacgcttgacataggtatccgcacgttaatccttattccaatttcatctcgtagaccacgcatccccatggatccgtgtccacagaccaacatcagtatgatatgaaagtgggtacaatcaatgtcctgacctcgcgcgagtgctagaaaaatcactcgacttctatcgagatccctatttaataaagcagctactcgacctagcatactagtattcatctcaataggaatcctgagttcatgcaactaaggtcccagtcaactcctacacttaagtgcacagtacaagcctacaaacattaagtgcagtaaaatagcatatataacggttatgcataaaaccagggcttgcctttattttaacacttagatagtgtttgcagggggggtactcgcttggcgagcatccaccggttaagtccatccttccttgggtcgtccaccgactgcatcttgtggttggcaccacatcacttgcacggtcagcatctctcggtcctaaatg

SEQ ID NO: 40196 - DNA, 1964 bp, Zea Mays
ggataatacagcccaactattccctgagttttaatagttgcaagcagaatggacattttagaccaactcaacaggaacatcacataagttttctagttctaatacatacaaaaattagtacgcctaaccgtcaaagttctttgcttatgtgtagcttactgattgcagttacctatcttttcatttcccctaaggagaagaatcatacgtcagatctggacatttcaagtaatcctagactgatggaatttcagagcccaactagttgtagcatctgaatgcgtgtctaactaattcccccctatgattccatcagaatctggcatgaccaacacgcaagccaagagttcacattgaaggcgttttctctgattcccgatcccagtgttcccaaaccaagtacagacaggcaaaaaaggcatgctcctttttttctcaatcaatcaatcctactaccactaccaccatctatccaacaaccgagccagtaaatagccaaggatgccaggaagcagtaattcgagagcaggaaaccggggaactcacgctttggtggcggcgtagacggagtagagcggatcagaaggcacgacggaggcggcgccggagccgatgttgacaatggcgccgcgcttccgctcgaccatgcctggcagcacggcgtgcgtgacccgcgtgacgccctcgacgttgacccggatgaggctgcgcatcagctcctcgtccacctcgtggaagtagcgcgcgtacgggtaggacagcccggcgttgttgacgagcacgccgacgtcgaggccacggatggagtccttgagcgcctcgacgccggccgcgagcccctcgctggcgaagtcgagcacgaaggtgcgcacctcggggaccttggggtgcttggccctgatctcggcggccacggcggccagcttctccgggttgcggccgacgaggacgagcccgagcccggccgcggcgaggcggaacgcgacggcgcggccgatgccgtcggtggcgcccgtcacgacggcccaggcgccgtagcggcggcgcaggggcttccccgggcggaggaacgcggcgtagacccagagcgcgaagcgggcagcggcgcggacggccacgagcaggcccacggcggccagcaccagcgcccaagccggctgcgcgcggaggaactcgacgtgggcgcacgtgccggccatggcgccgtctgattcgtgtagctggtcgatgcggtgcggtgtcgagctttggacgggacttattagtaacggggatgggctttctctggtggtgggtggaactggtgtaccaagactaaccgaacacgaacagaaattctctctcgttggtagagttcgtatcgacggacagatttcaaattggatttttaagaagttctggtggtggtagttttattagaaatgtatataggtccggtgtagcaaagaatgcgagtcaaagtagcaagcaacctttgaatggatggatcgcaggtttacaacaacatggcctgggggtttcaaaacgaagtacccacactctttggacacgtcaaactcatcgacgtgtttggtaggctcaccggcaccgcccagtgttttgcagacgaaccgtggcctgcgagctgcgaagacagcagcagcggcagagatgcagacgcagccacgcaggtagggctgaactggctggcatcaggcatccggattccggaggccggagcaggtgcacaccagaggcaaaccgagtccacggcggtgcaccgggcgcaacttggctctgatgtagttactgtggagagtcttgacgacgatggggacggcggtgctggcaggcagtggcggcctgcatgacgggtgcccagctcgctgcccatcgagccgaggcgcgccagcgaggagtggcgccgtgccggacactggcagcattaacgcacgcgcggctggcgctggcggtcaggtggggag

SEQ ID NO: 40197 - DNA, 478 bp, Zea Mays
gaagccatgagatcaaacaaagtattgcataagcaacgtgggtgaaaaacttattggccttgttacaagtagagacgaaattgctgatttactaaagcttcatgatgtaattgatcttgtcattccaagaggtagcaataagctggtttcacaaatcaaggcatcaactaagatccctgttcttggtcatgctgatggtatctgtcatgtatacatcgacaaatcagctaacatgaatatggcaaaacaaatagtgatggacgccaaaattgattacccagcagcctgcaatgctatggagacattgcttgttcataaagatcttataaaggctccacgtcttgatgacttactgctatcactcaaaacagaaggagttgctatttttggggggccagttgcacatgaagtattgtgcattctagaagcaaattcattccatcataaggctgcaacaccatctagtggaggtagataa

SEQ ID NO: 40198 - DNA, 1714 bp, Zea Mays
cttctctccccactcccggccagtccgaacccagcaacggtccaggtttccaaggtccaacgttccgacccacgggaagcttctagaaaccattagacgcaccggtcgcgttcctcctcatggcccccacttgtcatccgtccatcctcacgtctctgccccaccattttaccggtagccaacaaaactaggttccgtggcgtcgggtgggaccagcaagcagccgccgcagccggcccccaggcgcctctatatacggcactccgactccgatacattggcgacatcacagatcacacacactcgagaactccatttcgatctcatttgaaatcaacccatcctcgtttcctccgtctagcagcctctcaccctcatggccaagatcaagatcgggatcaatgggtttggcaggatcggaaggctggtggccagggtggccctgcagagcgacgacgtcgagctcgtcgccgtgaacgaccccttcatcagcaccgattacatgtatgacactgtgcacggacagtggaagcaccatgaggtcaaggtgaaggactccaagacccttctctttggtgagaaggaggttgctgtgtttggctgcaggaaccctgaggagatcccatggggttcggttggcgctgaatatgttgttgagtctactggtgttttcactgaccaggagaaggctgcagctcacttgaagggtggtgccaagaaggttgtcatttctgctcctagcaaggatgcccccatgttcgttgttggtgtcaacgagaaggagtacaagtctgacatcaacattgtctctaatgctagctgcacaaccaactgccttgctccgcttgctaaggtcatcaatgacaagttcggtattgttgagggtctgatgaccactgttcatgccatcactgctacccagaagactgttgatgggccctcatctaaggactggaggggtggaagggctgctagtttcaacatcattcccagcagcactggagctgctaaggctgttggcaaagtgcttcctgtcctcaatggaaaattgactggaatgtctttccgtgtcccaactgtcgatgtttctgttgttgatctgactgttaggcttgagaagtctgccacctatgatgagatcaaggctgcggtcaaggccgaggcagagggtagcctcaagggcattctgggttatgtcgaggaggaccttgtttccaccgatttccagggtgacagcaggtctagcatctttgatgcgaaggctggcattgccttgaacggcaactttgtgaagcttgtgtcctggtacgacaacgagtggggatacagcacccgagtggtcgacctgatccgccacatgaacagcaccaagtaaatgaacaaactgatgaaagcatgcaaagagtgatgaaagcatgcaaagagagttgtgtttcttccccggaagtgcttccgagaataaatttttcttatctgattgtctaaaacctataattggtgtaatggtatcgtagtggttggttgagcattgagtgactcatattttgtcaggtctatgtgttatcgttaaacttttaacggtcattctatttcaaaagttttgcattttgcaatctttgacgctccatttcacttcatagttccacgtcatttcttccttcatttggctatttggttgtcggcttctttatagttccacgtcttttcttccttc

SEQ ID NO: 40199 - DNA, 1688 bp, Zea Mays
gcaacggtccaggtttccaaggtccaacgttccgacccacgggaagcttctagaaaccattagacgcaccggtcgcgttcctcctcatggcccccacttgtcatccgtccatcctcacgtctctgccccaccattttaccggtagccaacaaaactaggttccgtggcgtcgggtgggaccagcaagcagccgccgcagccggcccccaggcgcctctatatacggcactccgactccgatacattggcgacatcacagatcacacacactcgagaactccatttcgatctcatttgaaatcaacccatcctcgtttcctccgtctagcagcctctcaccctcatggccaagatcaagatcgggatcaatgggtttggcaggatcggaaggctggtggccagggtggccctgcagagcgacgacgtcgagctcgtcgccgtgaacgaccccttcatcagcaccgattacatgacctacatgttcaagtatgacactgtgcacggacagtggaagcaccatgaggtcaaggtgaaggactccaagacccttctctttggtgagaaggaggttgctgtgtttggctgcaggaaccctgaggagatcccatggggttcggttggcgctgaatatgttgttgagtctactggtgttttcactgaccaggagaaggctgcagctcacttgaagggtggtgccaagaaggttgtcatttctgctcctagcaaggatgcccccatgttcgttgttggtgtcaacgagaaggagtacaagtctgacatcaacattgtctctaatgctagctgcacaaccaactgccttgctccgcttgctaaggtcatcaatgacaagttcggtattgttgagggtctgatgaccactgttcatgccatcactgaagactgttgatgggccctcatctaaggactggaggggtggaagggctgctagtttcaacatcattcccagcagcactggagctgctaaggctgttggcaaagtgcttcctgtcctcaatggaaaattgactggaatgtctttccgtgtcccaactgtcgatgtttctgttgttgatctgactgttaggcttgagaagtctgccacctatgatgagatcaaggctgcggtcaaggccgaggcagagggtagcctcaagggcattctgggttatgtcgaggaggaccttgtttccaccgatttccagggtgacagcaggtctagcatctttgatgcgaaggctggcattgccttgaacggcaactttgtgaagcttgtgtcctggtacgacaacgagtggggatacagcacccgagtggtcgacctgatccgccacatgaacagcaccaagtaaatgaacaaactgatgaaagcatgcaaagagtgatgaaagcatgcaaagagagttgtgtttcttccccggaagtgcttccgagaataaatttttcttatctgattgtctaaaacctataattggtgtaatggtatcgtagtggttggttgagcattgagtgactcatattttgtcaggtctatgtgttatcgttaaacttttaacggtcattctatttcaaaagttttgcattttgcaatctttgacgctccatttcacttcatagttccacgtcatttcttccttcatttggctatttggttgtcggcttctttatagttccacgtcttttcttccttc

SEQ ID NO: 40200 - DNA, 1290 bp, Zea Mays
tgactgtcatgtgctttggattattatataggcaatctgtttttttcttgggaatcctatgctaagacctacatgttcaagtatgacactgtgcacggacagtggaagcaccatgaggtcaaggtgaaggactccaagacccttctctttggtgagaaggaggttgctgtgtttggctgcaggaaccctgaggagatcccatggggttcggttggcgctgaatatgttgttgagtctactggtgttttcactgaccaggagaaggctgcagctcacttgaagggtggtgccaagaaggttgtcatttctgctcctagcaaggatgcccccatgttcgttgttggtgtcaacgagaaggagtacaagtctgacatcaacattgtctctaatgctagctgcacaaccaactgccttgctccgcttgctaaggtcatcaatgacaagttcggtattgttgagggtctgatgaccactgttcatgccatcactgctacccagaagactgttgatgggccctcatctaaggactggaggggtggaagggctgctagtttcaacatcattcccagcagcactggagctgctaaggctgttggcaaagtgcttcctgtcctcaatggaaaattgactggaatgtctttccgtgtcccaactgtcgatgtttctgttgttgatctgactgttaggcttgagaagtctgccacctatgatgagatcaaggctgcggtcaaggccgaggcagagggtagcctcaagggcattctgggttatgtcgaggaggaccttgtttccaccgatttccagggtgacagcaggtctagcatctttgatgcgaaggctggcattgccttgaacggcaactttgtgaagcttgtgtcctggtacgacaacgagtggggatacagcacccgagtggtcgacctgatccgccacatgaacagcaccaagtaaatgaacaaactgatgaaagcatgcaaagagtgatgaaagcatgcaaagagagttgtgtttcttccccggaagtgcttccgagaataaatttttcttatctgattgtctaaaacctataattggtgtaatggtatcgtagtggttggttgagcattgagtgactcatattttgtcaggtctatgtgttatcgttaaacttttaacggtcattctatttcaaaagttttgcattttgcaatctttgacgctccatttcacttcatagttccacgtcatttcttccttcatttggctatttggttgtcggcttctttatagttccacgtcttttcttccttc

SEQ ID NO: 40201 - DNA, 1255 bp, Zea Mays
atctgtattctctacagaatttaattctctgacctacatgttcaagtatgacactgtgcacggacagtggaagcaccatgaggtcaaggtgaaggactccaagacccttctctttggtgagaaggaggttgctgtgtttggctgcaggaaccctgaggagatcccatggggttcggttggcgctgaatatgttgttgagtctactggtgttttcactgaccaggagaaggctgcagctcacttgaagggtggtgccaagaaggttgtcatttctgctcctagcaaggatgcccccatgttcgttgttggtgtcaacgagaaggagtacaagtctgacatcaacattgtctctaatgctagctgcacaaccaactgccttgctccgcttgctaaggtcatcaatgacaagttcggtattgttgagggtctgatgaccactgttcatgccatcactgctacccagaagactgttgatgggccctcatctaaggactggaggggtggaagggctgctagtttcaacatcattcccagcagcactggagctgctaaggctgttggcaaagtgcttcctgtcctcaatggaaaattgactggaatgtctttccgtgtcccaactgtcgatgtttctgttgttgatctgactgttaggcttgagaagtctgccacctatgatgagatcaaggctgcggtcaaggccgaggcagagggtagcctcaagggcattctgggttatgtcgaggaggaccttgtttccaccgatttccagggtgacagcaggtctagcatctttgatgcgaaggctggcattgccttgaacggcaactttgtgaagcttgtgtcctggtacgacaacgagtggggatacagcacccgagtggtcgacctgatccgccacatgaacagcaccaagtaaatgaacaaactgatgaaagcatgcaaagagtgatgaaagcatgcaaagagagttgtgtttcttccccggaagtgcttccgagaataaatttttcttatctgattgtctaaaacctataattggtgtaatggtatcgtagtggttggttgagcattgagtgactcatattttgtcaggtctatgtgttatcgttaaacttttaacggtcattctatttcaaaagttttgcattttgcaatctttgacgctccatttcacttcatagttccacgtcatttcttccttcatttggctatttggttgtcggcttctttatagttccacgtcttttcttccttc

SEQ ID NO: 40202 - DNA, 1602 bp, Zea Mays
agtcactgcgcgccatcgccatcacttcattcagtgccctctgtggctctgtgtctctatcaatctctctgtgtgctttccagctttctggtgtcgtacggcttctcgacctcttcttttatttcgggcctccagccctccaggggatgatgggcctaagctacgacgcggacagcgggagacgcctgctggctcgctacgccaaggcgaagccgaggccgtccaagtgggacgacgcgcagcggtggctctcctcctcccgtgcgcacgacgacgacgaccggcgccggagctcctgcgcggacgaccgcctcctgctgccgtcggcatcgcagaaggcgcgacactcgtggagcgccgcggacggcggcgccgccctgcccgcggcgctggggctcggcgcgcgggacgacgcgggtgcggaggcggagaccaagagggtggactccgttctggcgtacgggcagccgccccggtgcccctcgctgcgggacgtcggcacggagatgacgccggccgggagcaaagagccatccagggccaacaccccacgcgcaaccctaccggccacgccgccgtccacggcggggcgcgcgatccacgcaccgctgcgcccaccggatttgtctacggtcgacggtggatcgccaccaggcctagcggcagcggaccgcgacgagacggcgcccggtgcgccgacgacgacggccgtgtcgcccgcggcgacgtgggacgccgccgagcgcgccaagcacatggccaggtgaccgccatcactcgctagctgccggctaccgaataccaacgcgcgctttctcctccgcacgttgctgaaccatgtggaggggcaaaacggcggcaacaaacggtcaaacgccactgccacggtagcagactagcagtgccggtgcatgcaccggagtggtgtgttgcctttgctttgcctgttgcctcactcacagactcactgatgagcagctcgtactgtactgtacatgctctgcgtgctgacgaggtcgctggcgctctcttctcgcaggtatcggcgcgaggagatgaaaatacaggcctgggaaaaccggcgacggcaaaaggcggagctgcaaatgaaggtggccgaggccaaggcggagaggatgaagctacgggcgcaggagaagacggcgagcaagctggcctcggcgcaggcggctgcgagggagaagcgcgcgcaggcggaggccaagctgaaccggcgcgccgcgcgggtcgacagggcggacgcgctcaggcggaccggccacctgccgtcctcctcctccgtgttctcgctcaagctgccgctgatgtgcagatgagagccgaccgaggggggtgtggcacagcagttcacacggatgctgttcagagtttcagtcaactgtcctgttagaattggtcgggacgctgctcgcgtccttgtgtttcagccgagcggtttgcgatgcacacaggcacatggcacttagaattgtagacatttgtttttttatctgcacaaatcagtgaagaacaaaaatattttatatttactctattggtccaaataaaaggataactaccgtttaaagcggttcacgcttg

SEQ ID NO: 40203 - DNA, 2226 bp, Zea Mays
aagcctataaaaaatccaacaatttctaacatgcaatacattgtcaacatataactcaagatatcgagtatacattggataatgccatgagcatgatctatcaaatattttagaaaggaaaaattaatgaaaacgaaataggaaaaaattatagtatgaacttttatttggtcgtccatctaaaaagcccattaattgagcacaaagccaagttccaccaggccgaaacgtttctttagtctttaccctaaccttccagcgaaggcacacagccgccgccgtttcttcatcttctcgcagcgccggcgctccatcttcccctcccttccgtactcgcgctcggcacgcgggcaacggcagcggcgctcaggctctcagcgacggcgtcagcggcttcccctcccgactctcgccagtcgcctcgcgccctagcctccgatcctccgcacaccggccggtgacccagcgttcagttagtggtccattgaagtgtagctgtattgcgatcttcaactgctggggccatggcctacgagattagtgagatcaaaaagattggcataggtctggtggggtttggcatcctattctcattccttggtgttatccttttcttcgataggggcttgttagctctgggtaatattttctttttaactggagtgggtctgttactcggttggcaatctatgtggcagcttttcacaaagaaggcaaaccttaaggtactctagacgtgcatagatacaggatcacttttctgaagtttgtcttttccattattgatcctcataaatttttatttctgttctaaacatgaagttgtgttgtataatacttgaactgatgaagttcctagtgtttgggcatctttgtgatggtggctgttgcagtataccatcaaaatgtggaagcagaaagataactttgacaggattattatagttttatttcatccttgaaatatggttttaggtgatagttatttttgtttattattccatcttcgccaaattaataacttcttgatttgtccgatttcagttgaagctaaccttctgaatgtgtgttgatgcaacaacttctcttagcataattttataagcaaacaaataatttattatgaggatgtatttatttaggggaacaacgctgagatatggttgtgttctctcaatggcaattagtatctttgtgttattcaatgttgcttgtgtgttatgttctttagtgaacatgtgtgttaagttggtcttaagcctacaccaacttgattggggcttggggcctttgttgttaggctaaagttgagccatatgcaagtccaggagacaaggacacacatgatatagtattgtagaatgcatactctgtggcagcaatttctatctagcaagtccaagtgctttggcattagaacgtctcttgatcggtatcaactaatatatagcttctcttttgaacgccgacctcagttatttgtctcatatttgaagtggtaacgttgttcaaccacagggatcagtgcctttcttcattggtttgtttcttctgtttgtccgttggcctgttgctggtataatcatggaactatatggatcttttgtgctcttcagtggttatgggcctcctatccaggccttcctgtatcaaataccaatcattggttggattctgcagtacccattccagctgcttggtcagttgaggcgtaaacgcacctgaaatgttctgcaactgccaagatactctttgactcttcatggttaaagctatggtttattgttcatatttagacaataagagttcataagttgatggatgctccgactcttgaagcaggacctcagtgccttttggtcatcacaacaacaatggggccagagtgatcacacctgatttatttctgattctggaatctggacacaatttgacaaattattttgcaagttgcacggacggaacccttgaagaaaactagagaaaacaaaatcttacagtggagcttgatagcccacctgatgaataccacgcgtgatctgcttcatttttttgtcagatgcaatgttcatatgatgagagcacaaattcaaaatcagagaagccgtcttcaacagctagtgcaggcctctccaatccttttgtttttttcttctatgagaagcttgctcaatgtcactctcttgatattgtcttaatatgttttgattaagatgcctatgttgg

SEQ ID NO: 40204 - DNA, 1934 bp, Zea Mays
aaagccaagttccaccaggccgaaacgtttctttagtctttaccctaaccttccagcgaaggcacacagccgccgccgtttcttcatcttctcgcagcgccggcgctccatcttcccctcccttccgtactcgcgctcggcacgcgggcaacggcagcggcgctcaggctctcagcgacggcgtcagcggcttcccctcccgactctcgccagtcgcctcgcgccctagcctccgatcctccgcacaccggccggtgacccagcgttcagttagtggtccattgaagtgtagctgtattgcgatcttcaactgctggggccatggcctacgagattagtgagatcaaaaagattggcataggtctggtggggtttggcatcctattctcattccttggtgttatccttttcttcgataggggcttgttagctctgggtaatattttctttttaactggagtgggtctgttactcggttggcaatctatgtggcagcttttcacaaagaaggcaaaccttaaggtactctagacgtgcatagatacaggatcacttttctgaagtttgtcttttccattattgatcctcataaatttttatttctgttctaaacatgaagttgtgttgtataatacttgaactgatgaagttcctagtgtttgggcatctttgtgatggtggctgttgcagtataccatcaaaatgtggaagcagaaagataactttgacaggattattatagttttatttcatccttgaaatatggttttaggtgatagttatttttgtttattattccatcttcgccaaattaataacttcttgatttgtccgatttcagttgaagctaaccttctgaatgtgtgttgatgcaacaacttctcttagcataattttataagcaaacaaataatttattatgaggatgtatttatttaggggaacaacgctgagatatggttgtgttctctcaatggcaattagtatctttgtgttattcaatgttgcttgtgtgttatgttctttagtgaacatgtgtgttaagttggtcttaagcctacaccaacttgattggggcttggggcctttgttgttaggctaaagttgagccatatgcaagtccaggagacaaggacacacatgatatagtattgtagaatgcatactctgtggcagcaatttctatctagcaagtccaagtgctttggcattagaacgtctcttgatcggtatcaactaatatatagcttctcttttgaacgccgacctcagttatttgtctcatatttgaagtggtaacgttgttcaaccacagggatcagtgcctttcttcattggtttgtttcttctgtttgtccgttggcctgttgctggtataatcatggaactatatggatcttttgtgctcttcagtggttatgggcctcctatccaggccttcctgtatcaaataccaatcattggttggattctgcagtacccattccagctgcttggtcagttgaggcgtaaacgcacctgaaatgttctgcaactgccaagatactctttgactcttcatggttaaagacctcagtgccttttggtcatcacaacaacaatggggccagagtgatcacacctgatttatttctgattctggaatctggacacaatttgacaaattattttgcaagttgcacggacggaacccttgaagaaaactagagaaaacaaaatcttacagtggagcttgatagcccacctgatgaataccacgcgtgatctgcttcatttttttgtcagatgcaatgttcatatggtgagacgcctttggtatttgaatttcgttgcagatagtgacatatggttctatcagctgaagagtgatgcctttttccattgttttgattggaaatgtgatgctgttaatgtttggaacaatgatttattac

SEQ ID NO: 40205 - DNA, 1328 bp, Zea Mays
aaagccaagttccaccaggccgaaacgtttctttagtctttaccctaaccttccagcgaaggcacacagccgccgccgtttcttcatcttctcgcagcgccggcgctccatcttcccctcccttccgtactcgcgctcggcacgcgggcaacggcagcggcgctcaggctctcagcgacggcgtcagcggcttcccctcccgactctcgccagtcgcctcgcgccctagcctccgatcctccgcacaccggccggtgacccagcttagtggtccattgaagtgtagctgtattgcgatcttcaactgctggggccatggcctacgagattagtgagatcaaaaagattggcataggtctggtggggtttggcatcctattctcattccttggtgttatccttttcttcgataggggcttgttagctctggattttctttttaactggagtgggtctgttactcggttggcaatctatgtggcagcttttcacaaagaaggcaaaccttaagggatcagtgcctttcttcattggtttgtttcttctgtttgtccgttggcctgttgctggtataatcatggaactatatggatcttttgtgctcttcagtggttatgggcctcctatccaggccttcctgtatcaaataccaatcattggttggattctgcagtacccattccagctgcttggtcagttgaggcgtaaacgcacctgaaatgttctgcaactgccaagatactctttgactcttcatggttaaagtaccgtgttgttgtgatgtttatacatgattctcacttgtacccttcaatccttcacgttgcgtcttcaactcttgtgcatattcgtactctgagtcattctggcattgtccctttttgcgagcaggctatggtttattgttcatatttagacaataagagttcataagttgatggatgctccgactcttgaagcaggacctcagtgccttttggtcatcacaacaacaatggggccagagtgatcacacctgatttatttctgattctggaatctggacacaatttgacaaattattttgcaagttgcacggacggaacccttgaagaaaactagagaaaacaaaatcttacagtggagcttgatagcccacctgatgaataccacgcgtgatctgcttcatttttttgtcagatgcaatgttcatatggtgagacgcctttggtatttgaatttcgttgcagatagtgacatatggttctatcagctgaagagtgatgcctttttccattgttttgattggaaatgtgatgctgttaatgtttggaacaatgatttattac

SEQ ID NO: 40206 - DNA, 1135 bp, Zea Mays
aaagccaagttccaccaggccgaaacgtttctttagtctttaccctaaccttccagcgaaggcacacagccgccgccgtttcttcatcttctcgcagcgccggcgctccatcttcccctcccttccgtactcgcgctcggcacgcgggcaacggcagcggcgctcaggctctcagcgacggcgtcagcggcttcccctcccgactctcgccagtcgcctcgcgccctagcctccgatcctccgcacaccggccggtgacccagcttagtggtccattgaagtgtagctgtattgcgatcttcaactgctggggccatggcctacgagattagtgagatcaaaaagattggcataggtctggtggggtttggcatcctattctcattccttggtgttatccttttcttcgataggggcttgttagctctgggtaatattttctttttaactggagtgggtctgttactcggttggcaatctatgtggcagcttttcacaaagaaggcaaaccttaagggatcagtgcctttcttcattggtttgtttcttctgtttgtccgttggcctgttgctggtataatcatggaactatatggatcttttgtgctcttcagtggttatgggcctcctatccaggccttcctgtatcaaataccaatcattggttggattctgcagtacccattccagctgcttggtcagttgaggcgtaaacgcacctgaaatgttctgcaactgccaagatactctttgactcttcatggttaaagacctcagtgccttttggtcatcacaacaacaatggggccagagtgatcacacctgatttatttctgattctggaatctggacacaatttgacaaattattttgcaagttgcacggacggaacccttgaagaaaactagagaaaacaaaatcttacagtggagcttgatagcccacctgatgaataccacgcgtgatctgcttcatttttttgtcagatgcaatgttcatatggtgagacgcctttggtatttgaatttcgttgcagatagtgacatatggttctatcagctgaagagtgatgcctttttccattgttttgattggaaatgtgatgctgttaatgtttggaacaatgatttattac

SEQ ID NO: 40207 - DNA, 1234 bp, Zea Mays
aaagccaagttccaccaggccgaaacgtttctttagtctttaccctaaccttccagcgaaggcacacagccgccgccgtttcttcatcttctcgcagcgccggcgctccatcttcccctcccttccgtactcgcgctcggcacgcgggcaacggcagcggcgctcaggctctcagcgacggcgtcagcggcttcccctcccgactctcgccagtcgcctcgcgccctagcctccgatcctccgcacaccggccggtgacccagcttagtggtccattgaagtgtagctgtattgcgatcttcaactgctggggccatggcctacgagattagtgagatcaaaaagattggcataggtctggtggggtttggcatcctattctcattccttggtgttatccttttcttcgataggggcttgttagctctgggtaatattttctttttaactggagtgggtctgttactcggttggcaatctatgtggcagcttttcacaaagaaggcaaaccttaagggatcagtgcctttcttcattggtttgtttcttctgtttgtccgttggcctgttgctggtataatcatggaactatatggatcttttgtgctcttcagtggttatgggcctcctatccaggccttcctgtatcaaataccaatcattggttggattctgcagtacccattccagctgcttggtcagttgaggcgtaaacgcacctgaaatgttctgcaactgccaagatactctttgactcttcatggttaaagctatggtttattgttcatatttagacaataagagttcataagttgatggatgctccgactcttgaagcaggacctcagtgccttttggtcatcacaacaacaatggggccagagtgatcacacctgatttatttctgattctggaatctggacacaatttgacaaattattttgcaagttgcacggacggaacccttgaagaaaactagagaaaacaaaatcttacagtggagcttgatagcccacctgatgaataccacgcgtgatctgcttcatttttttgtcagatgcaatgttcatatgattaggataaaaggctatcaacctcgggtacacatcacacctggtgaagttactgccaacttgttagtataaaaggctattacaaggactgatttattgacaagagaaatgaagtggatttttgggaagaagtcccctttctatccaaaattgaatagcta

SEQ ID NO: 40208 - DNA, 2027 bp, Zea Mays
aaagccaagttccaccaggccgaaacgtttctttagtctttaccctaaccttccagcgaaggcacacagccgccgccgtttcttcatcttctcgcagcgccggcgctccatcttcccctcccttccgtactcgcgctcggcacgcgggcaacggcagcggcgctcaggctctcagcgacggcgtcagcggcttcccctcccgactctcgccagtcgcctcgcgccctagcctccgatcctccgcacaccggccggtgacccagcttagtggtccattgaagtgtagctgtattgcgatcttcaactgctggggccatggcctacgagattagtgagatcaaaaagattggcataggtctggtggggtttggcatcctattctcattccttggtgttatccttttcttcgataggggcttgttagctctgggtaatattttctttttaactggagtgggtctgttactcggttggcaatctatgtggcagcttttcacaaagaaggcaaaccttaaggtactctagacgtgcatagatacaggatcacttttctgaagtttgtcttttccattattgatcctcataaatttttatttctgttctaaacatgaagttgtgttgtataatacttgaactgatgaagttcctagtgtttgggcatctttgtgatggtggctgttgcagtataccatcaaaatgtggaagcagaaagataactttgacaggattattatagttttatttcatccttgaaatatggttttaggtgatagttatttttgtttattattccatcttcgccaaattaataacttcttgatttgtccgatttcagttgaagctaaccttctgaatgtgtgttgatgcaacaacttctcttagcataattttataagcaaacaaataatttattatgaggatgtatttatttaggggaacaacgctgagatatggttgtgttctctcaatggcaattagtatctttgtgttattcaatgttgcttgtgtgttatgttctttagtgaacatgtgtgttaagttggtcttaagcctacaccaacttgattggggcttggggcctttgttgttaggctaaagttgagccatatgcaagtccaggagacaaggacacacatgatatagtattgtagaatgcatactctgtggcagcaatttctatctagcaagtccaagtgctttggcattagaacgtctcttgatcggtatcaactaatatatagcttctcttttgaacgccgacctcagttatttgtctcatatttgaagtggtaacgttgttcaaccacagggatcagtgcctttcttcattggtttgtttcttctgtttgtccgttggcctgttgctggtataatcatggaactatatggatcttttgtgctcttcagtggttatgggcctcctatccaggccttcctgtatcaaataccaatcattggttggattctgcagtacccattccagctgcttggtcagttgaggcgtaaacgcacctgaaatgttctgcaactgccaagatactctttgactcttcatggttaaagctatggtttattgttcatatttagacaataagagttcataagttgatggatgctccgactcttgaagcaggacctcagtgccttttggtcatcacaacaacaatggggccagagtgatcacacctgatttatttctgattctggaatctggacacaatttgacaaattattttgcaagttgcacggacggaacccttgaagaaaactagagaaaacaaaatcttacagtggagcttgatagcccacctgatgaataccacgcgtgatctgcttcatttttttgtcagatgcaatgttcatatgattaggataaaaggctatcaacctcgggtacacatcacacctggtgaagttactgccaacttgttagtataaaaggctattacaaggactgatttattgacaagagaaatgaagtggatttttgggaagaagtcccctttctatccaaaattgaatagcta

SEQ ID NO: 40209 - DNA, 1240 bp, Zea Mays
aaagccaagttccaccaggccgaaacgtttctttagtctttaccctaaccttccagcgaaggcacacagccgccgccgtttcttcatcttctcgcagcgccggcgctccatcttcccctcccttccgtactcgcgctcggcacgcgggcaacggcagcggcgctcaggctctcagcgacggcgtcagcggcttcccctcccgactctcgccagtcgcctcgcgccctagcctccgatcctccgcacaccggccggtgacccagcgttcagttagtggtccattgaagtgtagctgtattgcgatcttcaactgctggggccatggcctacgagattagtgagatcaaaaagattggcataggtctggtggggtttggcatcctattctcattccttggtgttatccttttcttcgataggggcttgttagctctgggtaatattttctttttaactggagtgggtctgttactcggttggcaatctatgtggcagcttttcacaaagaaggcaaaccttaagggatcagtgcctttcttcattggtttgtttcttctgtttgtccgttggcctgttgctggtataatcatggaactatatggatcttttgtgctcttcagtggttatgggcctcctatccaggccttcctgtatcaaataccaatcattggttggattctgcagtacccattccagctgcttggtcagttgaggcgtaaacgcacctgaaatgttctgcaactgccaagatactctttgactcttcatggttaaagctatggtttattgttcatatttagacaataagagttcataagttgatggatgctccgactcttgaagcaggacctcagtgccttttggtcatcacaacaacaatggggccagagtgatcacacctgatttatttctgattctggaatctggacacaatttgacaaattattttgcaagttgcacggacggaacccttgaagaaaactagagaaaacaaaatcttacagtggagcttgatagcccacctgatgaataccacgcgtgatctgcttcatttttttgtcagatgcaatgttcatatgattaggataaaaggctatcaacctcgggtacacatcacacctggtgaagttactgccaacttgttagtataaaaggctattacaaggactgatttattgacaagagaaatgaagtggatttttgggaagaagtcccctttctatccaaaattgaatagcta

SEQ ID NO: 40210 - DNA, 1225 bp, Zea Mays
aaagccaagttccaccaggccgaaacgtttctttagtctttaccctaaccttccagcgaaggcacacagccgccgccgtttcttcatcttctcgcagcgccggcgctccatcttcccctcccttccgtactcgcgctcggcacgcgggcaacggcagcggcgctcaggctctcagcgacggcgtcagcggcttcccctcccgactctcgccagtcgcctcgcgccctagcctccgatcctccgcacaccggccggtgacccagcgttcagttagtggtccattgaagtgtagctgtattgcgatcttcaactgctggggccatggcctacgagattagtgagatcaaaaagattggcataggtctggtggggtttggcatcctattctcattccttggtgttatccttttcttcgataggggcttgttagctctggattttctttttaactggagtgggtctgttactcggttggcaatctatgtggcagcttttcacaaagaaggcaaaccttaagggatcagtgcctttcttcattggtttgtttcttctgtttgtccgttggcctgttgctggtataatcatggaactatatggatcttttgtgctcttcagtggttatgggcctcctatccaggccttcctgtatcaaataccaatcattggttggattctgcagtacccattccagctgcttggtcagttgaggcgtaaacgcacctgaaatgttctgcaactgccaagatactctttgactcttcatggttaaagctatggtttattgttcatatttagacaataagagttcataagttgatggatgctccgactcttgaagcaggacctcagtgccttttggtcatcacaacaacaatggggccagagtgatcacacctgatttatttctgattctggaatctggacacaatttgacaaattattttgcaagttgcacggacggaacccttgaagaaaactagagaaaacaaaatcttacagtggagcttgatagcccacctgatgaataccacgcgtgatctgcttcatttttttgtcagatgcaatgttcatatgatgagagcacaaattcaaaatcagagaagccgtcttcaacagctagtgcaggcctctccaatccttttgtttttttcttctatgagaagcttgctcaatgtcactctcttgatattgtcttaatatgttttgattaagatgcctatgttgg

SEQ ID NO: 40211 - DNA, 1953 bp, Zea Mays
cttcctcttcccaccttccctcctcccttctccaatcatccctttctggctttctcctcccccctgagaccccgagtcctgccggattccgagatcccggaggcagcttcccacgggctcctctcactacggtagctggatcaaaccatcgtgctctcgtctcgacagaaaccccggccgaaaacccagccggacccagccctgttcgccgcgcgcgcggtgcccaggccgtgccagatctgcgagatccgcgccgacaccgctacgactatcaccaggtggatgctctcgtgatctctcggaggccgcggggactgagcagcgtctcggcggcggcgtggcctgcatagccgtcggcgtgccgagatgcaacggaacggggtggtggaatgcagcgtgtgccgctcccgggtggtggtgccgagcccccggagcgtgtccagggcgtacgacaagcaccgcaacaagatgtcgtccaagttccgggcgctcaacgtcttcctcgtcgtcggcgactgcatccttgttggtctccagcccatcctagtgttcatgtcaaaggttgatgggaagtttcagttcagtcccatcagtgttaactttctgacggaggttatgaaagtcatctttgctgtcgtcatgctcataattcagtctagaaagcaaaaggttggagaaaagccacttttggcacgttcaaccttcatacagcccgtaataatgtacttctagctgttcctgctcttctatatgcaatcaacaattacctaaaattcatcatgcagttgtacttcaatcctgcaactgtgaaaatgctaagtaacctaaaggtactggttatagcttttcttctgaaatttataatgagaaggagattctcagttattcagtgggaagctcttgctctattgcttattggaatcagcatcaatcaactccgaactgtacctgtgggcaacacagcatttggtcttcctgtcactgctattgcgtacatatatacattgatttttgtaactgttccttcagtggcttctgtctacaatgaatatgccttgaaaagtcaatatgacactagcatctatctccagaacttgtttctgtacggatatggagcaatattcaacttgcttggcattcttgggactgtcctattccaagggccagagagttttaatattcttcgaggccattcaagggccacaatatttctcatatgtaacaatgctgcacaaggcattctatcttcattcttctttaagtatgcagacacaattttgaagaaatattcgtcaactgttgccacaatatttactggcctagcttctgctgcatttttggggcattccttgaccattaattttctcctgggcatatcagtggtgtttatttcaatgcaccagttcttctctccgcttgcaaaagtcaaagatgacaaaccagctgactcaatagagttggaagatacacaaaatgaccgcccatctgaatcttcttttgtaaatatgactgctggtgccgctgatgatgcaagccatcggattggaactgatgagaggcagccgctattgcctatatgaacttgtttgttgaggtaggacagaagagaggggatagaagaagaggctcctttttgccgtgtgagcaacagatttgatgtagcattgttaggcgaataaacagctattgtacactgtagaggcaaaagaaacaaataaacgtggtttccattttctttaaattttttggggataccttgggagcggcagaaatcatacattttgatagacataattcaatagggatttctagatacgatacttgtcaaaaaaaaaagaattcatggagaaacaacggctgtgataatggtttttttaggaaccttttctttatacaattatactattgattaattgttatactattactacattgttacctgattctccaact

SEQ ID NO: 40212 - DNA, 1892 bp, Zea Mays
cttcctcttcccaccttccctcctcccttctccaatcatccctttctggctttctcctcccccctgagaccccgagtcctgccggattccgagatcccggaggcagcttcccacgggctcctctcactacggtagctggatcaaaccatcgtgctctcgtctcgacagaaaccccggccgaaaacccagccggacccagccctgttcgccgcgcgcgcggtgcccaggccgtgccagatctgcgagatccgcgccgacaccgctacgactatcaccaggtggatgctctcgtgatctctcggaggccgcggggactgagcagcgtctcggcggcggcgtggcctgcatagccgtcggcgtgccgagatgcaacggaacggggtggtggaatgcagcgtgtgccgctcccgggtggtggtgccgagcccccggagcgtgtccagggcgtacgacaagcaccgcaacaagatgtcgtccaagttccgggcgctcaacgtcttcctcgtcgtcggcgactgcatccttgttggtctccagcccatcctagtgttcatgtcaaaggttgatgggaagtttcagttcagtcccatcagtgttaactttctgacggaggttatgaaagtcatctttgctgtcgtcatgctcataattcagtctagaaagcaaaaggttggagaaaagccacttttggcacgttcaaccttcatacaggcagcccgtaataatgtacttctagctgttcctgctcttctatatgcaatcaacaattacctaaaattcatcatgcagttgtacttcaatcctgcaactgtgaaaatgctaagtaacctaaaggtactggttatagcttttcttctgaaatttataatgagaaggagattctcagttattcagtgggaagctcttgctctattgcttattggaatcagcatcaatcaactccgaactgtacctgtgggcaacacagcatttggtcttcctgtcactgctattgcgtacatatatacattgatttttgtaactgttccttcagtggcttctgtctacaatgaatatgccttgaaaagtcaatatgacactagcatctatctccagaacttgtttctgtacggatatggagcaatattcaacttgcttggcattcttgggactgtcctattccaagggccagagagttttaatattcttcgaggccattcaagggccacaatatttctcatatgtaacaatgctgcacaaggcattctatcttcattcttctttaagtatgcagacacaattttgaagaaatattcgtcaactgttgccacaatatttactggcctagcttctgctgcatttttggggcattccttgaccattaattttctcctgggcatatcagtggtgtttatttcaatgcaccagttcttctctccgcttgcaaaagtcaaagatgacaaaccagctgactcaatagagttggaagatacacaaaatgaccgcccatctgaatcttcttttgtaaatatgactgctggtgccgctgatgatgtaggacagaagagaggggatagaagaagaggctcctttttgccgtgtgagcaacagatttgatgtagcattgttaggcgaataaacagctattgtacactgtagaggcaaaagaaacaaataaacgtggtttccattttctttaaattttttggggataccttgggagcggcagaaatcatacattttgatagacataattcaatagggatttctagatacgatacttgtcaaaaaaaaaagaattcatggagaaacaacggctgtgataatggtttttttaggaaccttttctttatacaattatactattgattaattgttatactattactacattgttacctgattctccaact

SEQ ID NO: 40213 - DNA, 2041 bp, Zea Mays
cttcctcttcccaccttccctcctcccttctccaatcatccctttctggctttctcctcccccctgagaccccgagtcctgccggattccgagatcccggaggcagcttcccacgggctcctctcactacggtagctggatcaaaccatcgtgctctcgtctcgacagaaaccccggccgaaaacccagccggacccagccctgttcgccgcgcgcgcggtgcccaggccgtgccagatctgcgagatccgcgccgacaccgctacgactatcaccaggtggatgctctcgtgatctctcggaggccgcggggactgagcagcgtctcggcggcggcgtggcctgcatagccgtcggcgtgccgagatgcaacggaacggggtggtggaatgcagcgtgtgccgctcccgggtggtggtgccgagcccccggagcgtgtccagggcgtacgacaagcaccgcaacaagatgtcgtccaagttccgggcgctcaacgtcttcctcgtcgtcggcgactgcatccttgttggtctccagcccatcctagtgttcatgtcaaaggttgatgggaagtttcagttcagtcccatcagtgttaactttctgacggaggttatgaaagtcatctttgctgtcgtcatgctcataattcagtctagaaagcaaaaggttggagaaaagccacttttggcacgttcaaccttcatacaggcagcccgtaataatgtacttctagctgttcctgctcttctatatgcaatcaacaattacctaaaattcatcatgcagttgtacttcaatcctgcaactgtgaaaatgctaagtaacctaaaggtatgtttttcttgtactactgggttgtgctgctttagctttactttgtgtgcacacatatcaaggtacctgtggtcttctctaggtactggttatagcttttcttctgaaatttataatgagaaggagattctcagttattcagtgggaagctcttgctctattgcttattggaatcagcatcaatcaactccgaactgtacctgtgggcaacacagcatttggtcttcctgtcactgctattgcgtacatatatacattgatttttgtaactgttccttcagtggcttctgtctacaatgaatatgccttgaaaagtcaatatgacactagcatctatctccagaacttgtttctgtacggatatggagcaatattcaacttgcttggcattcttgggactgtcctattccaagggccagagagttttaatattcttcgaggccattcaagggccacaatatttctcatatgtaacaatgctgcacaaggcattctatcttcattcttctttaagtatgcagacacaattttgaagaaatattcgtcaactgttgccacaatatttactggcctagcttctgctgcatttttggggcattccttgaccattaattttctcctgggcatatcagtggtgtttatttcaatgcaccagtcttctctccgcttgcaaaagtcaaagatgacaaaccagctgactcaatagagttggaagatacacaaaatgaccgcccatctgaatcttcttttgtaaatatgactgctggtgccgctgatgatgcaagccatcggattggaactgatgagaggcagccgctattgcctatatgaacttgtttgttgaggtaggacagaagagaggggatagaagaagaggctcctttttgccgtgtgagcaacagatttgatgtagcattgttaggcgaataaacagctattgtacactgtagaggcaaaagaaacaaataaacgtggtttccattttctttaaattttttggggataccttgggagcggcagaaatcatacattttgatagacataattcaatagggatttctagatacgatacttgtcaaaaaaaaaagaattcatggagaaacaacggctgtgataatggtttttttaggaaccttttctttatacaattatactattgattaattgttatactattactacattgttacctgattctccaact

SEQ ID NO: 40214 - DNA, 1944 bp, Zea Mays
cttcctcttcccaccttccctcctcccttctccaatcatccctttctggctttctcctcccccctgagaccccgagtcctgccggattccgagatcccggaggcagcttcccacgggctcctctcactacggtagctggatcaaaccatcgtgctctcgtctcgacagaaaccccggccgaaaacccagccggacccagccctgttcgccgcgcgcgcggtgcccaggccgtgccagatctgcgagatccgcgccgacaccgctacgactatcaccaggtggatgctctcgtgatctctcggaggccgcggggactgagcagcgtctcggcggcggcgtggcctgcatagccgtcggcgtgccgagatgcaacggaacggggtggtggaatgcagcgtgtgccgctcccgggtggtggtgccgagcccccggagcgtgtccagggcgtacgacaagcaccgcaacaagatgtcgtccaagttccgggcgctcaacgtcttcctcgtcgtcggcgactgcatccttgttggtctccagcccatcctagtgttcatgtcaaaggttgatgggaagtttcagttcagtcccatcagtgttaactttctgacggaggttatgaaagtcatctttgctgtcgtcatgctcataattcagtctagaaagcaaaaggttggagaaaagccacttttggcacgttcaaccttcatacaggcagcccgtaataatgtacttctagctgttcctgctcttctatatgcaatcaacaattacctaaaattcatcatgcagttgtacttcaatcctgcaactgtgaaaatgctaagtaacctaaagcttttcttctgaaatttataatgagaaggagattctcagttattcagtgggaagctcttgctctattgcttattggaatcagcatcaatcaactccgaactgtacctgtgggcaacacagcatttggtcttcctgtcactgctattgcgtacatatatacattgatttttgtaactgttccttcagtggcttctgtctacaatgaatatgccttgaaaagtcaatatgacactagcatctatctccagaacttgtttctgtacggatatggagcaatattcaacttgcttggcattcttgggactgtcctattccaagggccagagagttttaatattcttcgaggccattcaagggccacaatatttctcatatgtaacaatgctgcacaaggcattctatcttcattcttctttaagtatgcagacacaattttgaagaaatattcgtcaactgttgccacaatatttactggcctagcttctgctgcatttttggggcattccttgaccattaattttctcctgggcatatcagtggtgtttatttcaatgcaccagttcttctctccgcttgcaaaagtcaaagatgacaaaccagctgactcaatagagttggaagatacacaaaatgaccgcccatctgaatcttcttttgtaaatatgactgctggtgccgctgatgatgcaagccatcggattggaactgatgagaggcagccgctattgcctatatgaacttgtttgttgaggtaggacagaagagaggggatagaagaagaggctcctttttgccgtgtgagcaacagatttgatgtagcattgttaggcgaataaacagctattgtacactgtagaggcaaaagaaacaaataaacgtggtttccattttctttaaattttttggggataccttgggagcggcagaaatcatacattttgatagacataattcaatagggatttctagatacgatacttgtcaaaaaaaaaagaattcatggagaaacaacggctgtgataatggtttttttaggaaccttttctttatacaattatactattgattaattgttatactattactacattgttacctgattctccaact

SEQ ID NO: 40215 - DNA, 2360 bp, Zea Mays
gccacaatcgtgaggcgtagaaatagatcacatcaattatcagcgtgccgtcgagacatgtttacccaacgtcaccagccttgacgtcgagcaaaacgtctaaaaaagaaattaagtcgtccatcagtcaaacttaatagctaaagttaaaaaaaaattcggacgacccaaacgccacccagcggccaccgccacgcccgctccgtttcccgattccccagcggccaaaaccctagaaacctccagccagagggaggagttcaagagagagagagtgtgtgagagagaaagagagggagagccggagaggggctatggagaagctggatgagagcaagttcgagcagcggttagagctcttggcgctccgcatcccccgtgagctcgcctccgcagttacccgcctccttcgctccggttatctgctcgacaagccaagggttaaacctgtagttgaggaccccgagggcgacaagaaccggctcgtcatactgtctgaaaggattcagaagcccgatttatctgacatgtcacagcaggcgcttgattcattgaagcaactatgcaatgttgaagttgtaccttacacattgaccctaggttattcatattggagtgcagatcacattttgaagcgaatcctgcctgctggagtggaggtaccctcttcgtttgagacaattgtcatgttgctcatctgaacatatctgatgacttgctagcatataaagatgtcatagcaaaggttatctatgacaaaaattatccaaggattcagaccgtggtgaataaagtggggacaataacaaatgaatttagagtcccgaagtttgagatcttagcagggaaaaatgatatggttactgaaattaaacaatatggtgcaacattcagacttgattatggtttggtctactggaattcaagactcgagcatgagcatatcagattagtttccctgttcaagaaaggagatgttatatgtgacatgtttgctggtataggtccattttcaatcccgtctgctcagaaaggttgtgttgtatatgcaaatgacttgaatccagatagtgttcattatctaagaactaatgcaaagattaacaaggtggaggactatatattcgcctacaacatggatgctagagtgttcatgcaaaaattgatgactgtgcctggcctggaaactagatcagactctcaagttgccactgatgaatcctattctaaagaaggggttccacctaatgaaatttcttcttcaaatggaaaccataatgatgttcgagaggacattaaaaatggtgctaatgaatcctctgcggcaagcactactactaaaaagcgacaacaaacttcagaagaaggtgatgaacctgattgccaagatgcagatgctaataaaacaaaaagacaaaacaaaaagagagtgagaggattagggccactgccatccaagccatgggaacactttgatcatgtactgatgaatctacctgcttccgctttgcagttcctcgattgttttgatggtctcatccaaaagaaatactggacgggatcactaccttggatacactgttattgtttcatccgttcttgtgaatctgaagaatcaattctctctgtaagttcaatcactgatacttattagaccatgtccagcacagcagttcacccatatggtcacccaaaacactattttgcactgtttcaagctgtagactgaactgttcgcagagtggaatttaaatatgggtatgaggatgggtaagctgctggagatagccttactagctgtgatgtaatcgatctcatcatgactgtcattatatgccacctgaagctcagaataaattaagtgctacaatagcagaaccaatattccatagggttcgtgatgttgcaccaaacaaggctatgttttgtttaagcttcaagctacccatggagtgtcttaagggggacagtgaaaatcacatcgaatcagttgccaagtagaccatgccatgctgatattgtgctcctgaagtttttactcatccacctgcagttttttttggagctttaccaaataaatagcaaatgtgctgatgattctggggttagtagttgtagttatatgattatatctgatctggatcaccatccgcaaggagggttaacaagctatttctgatgctaaatgtgagtgatcaggtgtcatataaccattgaagatgttggtggatgaatcaagacgctggtaacatctgattcaaagcgtggtgccatcggtttagtttacaggaagttcactgtcatgtttttttttttggcaacaaagacacaaagtgtgcttagagttatcatgttcacag

SEQ ID NO: 40216 - DNA, 2652 bp, Zea Mays
gatcacatcaattatcagcgtgccgtcgagacatgtttacccaacgtcaccagccttgacgtcgagcaaaacgtctaaaaaagaaattaagtcgtccatcagtcaaacttaatagctaaagttaaaaaaaaattcggacgacccaaacgccacccagcggccaccgccacgcccgctccgtttcccgattccccagcggccaaaaccctagaaacctccagccagagggaggagttcaagagagagagagtgtgtgagagagaaagagagggagagccggagaggggctatggagaagctggatgagagcaagttcgagcagcggttagagctcttggcgctccgcatcccccgtgagctcgcctccgcagttacccgcctccttcgctccggttatctgctcgacaagccaagggttaaacctgtagttgaggaccccgagggcgacaagaaccggctcgtcatactgtctgaaaggattcagaagcccgatttatctgacatgtcacagcaggcgcttgattcattgaagcaactatgcaatgttgaagttgtaccttacacattgaccctaggttattcatattggagtgcagatcacattttgaagcgaatcctgcctgctggagtggaggtcatgttgctcatctgaacatatctgatgacttgctagcatataaagatgtcatagcaaaggttatctatgacaaaaattatccaaggattcagaccgtggtgaataaagtggggacaataacaaatgaatttagagtcccgaagtttgagatcttagcagggaaaaatgatatggttactgaaattaaacaatatggtgcaacattcagacttgattatggtttggtctactggaattcaagactcgagcatgagcatatcagattagtttccctgttcaagaaaggagatgttatatgtgacatgtttgctggtataggtccattttcaatcccgtctgctcagaaaggttgtgttgtatatgcaaatgacttgaatccagatagtgttcattatctaagaactaatgcaaagattaacaaggtggaggactatatattcgcctacaacatggatgctagagtgttcatgcaaaaattgatgactgtgcctggcctggaaactagatcagactctcaagttgccactgatgaatcctattctaaagaaggggttccacctaatgaaatttcttcttcaaatggaaaccataatgatgttcgagaggacattaaaaatggtgctaatgaatcctctgcggcaagcactactactaaaaagcgacaacaaacttcagaagaaggtgatgaacctgattgccaagatgcagatgctaataaaacaaaaagacaaaacaaaaagagagtgagaggattagggccactgccatccaagccatgggaacactttgatcatgtactgatgaatctacctgcttccgctttgcagttcctcgattgttttgatggtctcatccaaaagaaatactggacgggatcactaccttggatacactgttattgtttcatccgttcttgtgaatctgaagaatcaattctctctgtaagttcaatcactgatacttattagaccatgtccagcacagcagttcacccatatggtcacccaaaacactattttgcactgtttcaagctgtagactgaactgttcgcagagtggaatttaaatatgggtatgaggatgggtaagctgctggagatagccttactagctgtgatgtaatcgatctcatcatgactgtcattatatgccacctgtatgtactgtcaactgtgagatagtgctgctttgatttttgacttaaacattttccctttatgcaggaagctcagaataaattaagtgctacaatagcagaaccaatattccatagggttcgtgatgttgcaccaaacaaggctatgttttgtttaagcttcaagctacccatggagtgtcttaagggggacagtgaaaatcacatcgaatcagttgccaagtagaccatgccatgctgatattgtgctcctgaagtttttactcatccacctgcagttttttttggagctttaccaaataaatagcaaatgtgctgatgattctggggtgtcatataaccattgaagatgttggtggatgaatcaagacgctggtaacatctgattcaaagcgtggtgccatcggtttagtttacaggaagttcactgtcatgtttttttttttgggtttagtttacaggaagttccctgtcatctaatgtattgactttttacatggttttgttattgatttgaagaaaatttggtcagaactcaggaccgtttgtagtacttgtcactcgagctctctgtacccaagtgaaagtgtcaggtgttcgaggaaatgttatgttaaaaacatcgaagtgtctcttagactgctactagtcggttgcccgtgcgttgcgacggtttacaacaatacccacgtaaactatccataaatttttttaagattttatattgattgtctccgctctctgtataatatatttttttatttggctaactgatgttattgtttactccatgcaaatatgtcttggtacaacacggccaatgaagtgagcgattagaagagagttcataacgattgac

SEQ ID NO: 40217 - DNA, 2554 bp, Zea Mays
gatcacatcaattatcagcgtgccgtcgagacatgtttacccaacgtcaccagccttgacgtcgagcaaaacgtctaaaaaagaaattaagtcgtccatcagtcaaacttaatagctaaagttaaaaaaaaattcggacgacccaaacgccacccagcggccaccgccacgcccgctccgtttcccgattccccagcggccaaaaccctagaaacctccagccagagggaggagttcaagagagagagagtgtgtgagagagaaagagagggagagccggagaggggctatggagaagctggatgagagcaagttcgagcagcggttagagctcttggcgctccgcatcccccgtgagctcgcctccgcagttacccgcctccttcgctccggatttatctgacatgtcacagcaggcgcttgattcattgaagcaactatgcaatgttgaagttgtaccttacacattgaccctaggttattcatattggagtgcagatcacattttgaagcgaatcctgcctgctggagtggaggtcatgttgctcatctgaacatatctgatgacttgctagcatataaagatgtcatagcaaaggttatctatgacaaaaattatccaaggattcagaccgtggtgaataaagtggggacaataacaaatgaatttagagtcccgaagtttgagatcttagcagggaaaaatgatatggttactgaaattaaacaatatggtgcaacattcagacttgattatggtttggtctactggaattcaagactcgagcatgagcatatcagattagtttccctgttcaagaaaggagatgttatatgtgacatgtttgctggtataggtccattttcaatcccgtctgctcagaaaggttgtgttgtatatgcaaatgacttgaatccagatagtgttcattatctaagaactaatgcaaagattaacaaggtggaggactatatattcgcctacaacatggatgctagagtgttcatgcaaaaattgatgactgtgcctggcctggaaactagatcagactctcaagttgccactgatgaatcctattctaaagaaggggttccacctaatgaaatttcttcttcaaatggaaaccataatgatgttcgagaggacattaaaaatggtgctaatgaatcctctgcggcaagcactactactaaaaagcgacaacaaacttcagaagaaggtgatgaacctgattgccaagatgcagatgctaataaaacaaaaagacaaaacaaaaagagagtgagaggattagggccactgccatccaagccatgggaacactttgatcatgtactgatgaatctacctgcttccgctttgcagttcctcgattgttttgatggtctcatccaaaagaaatactggacgggatcactaccttggatacactgttattgtttcatccgttcttgtgaatctgaagaatcaattctctctgtaagttcaatcactgatacttattagaccatgtccagcacagcagttcacccatatggtcacccaaaacactattttgcactgtttcaagctgtagactgaactgttcgcagagtggaatttaaatatgggtatgaggatgggtaagctgctggagatagccttactagctgtgatgtaatcgatctcatcatgactgtcattatatgccacctgtatgtactgtcaactgtgagatagtgctgctttgatttttgacttaaacattttccctttatgcaggaagctcagaataaattaagtgctacaatagcagaaccaatattccatagggttcgtgatgttgcaccaaacaaggctatgttttgtttaagcttcaagctacccatggagtgtcttaagggggacagtgaaaatcacatcgaatcagttgccaagtagaccatgccatgctgatattgtgctcctgaagtttttactcatccacctgcagttttttttggagctttaccaaataaatagcaaatgtgctgatgattctggggtgtcatataaccattgaagatgttggtggatgaatcaagacgctggtaacatctgattcaaagcgtggtgccatcggtttagtttacaggaagttcactgtcatgtttttttttttgggtttagtttacaggaagttccctgtcatctaatgtattgactttttacatggttttgttattgatttgaagaaaatttggtcagaactcaggaccgtttgtagtacttgtcactcgagctctctgtacccaagtgaaagtgtcaggtgttcgaggaaatgttatgttaaaaacatcgaagtgtctcttagactgctactagtcggttgcccgtgcgttgcgacggtttacaacaatacccacgtaaactatccataaatttttttaagattttatattgattgtctccgctctctgtataatatatttttttatttggctaactgatgttattgtttactccatgcaaatatgtcttggtacaacacggccaatgaagtgagcgattagaagagagttcataacgattgac

SEQ ID NO: 40218 - DNA, 2287 bp, Zea Mays
gatcacatcaattatcagcgtgccgtcgagacatgtttacccaacgtcaccagccttgacgtcgagcaaaacgtctaaaaaagaaattaagtcgtccatcagtcaaacttaatagctaaagttaaaaaaaaattcggacgacccaaacgccacccagcggccaccgccacgcccgctccgtttcccgattccccagcggccaaaaccctagaaacctccagccagagggaggagttcaagagagagagagtgtgtgagagagaaagagagggagagccggagaggggctatggagaagctggatgagagcaagttcgagcagcggttagagctcttggcgctccgcatcccccgtgagctcgcctccgcagttacccgcctccttcgctccggttatctgctcgacaagccaagggttaaacctgtagttgaggaccccgagggcgacaagaaccggctcgtcatactgtctgaaaggattcagaagcccgatttatctgacatgtcacagcaggcgcttgattcattgaagcaactatgcaatgttgaagttgtaccttacacattgaccctaggttattcatattggagtgcagatcacattttgaagcgaatcctgcctgctggagtggaggtaccctcttcgtttgagacaattgtcatgttgctcatctgaacatatctgatgacttgctagcatataaagatgtcatagcaaaggttatctatgacaaaaattatccaaggattcagaccgtggtgaataaagtggggacaataacaaatgaatttagagtcccgaagtttgagatcttagcagggaaaaatgatatggttactgaaattaaacaatatggtgcaacattcagacttgattatggtttggtctactggaattcaagactcgagcatgagcatatcagattagtttccctgttcaagaaaggagatgttatatgtgacatgtttgctggtataggtccattttcaatcccgtctgctcagaaaggttgtgttgtatatgcaaatgacttgaatccagatagtgttcattatctaagaactaatgcaaagattaacaaggtggaggactatatattcgcctacaacatggatgctagagtgttcatgcaaaaattgatgactgtgcctggcctggaaactagatcagactctcaagttgccactgatgaatcctattctaaagaaggggttccacctaatgaaatttcttcttcaaatggaaaccataatgatgttcgagaggacattaaaaatggtgctaatgaatcctctgcggcaagcactactactaaaaagcgacaacaaacttcagaagaaggtgatgaacctgattgccaagatgcagatgctaataaaacaaaaagacaaaacaaaaagagagtgagaggattagggccactgccatccaagccatgggaacactttgatcatgtactgatgaatctacctgcttccgctttgcagttcctcggaagctcagaataaattaagtgctacaatagcagaaccaatattccatagggttcgtgatgttgcaccaaacaaggctatgttttgtttaagcttcaagctacccatggagtgtcttaagggggacagtgaaaatcacatcgaatcagttgccaagtagaccatgccatgctgatattgtgctcctgaagtttttactcatccacctgcagttttttttggagctttaccaaataaatagcaaatgtgctgatgattctggggtgtcatataaccattgaagatgttggtggatgaatcaagacgctggtaacatctgattcaaagcgtggtgccatcggtttagtttacaggaagttcactgtcatgtttttttttttgggtttagtttacaggaagttccctgtcatctaatgtattgactttttacatggttttgttattgatttgaagaaaatttggtcagaactcaggaccgtttgtagtacttgtcactcgagctctctgtacccaagtgaaagtgtcaggtgttcgaggaaatgttatgttaaaaacatcgaagtgtctcttagactgctactagtcggttgcccgtgcgttgcgacggtttacaacaatacccacgtaaactatccataaatttttttaagattttatattgattgtctccgctctctgtataatatatttttttatttggctaactgatgttattgtttactccatgcaaatatgtcttggtacaacacggccaatgaagtgagcgattagaagagagttcataacgattgac

SEQ ID NO: 40219 - DNA, 2558 bp, Zea Mays
gatcacatcaattatcagcgtgccgtcgagacatgtttacccaacgtcaccagccttgacgtcgagcaaaacgtctaaaaaagaaattaagtcgtccatcagtcaaacttaatagctaaagttaaaaaaaaattcggacgacccaaacgccacccagcggccaccgccacgcccgctccgtttcccgattccccagcggccaaaaccctagaaacctccagccagagggaggagttcaagagagagagagtgtgtgagagagaaagagagggagagccggagaggggctatggagaagctggatgagagcaagttcgagcagcggttagagctcttggcgctccgcatcccccgtgagctcgcctccgcagttacccgcctccttcgctccggttatctgctcgacaagccaagggttaaacctgtagttgaggaccccgagggcgacaagaaccggctcgtcatactgtctgaaaggattcagaagcccgatttatctgacatgtcacagcaggcgcttgattcattgaagcaactatgcaatgttgaagttgtaccttacacattgaccctaggttattcatattggagtgcagatcacattttgaagcgaatcctgcctgctggagtggaggtaccctcttcgtttgagacaattgtcatgttgctcatctgaacatatctgatgacttgctagcatataaagatgtcatagcaaaggttatctatgacaaaaattatccaaggattcagaccgtggtgaataaagtggggacaataacaaatgaatttagagtcccgaagtttgagatcttagcagggaaaaatgatatggttactgaaattaaacaatatggtgcaacattcagacttgattatggtttggtctactggaattcaagactcgagcatgagcatatcagattagtttccctgttcaagaaaggagatgttatatgtgacatgtttgctggtataggtccattttcaatcccgtctgctcagaaaggttgtgttgtatatgcaaatgacttgaatccagatagtgttcattatctaagaactaatgcaaagattaacaaggtggaggactatatattcgcctacaacatggatgctagagtgttcatgcaaaaattgatgactgtgcctggcctggaaactagatcagactctcaagttgccactgatgaatcctattctaaagaaggggttccacctaatgaaatttcttcttcaaatggaaaccataatgtttttcttcaactctttctagatgttcgagaggacattaaaaatggtgctaatgaatcctctgcggcaagcactactactaaaaagcgacaacaaacttcagaagaaggtgatgaacctgattgccaagatgcagatgctaataaaacaaaaagacaaaacaaaaagagagtgagaggattagggccactgccatccaagccatgggaacactttgatcatgtactgatgaatctacctgcttccgctttgcagttcctcgattgttttgatggtctcatccaaaagaaatactggacgggatcactaccttggatacactgttattgtttcatccgttcttgtgaatctgaagaatcaattctctctgtaagttcaatcactgatacttattagaccatgtccagcacagcagttcacccatatggtcacccaaaacactattttgcactgtttcaagctgtagactgaactgttcgcagagtggaatttaaatatgggtatgaggatgggaagctcagaataaattaagtgctacaatagcagaaccaatattccatagggttcgtgatgttgcaccaaacaaggctatgttttgtttaagcttcaagctacccatggagtgtcttaagggggacagtgaaaatcacatcgaatcagttgccaagtagaccatgccatgctgatattgtgctcctgaagtttttactcatccacctgcagttttttttggagctttaccaaataaatagcaaatgtgctgatgattctggggtgtcatataaccattgaagatgttggtggatgaatcaagacgctggtaacatctgattcaaagcgtggtgccatcggtttagtttacaggaagttcactgtcatgtttttttttttgggtttagtttacaggaagttccctgtcatctaatgtattgactttttacatggttttgttattgatttgaagaaaatttggtcagaactcaggaccgtttgtagtacttgtcactcgagctctctgtacccaagtgaaagtgtcaggtgttcgaggaaatgttatgttaaaaacatcgaagtgtctcttagactgctactagtcggttgcccgtgcgttgcgacggtttacaacaatacccacgtaaactatccataaatttttttaagattttatattgattgtctccgctctctgtataatatatttttttatttggctaactgatgttattgtttactccatgcaaatatgtcttggtacaacacggccaatgaagtgagcgattagaagagagttcataacgattgac

SEQ ID NO: 40220 - DNA, 2370 bp, Zea Mays
gatcacatcaattatcagcgtgccgtcgagacatgtttacccaacgtcaccagccttgacgtcgagcaaaacgtctaaaaaagaaattaagtcgtccatcagtcaaacttaatagctaaagttaaaaaaaaattcggacgacccaaacgccacccagcggccaccgccacgcccgctccgtttcccgattccccagcggccaaaaccctagaaacctccagccagagggaggagttcaagagagagagagtgtgtgagagagaaagagagggagagccggagaggggctatggagaagctggatgagagcaagttcgagcagcggttagagctcttggcgctccgcatcccccgtgagctcgcctccgcagttacccgcctccttcgctccggttatctgctcgacaagccaagggttaaacctgtagttgaggaccccgagggcgacaagaaccggctcgtcatactgtctgaaaggattcagaagcccgatttatctgacatgtcacagcaggcgcttgattcattgaagcaactatgcaatgttgaagttgtaccttacacattgaccctaggttattcatattggagtgcagatcacattttgaagcgaatcctgcctgctggagtggaggtcatgttgctcatctgaacatatctgatgacttgctagcatataaagatgtcatagcaaaggttatctatgacaaaaattatccaaggattcagaccgtggtgaataaagtggggacaataacaaatgaatttagagtcccgaagtttgagatcttagcagggaaaaatgatatggttactgaaattaaacaatatggtgcaacattcagacttgattatggtttggtctactggaattcaagactcgagcatgagcatatcagattagtttccctgttcaagaaaggagatgttatatgtgacatgtttgctggtataggtccattttcaatcccgtctgctcagaaaggttgtgttgtatatgcaaatgacttgaatccagatagtgttcattatctaagaactaatgcaaagattaacaaggtggaggactatatattcgcctacaacatggatgctagagtgttcatgcaaaaattgatgactgtgcctggcctggaaactagatcagactctcaagttgccactgatgaatcctattctaaagaaggggttccacctaatgaaatttcttcttcaaatggaaaccataatgatgttcgagaggacattaaaaatggtgctaatgaatcctctgcggcaagcactactactaaaaagcgacaacaaacttcagaagaaggtgatgaacctgattgccaagatgcagatgctaataaaacaaaaagacaaaacaaaaagagagtgagaggattagggccactgccatccaagccatgggaacactttgatcatgtactgatgaatctacctgcttccgctttgcagttcctcgattgttttgatggtctcatccaaaagaaatactggacgggatcactaccttggatacactgttattgtttcatccgttcttgtgaatctgaagaatcaattctctctgaagctcagaataaattaagtgctacaatagcagaaccaatattccatagggttcgtgatgttgcaccaaacaaggctatgttttgtttaagcttcaagctacccatggagtgtcttaagggggacagtgaaaatcacatcgaatcagttgccaagtagaccatgccatgctgatattgtgctcctgaagtttttactcatccacctgcagttttttttggagctttaccaaataaatagcaaatgtgctgatgattctggggtgtcatataaccattgaagatgttggtggatgaatcaagacgctggtaacatctgattcaaagcgtggtgccatcggtttagtttacaggaagttcactgtcatgtttttttttttgggtttagtttacaggaagttccctgtcatctaatgtattgactttttacatggttttgttattgatttgaagaaaatttggtcagaactcaggaccgtttgtagtacttgtcactcgagctctctgtacccaagtgaaagtgtcaggtgttcgaggaaatgttatgttaaaaacatcgaagtgtctcttagactgctactagtcggttgcccgtgcgttgcgacggtttacaacaatacccacgtaaactatccataaatttttttaagattttatattgattgtctccgctctctgtataatatatttttttatttggctaactgatgttattgtttactccatgcaaatatgtcttggtacaacacggccaatgaagtgagcgattagaagagagttcataacgattgac

SEQ ID NO: 40221 - DNA, 2120 bp, Zea Mays
gatcacatcaattatcagcgtgccgtcgagacatgtttacccaacgtcaccagccttgacgtcgagcaaaacgtctaaaaaagaaattaagtcgtccatcagtcaaacttaatagctaaagttaaaaaaaaattcggacgacccaaacgccacccagcggccaccgccacgcccgctccgtttcccgattccccagcggccaaaaccctagaaacctccagccagagggaggagttcaagagagagagagtgtgtgagagagaaagagagggagagccggagaggggctatggagaagctggatgagagcaagttcgagcagcggttagagctcttggcgctccgcatcccccgtgagctcgcctccgcagttacccgcctccttcgctccggttatctgctcgacaagccaagggttaaacctgtagttgaggaccccgagggcgacaagaaccggctcgtcatactgtctgaaaggattcagaagcccgatttatctgacatgtcacagcaggcgcttgattcattgaagcaactatgcaatgttgaagttgtaccttacacattgaccctaggttattcatattggagtgcagatcacattttgaagcgaatcctgcctgctggagtggaggtaccctcttcgtttgagacaattgtcatgttgctcatctgaacatatctgatgacttgctagcatataaagatgtcatagcaaaggttatctatgacaaaaattatccaaggattcagaccgtggtgaataaagtggggacaataacaaatgaatttagagtcccgaagtttgagatcttagcagggaaaaatgatatggttactgaaattaaacaatatggtgcaacattcagacttgattatggtttggtctactggaattcaagactcgagcatgagcatatcagattagtttccctgttcaagaaaggagatgttatatgtgacatgtttgctggtataggtccattttcaatcccgtctgctcagaaaggttgtgttgtatatgcaaatgacttgaatccagatagtgttcattatctaagaactaatgcaaagattaacaaggtggaggactatatattcgcctacaacatggatgctagagtgttcatgcaaaaattgatgactgtgcctggcctggaaactagatcagactctcaagttgccactgatgaatcctattctaaagaaggggttccacctaatgaaatttcttcttcaaatggaaaccataatgatgttcgagaggacattaaaaatggtgctaatgaatcctctgcggcaagcactactactaaaaagcgacaacaaacttcagaagaaggtgatgaacctgattgccaagatgcagatgctaataaaacaaaaagacaaaacaaaaagagagtgagaggattagggccactgccatccaagccatgggaacactttgatcatgtactgatgaatctacctgcttccgctttgcagttcctcgattgttttgatggtctcatccaaaagaaatactggacgggatcactaccttggatacactgttattgtttcatccgttcttgtgaatctgaagaatcaattctctctgaagctcagaataaattaagtgctacaatagcagaaccaatattccatagggttcgtgatgttgcaccaaacaaggctatgttttgtttaagcttcaagctacccatggagtgtcttaagggggacagtgaaaatcacatcgaatcagttgccaagtagaccatgccatgctgatattgtgctcctgaagtttttactcatccacctgcagttttttttggagctttaccaaataaatagcaaatgtgctgatgattctggggttagtagttgtagttatatgattatatctgatctggatcaccatccgcaaggagggttaacaagctatttctgatgctaaatgtgagtgatcaggtgtcatataaccattgaagatgttggtggatgaatcaagacgctggtaacatctgattcaaagcgtggtgccatcggtttagtttacaggaagttcactgtcatgtttttttttttggcaacaaagacacaaagtgtgcttagagttatcatgttcacag

SEQ ID NO: 40222 - DNA, 452 bp, Zea Mays
cgacgcctccgcgtctcgcttcgtcgggtctgcacagcctcttcgcgccatgcggacagcagcaacaactaagttatttttggatcgagagatggtgatcgtgcacgtgatatggtgccaaccacaagatgccgttggtggacgacccaaggaaggatggacttaaccagtggatgctcgccaagcgagtacctccccagcaaacactgtctaagtgttaaattaaaggcaagccccggttttatgcataaccgtttatatatgctattttactacacttaatgtttgtaggcttgtgctgtgcacttaagtgtaggagttgactgaaaccctagttgcatgaactcaggattcctttttgaaatggatactagtatgataggtcgagtagctgctttactaattagggatctcggtagaagtcgagtgatttttctagcactcgcgcgagg

SEQ ID NO: 40223 - DNA, 2048 bp, Zea Mays
cttttgtgtgatcaatagaactaatgcaaagtcgtagcaattaaataaatgtgtgtacctgtgatatcgtatttgtgttgcgtaaataaataagatatggtcgtcttgttaatggtgttaatgatgaacgctgataacgtacgaatagctagcgcttgtgtatagtcgttgcggtgtcttactacttggtgtttagttcgctaccgtgtattgtatatcttgtgataacttttcattatattcatacatatgcatcttgcatctcatttaggatcgagagatggtgatcgtgcacgtgatatggtgccaaccacaggatgccgttggtggacgacccaaggaaggatggacttaaccagtggatgctcgccaagcgagtacctccccagcaaacactgtctaagtgttaaattaaaggcaagccccggttttatgcataaccgtttatatatgctattttactacacttaatgtttgtaggcttgtgctgtgcacttaagtgtaggagttgactgaaaccctagttgcatgaactcaggattcctttttgaaatggatactagtatgataggtcgagtagctgctttactaattagggatctcggtagaagtcgagtgatttttctagcactcgcgcgaggtcaggacattgattgtacccactttcatatcgtactgatgttggtttgtgggcaacaatccatggggatttgttgtccacgggataaaaattggaataaggattaaggtgtggtaccgtgagtcaagcgtttgaacgtactaagcacatgccgagaaatatggtaaatcggtaagcctagtacctgattgaacctggcagtggactttacccctcacgcgacctgagacgaggtctcccattccggttatggtgggtacaagtgcggtcactgcacgacggccagtcggggtcagtgaggcattgtacgccaaggcggtgagccctgatccgctgacggggaatcgatggggacggttgatatgtgtggggacggagtgcccctacatgtcgtgtgtttaggtttaccttgcaaggataaaaactcgattcgaatcgtctgcttctcgcagctaatgagactgcttgatccatgctgctacattgagtaataagtggaaatgaggtgactggcaaaagatgttgattgataaaatgtttgataccatgtatgaatagctaggtactcatctagtttaaaaggatcatactaaaacttgaaaagctaaaacttgattttagactcagctagtgcttttggcaaaccaaacccctcagccaaacagctgcatgtctagaggtagaggagtagactcctcacaccgggtaagtctagctgagtattagtatactcagccttgcttgtggcacaatttttgcaggtactccttgattgattgatggtgtgacttggccttcatccctgccaccgggatagatggtcgagtgggttattgcttccgcgggagaggaccaggaggagtactgtggccaggcttcgccatgttactcggttttctccgttagttatttccgctgcattaaaatttatggttattatttctgaaactccgataatgtaatcactaaagatacttattaaatttgtggtattatgttttattgtatttctctgtgcctcaccttcgtgtgagatagtggtattcgatcctggataagtggctttatcggactagatccgagggactgacggattattcctgtttaagtgtgttgctgcccttaagggtgcgacttgggcacttaagctggaataattcgggcggttccgccacacaatggacaagatttgcaggttcgggccgcttagaagtgcgtaacaccctacgtcctggtgagtatatgagcgtggttacaagagggttctctggatagagggcgcagagagtttatgtgggtggctaagtagaacagggtccatccttctgaaggggtgccccctaggccttatatactcggccgtggagcagtacatgtgatatgataacaacaagtagctaaaagatag

SEQ ID NO: 40224 - DNA, 614 bp, Zea Mays
cacatattgagtgccttagggcttggctttagtggaattttctccctgccccaagctctggtcaaggttcacagtgagtgtgttgtagtttttgtgcccactctggttctaaccctctccccaacctcatctgttggcctgccctgaacccttgcacgccagcaccctgtctggtgaccacaacagcagttctcaccctcgtcgtggcccggattcctcggaggttgtctcggtcgtgtggtgctcgttccctactcctcaaaggtatatggtttcagtcagctgaaacagaattttatgtgttctccacctatttttggagcactataactcttgatccatgaatctttgacctaaggctgctgcagcaaacttgtacagatatgtttggtaaacaaattttattagtcaaggttggcctattattgtttggaattgtgaggagtaatggagttaaaggtgggggttcagtttggtgtagagttcagtttcagaatctaaaatgtaattcagtttgctgaatttttagaaaccgtgaattcctctcagttttggaccattctaagtctcaattcttgaagttttggtggatgatcattgcattaaacttgaag

SEQ ID NO: 40225 - DNA, 389 bp, Zea Mays
cacatattgagtgccttagggcttggctttagtggaattttctccctgccccaagctctggtcaaggttcacagtgagtgtgttgtagtttttgtgcccactctggttctaaccctctccccaacctcatctgttggcctgccctgaacccttgcacgccagcaccctgtctggtgaccacaacagcagttctcaccctcgtcgtggcccggattcctcggaggttgtctcggtcgtgtggtgctcgttccctactcctcaaagagctagctgatctgagcaggatggacacccaagctttccatctatttccaaaccccaaatgatgcaggacctcaagaaggaaattatcatgtatgctccgcttccggatgaaagcactatggctt

SEQ ID NO: 40226 - DNA, 1030 bp, Zea Mays
cacatattgagtgccttagggcttggctttagtggaattttctccctgccccaagctctggtcaaggttcacagtgagtgtgttgtagtttttgtgcccactctggttctaaccctctccccaacctcatctgttggcctgccctgaacccttgcacgccagcaccctgtctggtgaccacaacagcagttctcaccctcgtcgtggcccggattcctcggaggttgtctcggtcgtgtggtgctcgttccctactcctcaaagagtaccaagaagaagtgatttgtgaaggagcccgttccagttctgctgatcaagtgaaggagccatctaactgtgtattggatagagggatctagagcctcttcactgcaacaaaggtgatgagtactctatgtgttcgtgaggctagagggcgtttccagttctgcaggaggattagttaggcttatgtataagctttggagggttcctaccttcctgctaatgtaataagttatgcactttgagtatatcaggacttgtaataaatgtaactcttccaatgtaataaccttcagttttagaaatgaaaagaatatttttgtaaaagtcttccgctcttatcttcgaactgtgtgtatcgaatgtgattactgtaatatgcatgtatggtgggagatccttgggatgatgagttcaagttgttgaactcgtgatagccttgttaagttacatggtacacgtgcgtagccatctgaggccatcaaggcaaggattggtgcatgtgggcccgataacttgggagggctgccacagcagcaatgccttcagcatcacatggatggccagtttcaagggatgatgactcacattgatgggaggtttgattatccgcagacccacatggatggtcagtacacttctctgaccaacatgttcgatgtcatggatacacagtttgatagcctgcaccatgaggttggtgggctttgtgatcacgttcatgagagtgttcatgaaccccttatgaccaggatgaacaacatgc

SEQ ID NO: 40227 - DNA, 914 bp, Zea Mays
cacatattgagtgccttagggcttggctttagtggaattttctccctgccccaagctctggtcaaggttcacagtgagtgtgttgtagtttttgtgcccactctggttctaaccctctccccaacctcatctgttggcctgccctgaacccttgcacgccagcaccctgtctggtgaccacaacagcagttctcaccctcgtcgtggcccggattcctcggaggttgtctcggtcgtgtggtgctcgttccctactcctcaaaggtgatgagtactctatgtgttcgtgaggctagagggcgtttccagttctgcaggaggattagttaggcttatgtataagctttggagggttcctaccttcctgctaatgtaataagttatgcactttgagtatatcaggacttgtaataaatgtaactcttccaatgtaataaccttcagttttagaaatgaaaagaatatttttgtaaaagtcttccgctcttatcttcgaactgtgtgtatcgaatgtgattactgtaatatgcatgtatggtgggagatccttgggatgatgagttcaagttgttgaactcgtgatagccttgttaagttacatggtacacgtgcgtagccatctgaggccatcaaggcaaggattggtgcatgtgggcccgataacttgggagggctgccacagcagcaatgccttcagcatcacatggatggccagtttcaagggatgatgactcacattgatgggaggtttgattatccgcagacccacatggatggtcagtacacttctctgaccaacatgttcgatgtcatggatacacagtttgatagcctgcaccatgaggttggtgggctttgtgatcacgttcatgagagtgttcatgaaccccttatgaccaggatgaacaacatgc

SEQ ID NO: 40228 - DNA, 2109 bp, Zea Mays
cacatattgagtgccttagggcttggctttagtggaattttctccctgccccaagctctggtcaaggttcacagtgagtgtgttgtagtttttgtgcccactctggttctaaccctctccccaacctcatctgttggcctgccctgaacccttgcacgccagcaccctgtctggtgaccacaacagcagttctcaccctcgtcgtggcccggattcctcggaggttgtctcggtcgtgtggtgctcgttccctactcctcaaagagtaccaagaagaagtgatttgtgaaggagcccgttccagttctgctgatcaagtgaaggagccatctaactgtgtattggatagagggatctagagcctcttcactgcaacaaaggcaagccccggtgcatttaccccttccttgtatttttaaaaagacttttatacacataagtctagtgaaatgtgcattaagtttataggaattgcttggaaactatttgatgcattgactaccttgatatccattcctgttataggtacttctttggaagtatcaaatattatttacaaaaatgcttagccctggttagatcttgtggatagaggttgtcctttgcaataatgcctagctcaagggttatcctgaggaaggatggcttctacctgaaagaatattttcaatgggagcaatggtgggatcttactgcaaagttccctataatgctcttttcatcctaaggaacacaaaacaatcctaaggatggaagtacttaaatcgagacttgggctaggaacaggtgatgcttcacccaggttaattaaggattggatgcgtatgtaggcctgtatgatcaaggactatcttaactggccacatgccctagatatgggacagggtaagcttgaacccggctattccatacgtgaaaagacaaccacgcactaggcgtgggagatggtgggagtagcgtgtaccctcctggctagaggctggacggaggagtactgtgctctcgggtagcgaggaccggttcacgttgtggaggatctgtgggaacggttgacatatgcaagggttaagtgctacatatgtcgtgtgattagagatcctcagctgagtaaatcgatttggatcgccattatatccccggagagtggagacttagtcactgacctgcaacctaagtcaggatgaaaacattatgagtaaaaatgatgttgtattgatgagatggtaagattagactaggtgcaaccaaagtctattaatatttaatctggtgttaaaatattgaaagtaaggactcactttagtaagctatttctgcaaaagtatctaagttgattcttgctaaagccttttccttgattcctaaatccagcatatccttgagagtctttttccttagtcgggtaagacttgcgaaagtacactccgtactcagggttttcgaacccatgttgttgtaggtgatgagtactctatgtgttcgtgaggctagagggcgtttccagttctgcaggaggattagttaggcttatgtataagctttggagggttcctaccttcctgctaatgtaataagttatgcactttgagtatatcaggacttgtaataaatgtaactcttccaatgtaataaccttcagttttagaaatgaaaagaatatttttgtaaaagtcttccgctcttatcttcgaactgtgtgtatcgaatgtgattactgtaatatgcatgtatggtgggagatccttgggatgatgagttcaagttgttgaactcgtgatagccttgttaagttacatggtacacgtgcgtagccatctgaggccatcaaggcaaggattggtgcatgtgggcccgataacttgggagggctgccacagcagcaatgccttcagcatcacatggatggccagtttcaagggatgatgactcacattgatgggaggtttgattatccgcagacccacatggatggtcagtacacttctctgaccaacatgttcgatgtcatggatacacagtttgatagcctgcaccatgaggttggtgggctttgtgatcacgttcatgagagtgttcatgaaccccttatgaccaggatgaacaacatgc

SEQ ID NO: 40229 - DNA, 967 bp, Zea Mays
atggttgtattaatcttcttgcagcaatgggaaacgaaaaagcaaatagccattgggaagcagagctgcctcctaaatatgatagggttgggatagagaatttcatccgtgcaaaatatgaggacaagagatgggtaccaaggaatggaacattgcgactttcctccggtgttcgagatgagaagagccaagagtctccagctagtgctaattggagtggacatcatagatcttcatttgagcaaaaccatgcttcaccagctcttccgagcaaagttgcacctgtagcttcaaggataccctctcaggcatcacctcagcccccaaaggtagaaccaccagttcctaaggtggtttcacctcctcagccacaaaaatctcctgccaaagttgaggcaacaccccctaaaagaaagagccagagtcatctccaaacgacgataatgcctgggatggcttccagtctgcacaaccagtacctagctccgaggaaaaagattctgccaaaccagcagaaagcaagacccagtctacatctggaatagaagacttatttaaagattcgccagctgtgtcgttatcctcagctccagttgtttcccaagaaaatgcaaagaatgatatcatgagtttgtttgagaagtccgatatggcatcaccatttgctgtccaacagcagcagctggcgtttatgtctcagcagcaagctcttctaatggctgctcttaaagctggaaattcaccacaaatagttccagggaatgccaatcaactaaacactaacgtttctaatccccctcttggaaccttgcctttccaaaactggacaaatcttggctatcaaaatcctgggttgactctagcagcagcacagaatggtgccacaatgaggagcatttcagtttcctgagcactcgatgcctaattatgacagtggaaaggctgctaacagtatgatcaaacagag

SEQ ID NO: 40230 - DNA, 232 bp, Zea Mays
ttactgtctaccctgtatacgtccctaagaaaatttgggatctaaaatatctgtgatttttcggttaaaaaaattaaaaatctaaaaaaatggaaaatattccagaattttttcccaaccgtgcttatctgttccctgtgcgcgtcgtcatcttgttctagccgccgctcatcctgaagaaaaaaaaacgcacgattctcccttatcctttctcctcgcgcgacggcctgca

SEQ ID NO: 40231 - DNA, 2637 bp, Zea Mays
ctcatcctgaagaaaaaaaacgcacgattctcccttatcctttctcctcgcgcgacggcctgcagcggccttatctccagcagctagcgctcagctcctgctcgatcttcttccatggcgcgcgcctgctactggcgctcggcctcctgcccaccccctgcgtttttcccctgctgaagcttttccatggcatcctgttttctgtgcgcgtttctcggcgcccggctccctgctcgagctccccacccatggccgccctcaaccccatggtcgagctcgcccagctccctgctccggtgactagcgctcagcgtctggatccctggatgcttgccctgctcgccgccattccgctagatcctgcgtgctccagccatggcgccctcccttgcttctctctccctctgccattctccagctcgcccagcccctgctcctgctcgccatggctgccgcgccctcccagccgcagagttaccgcgcgcgtgagcttctcttttggccatcgctgttccctggtgcagtcgcctatgccgcgcgctctctctccagcgcccacccccagctcggccctccacctccctctcgtctggataccggtgctgctcgccctgagctcctgccttggccgtcgcagcttcaaatccgtggacgtcgcccatggaagctcgccgaactgtgtccaaacttttcctgcgtcggtcgtggtcttcaagcaccgacgcgcgtgtccctgctcccagatccaaggccggtcgtcgtgtatgctcgcctcggttgtgtggccatgctcctgtcccagtcaccgccgatgaaggtccgtcctgtagcagcaccctagtggtcgtcgacttggagctctgcaatgactccatgcccgagctcgccctcaactctacagcaccgccgagctcggtccggtcctttgctgcagctcgtccccatggccgccgcagtcctgccgagatccctgtcgttcgcgcgctgctcctccctcaccatgccgcgcggatccctctccttccaaccctgctcggattgtgtcgcgcttgctgtcgcgttcggcctgctccggatccgaagttggtcgcctcggtgtgaaatcgtcgtcgcgtccaggttttgacatgtctccctactcgtcgtcgaacttgggttccctgctcagcctttagcgctagcgcgtcgccgtgaggttaccgtctcgccgtgattccctggtggtccgtgtctctgcatgttcaaatcgtcaacctcgtgcaccacctgctctctaaatgggaaaccaacagtcttctccctgctcctctgcccgcagccgcgttcctctaccggccatcagttgccgctgaaccactgtcggattaattttcagcttccctcgcgcggctctctggagataagctcttcatcgactgtcgctcccaatcttcagttcgccgactgactgtcgtgttccttattttccctcgtcggtcgacctcgtcgcgactttgttcgtccatcgtgctggtcgctatcccatactgtacctattagctcggatcctgcccagctcgttgtcgcgtcgtttgccgtcgagtcgtcaaacacgtcatcccctgctcgacccccacctcaccagctcgctccaaacacgatctcgtcgtcgttccgcgcgtcagcaagaaatcccaagaatcgggtgaaaacgaagctagcagcgcgatattccctaagcgctcgacaaattgcctgtatcggaaaatcgctaccgatcccgcggattcgtgtcagttgtggaaacggtaagctgataaattattcagaatagctcgatcgatgaataaataaatgtgctagtgcgatgcttattaaggtgctcgataaattgcgtaagtcacgaaactctcgtcgacttcgcagttcttgcgattatcgagccaggttcagttatagtgagttatctcgctattccggtcaattagttgaattagtataccgagtagaatattagtaggcctgtgaggtgatgaaatatttttatcacttataaagatgtagtataatttataaagcaagggattagttcagaatttaattaattaactgataagttgtgattaggctaattgtatttcttgtgtatagtttgttgttcgtgatgtttgcgataggttcgagaagcgtaattattgcgcttaattgtacgtcgataattagtatctccgtatgaaattgttcaacgcctcaccgctaggtgttaattcgctatcgcgtagtactatttaggtttgttatatttccgtcgatatgcattcatgtgcataatgcattccattcaggtacgttaattaatcgcgtgttgcggaagacgagccaagtcgactccaagcgcgggctattccgcaggatgatgctgatggacaaacctgaagatggtcgtcaagtggacgccgtctaacaaacactaacccagtgtttattccaggcaagccctggtgcatgcaaccccttccttgtgtttttaaataatttttgcgcactttaagtctagtgaaatgtgcattaggtttatatgagttgcttggaacctttgatgcattgccttccttgatatccatacctttatagatacttctggtgaagtatcaaaat

SEQ ID NO: 40232 - DNA, 1989 bp, Zea Mays
  misc_feature (1988)..(1989): n is a, c, g, or t
agttttgctaggctgggccactcctttggccatcctaggtctcgtgtacagtcgtcccctccgctcctcgcctcctctcccgagtcccgaacggccgatcccgacgccggctgcgtggctcgcctcagagccccagccgtatcctgccacccttgtccatgagcgcccgctatcagcgcagctagtccctccctccgcccgctatcttgagcggtggtgatggagtttactttcgaggatgcagcggaactgtgcgcgctcgtttcgaatcagcaatcccacgtcgacgagaagcggaggtggctggagtcaatgatcctcagaccggatggctgcatcaggcgcgcgaagcgacccaagtttttgcatgaagtgtacttgcctgagtcatatatcaggagtgatgacgtaagtgttagtactttggaaagaactacatatagcttagtgtttattttgcattcttactaacatcagttcatggcttatgtactatgtgcacatatggtttctcccacttattcaaatccctccacctatgtgtttaggtctttaaggtattagcgaaatatgtgaagtaataaatactctattttcactgtataagttttattcaagaataagttaggtgtgtactcaaaggactttatttcaataatcagttaaatacataatgcttaaaacttatggaagacatgttctagcgccaagttaggaactattgcacatggtactctagtgctatgtctgatgttgttttgaacatggttcaatttaattgtatttcttcaaaaatggttttgtcatggctatataaattttccttaccctgcaatgatcttatgatcgttttggaaccatttatcagtttcctggcttatactagttaatataacagcaatttcggttgcattatgtcacttcaaaatataaaatgtgaatttagtggggaccattttttcagagatcttgtgataaagtgagaggtaacattaaaaggatttggagttcagagtgcaatggctatacccatcacttagttctggagggcctccagctttttgacttccagaagaaggaaaatgaaccacttggaccagaatatcttggtgtcatgcaggacacaatcagcaaattgacctatgaaacacttcagtcagtggcttgtgttgtcagtcatgacaaggttacttttgataagactaggtctgtaatggaaaaaattgtaaattctcaccttccaagttacttggccagcttggatcagaatgatattgcatgccagctattcaatatttttagaaatccatgcagctatcgatctggttctgtgaggcttgtcacacctgtgtcaccacaacttttgtcttctattaagcatgcgttggatgagcttgatggaatgccaatgcagggtcttgttgcaatgaataggaagattaaaggaaaatcatgtgccccaaaatttggattaactgctagcttttccaaaagaatgcatataatcaaaatgataagaaaaaggtgcaacaagattttaacagaacttgaggaaggtaattacctgccaaaggaattagcaaaggcaatgtcagtggtgaacttatatcagaagcagaagctgaaaaatgtgagtatttcacaatcagagtttttcccctttgcaaaagaaactatttctttgcagaatgatatcctgaatgccctttggtcacttccaaatctcaagcatgcgaagctgaaattgctgcacaccatactggatcatgattctaaatttgaaaggaagcacttagcaactttgaggaactacttgacagaatgtttgtttggatgtgatgatggtctaccagatgtggccctccaagccatagcctctataaatcagatttctagatgtcagcatgttgtgttaacggaagagagggaggatgctgaggtagatgctgtactgaacttgagcagtcatctcaaagctttagctcatnn

SEQ ID NO: 40233 - DNA, 847 bp, Zea Mays
  misc_feature (1)..(1): n is a, c, g, or t
nttgtgcgattttagacgaatggctgtcgacggagaacaatggagtggacgaactgattagacgccatcttggagggggattgacgcttcaaggtccccaagatcgcagtcgtaagctgatgggtagtcctttgctagacgatgataataggcccgctaattcagcagagacggacatttttattcatgctgtggaacgtgtcttgcctaatttgccaaaaagttgcatagacaaaatcaagagactaatgggctgagctagcaagtacgtgatagcgacctgcaatggcacctatggacccggtatgacatgtataatgactgagcaggctagagcctgaacatagtcaatgatatgctcatgaggtgaaaccaatcgcttatgcaagggtcgatggctgtttgaaattgctagaacacaaactgaagaccgatttcgagttatatagtggacctgaaaatgttcctgaacttttaaaggatgtgcaggaagtgttgttctttcagatttatttttgttttttagtctcaatgtctagcgtcatagttgtaaagcacatgaactgcgaaattctgcagataatggctgcattttttataaatgtgatttttaggtaccagcagcctagcaacggtcttgtttattgcagtggccaaccagtcaattggtacttaaaaagacatgtttgtttaaatgaatgattcaagtgcatggtttgttaatatttgattgaaacacacataaagggtacattaagactctttactggagctctttttttttgaaaacgcaggagaactgcgcctcaatatattaagaagaagaaataagtccaggtcaaagaga

SEQ ID NO: 40234 - DNA, 811 bp, Zea Mays
  misc_feature (1)..(1): n is a, c, g, or t
nttgtgcgattttagacgaatggctgtcgacggagaacaatggagtggacgaactgattagacgccatcttggagggggattgacgcttcaaggtccccaagacgatgataataggcccgctaattcagcagagacggacatttttattcatgctgtggaacgtgtcttgcctaatttgccaaaaagttgcatagacaaaatcaagagactaatgggctgagctagcaagtacgtgatagcgacctgcaatggcacctatggacccggtatgacatgtataatgactgagcaggctagagcctgaacatagtcaatgatatgctcatgaggtgaaaccaatcgcttatgcaagggtcgatggctgtttgaaattgctagaacacaaactgaagaccgatttcgagttatatagtggacctgaaaatgttcctgaacttttaaaggatgtgcaggaagtgttgttctttcagatttatttttgttttttagtctcaatgtctagcgtcatagttgtaaagcacatgaactgcgaaattctgcagataatggctgcattttttataaatgtgatttttaggtaccagcagcctagcaacggtcttgtttattgcagtggccaaccagtcaattggtacttaaaaagacatgtttgtttaaatgaatgattcaagtgcatggtttgttaatatttgattgaaacacacataaagggtacattaagactctttactggagctctttttttttgaaaacgcaggagaactgcgcctcaatatattaagaagaagaaataagtccaggtcaaagaga

SEQ ID NO: 40235 - DNA, 290 bp, Zea Mays
ttgtgcgattttagacgaatggctgtcgacggagaacaatggagtggacgaactgattagacgccatcttggagggggattgacgcttcaaggtccccaagacgatgataataggcccgctaattcagcagagacggacatttttattcatgctgtggaacgtgtcttgcctaatttgccaaaaagttgcatagacaaaatcaagagactaatgggctgagctagcaagtacgtgatagcgacctgcaatggcacctatggacccgaagggaacaaccttcagcctgttc

SEQ ID NO: 40236 - DNA, 407 bp, Zea Mays
ttgtgcgattttagacgaatggctgtcgacggagaacaatggagtggacgaactgattagacgccatcttggagggggattgacgcttcaaggtccccaagacgatgataataggcccgctaattcagcagagacggacatttttattcatgctgtggaacgtgtcttgcctaatttgccaaaaagttgcatagacaaaatcaagagactaatgggctgagctagcaagtacgtgatagcgacctgcaatggcacctatggacccgaagggaatctacaatgaccaccagtccctcatgctttctgctggatatgcaaacaacccccaaatgagatatggagcatattgtcctgtttcgactattggatatggccaacaatactttcctgtgcactttcccttctca

SEQ ID NO: 40237 - DNA, 443 bp, Zea Mays
ttgtgcgattttagacgaatggctgtcgacggagaacaatggagtggacgaactgattagacgccatcttggagggggattgacgcttcaaggtccccaagatcgcagtcgtaagctgatgggtagtcctttgctagacgatgataataggcccgctaattcagcagagacggacatttttattcatgctgtggaacgtgtcttgcctaatttgccaaaaagttgcatagacaaaatcaagagactaatgggctgagctagcaagtacgtgatagcgacctgcaatggcacctatggacccgaagggaatctacaatgaccaccagtccctcatgctttctgctggatatgcaaacaacccccaaatgagatatggagcatattgtcctgtttcgactattggatatggccaacaatactttcctgtgcactttcccttctca

SEQ ID NO: 40238 - DNA, 1500 bp, Zea Mays
ttgtgcgattttagacgaatggctgtcgacggagaacaatggagtggacgaactgattagacgccatcttggagggggattgacgcttcaaggtccccaagacgatgataataggcccgctaattcagcagagacggacatttttattcatgctgtggaacgtgtcttgcctaatttgccaaaaagttgcatagacaaaatcaagagactaatgggctgagctagcaagtacgtgatagcgacctgcaatggcacctatggacccggtaattttttggttttgtttcgccaggaatcgataccagacctgtgtattctgtgattaggcaccatctcatgtagtactaagcgcttcagtttatggcaagcttttctgcattccgaatgctaccgggtatgtagttgtaactaggacataaggcgccctatcgggtgccgagacaatgcagagttgattgcatagttcatgattgtcatttataatcctaagaatcagttgaaagtatcaatacgaatgctgcatctgaaatgtcagtgcaccttcaatctgaaaatctaggcgggtatttagagaactcagtagcaaagttctgagttgtctgccacttgacctccgcgtatgtggagaccatgtaccaataggaatactgaaaagctgtttgtgcagaagggaacaaccttcagcctgttcttgtagcttcaagcaaggagctaaaaacaccaccaagatgaaaaaaagaacatccaattatggaggggctccattccgtatctcccataagttgctggataaccgagtttctttgtgttttcttgatattatttttctaaatattttttctagaagggaatctacaatgaccaccagtccctcatgctttctgctggatatgcaaacaacccccaaatgagatatggagcatattgtcctgtttcgactattggatatggccaacaatactttcctgtgcactttcccttctcaagtccttactatcaaccaccagcttcttctagcatgggatattcaaactctgtgactggaatgtcccaaggagtcgctatgttgcagcaagagtatttccttccttgtggtcttctatattcacccacaccagggtatcatcaaccaagtctttagttcatttgacagaggtaacatgtctcctcttatataaaacaatatcatacatttcaaaatcccctgaagggttgcaagattaagcaaatatgtggagaattacatgtactaatggccttctctgcattgcagcaccatcaaacccaccataaaatctttgcttctttccaagcagaaatgggatgcatttcaatctcttcattgccaataacttgaatatttctctgcaacagcacagcaaatgataattcaaaagaacataaaaatgctttcacagagaaacaaagtaatttattccacccacctttcttaacattaatacaaaatctaatgcacactgatattttggctgtgcttgt

SEQ ID NO: 40239 - DNA, 860 bp, Zea Mays
ttgtgcgattttagacgaatggctgtcgacggagaacaatggagtggacgaactgattagacgccatcttggagggggattgacgcttcaaggtccccaagtttatacttcacagatcgcagtcgtaagctgatgggtagtcctttgctagacgatgataataggcccgctaattcagcagagacggacatttttattcatgctgtggaacgtgtcttgcctaatttgccaaaaagttgcatagacaaaatcaagagactaatgggctgagctagcaagtacgtgatagcgacctgcaatggcacctatggacccggtatgacatgtataatgactgagcaggctagagcctgaacatagtcaatgatatgctcatgaggtgaaaccaatcgcttatgcaagggtcgatggctgtttgaaattgctagaacacaaactgaagaccgatttcgagttatatagtggacctgaaaatgttcctgaacttttaaaggatgtgcaggaagtgttgttctttcagatttatttttgttttttagtctcaatgtctagcgtcatagttgtaaagcacatgaactgcgaaattctgcagataatggctgcattttttataaatgtgatttttaggtaccagcagcctagcaacggtcttgtttattgcagtggccaaccagtcaattggtacttaaaaagacatgtttgtttaaatgaatgattcaagtgcatggtttgttaatatttgattgaaacacacataaagggtacattaagactctttactggagctctttttttttgaaaacgcaggagaactgcgcctcaatatattaagaagaagaaataagtccaggtcaaagaga

SEQ ID NO: 40240 - DNA, 3045 bp, Zea Mays
ttgtgcgattttagacgaatggctgtcgacggagaacaatggagtggacgaactgattagacgccatcttggagggggattgacgcttcaaggtccccaagatcgcagtcgtaagctgatgggtagtcctttgctagacgatgataataggcccgctaattcagcagagacggacatttttattcatgctgtggaacgtgtcttgcctaatttgccaaaaagttgcatagacaaaatcaagagactaatgggctgagctagcaagtacgtgatagcgacctgcaatggcacctatggacccggtaattttttggttttgtttcgccaggaatcgataccagacctgtgtattctgtgattaggcaccatctcatgtagtactaagcgcttcagtttatggcaagcttttctgcattccgaatgctaccgggtatgtagttgtaactaggacataaggcgccctatcgggtgccgagacaatgcagagttgattgcatagttcatgattgtcatttataatcctaagaatcagttgaaagtatcaatacgaatgctgcatctgaaatgtcagtgcaccttcaatctgaaaatctaggcgggtatttagagaactcagtagcaaagttctgagttgtctgccacttgacctccgcgtatgtggagaccatgtaccaataggaatactgaaaagctgtttgtgcagaagggaacaaccttcagcctgttcttgtagcttcaagcaaggagctaaaaacaccaccaagatgaaaaaaagaacatccaattatggaggggctccattccgtatctcccataagttgctggataaccgagtttctttgtgttttcttgatattatttttctaaatattttttctagaagggaatctacaatgaccaccagtccctcatgctttctgctggatatgcaaacaacccccaaatgagatatggagcatattgtcctgtttcgactattggatatggccaacaatactttcctgtgcactttcccttctcaagtccttactatcaaccaccagcttcttctagcatgggatattcaaactctgtgactggaatgtcccaaggagtcgctatgttgcagcaagagtatttccttccttgtggtcttctatattcacccacaccagggtatcatcaaccatttagggcttgtttgggagcaaggataccagagaggattgaaggggttacaatctcttttctattcaaaactaaatagcaaggggattgtagcccctccaatcctctctggtattcttgctcccaaacaagtctttagttcatttgacagaggtaacatgtctcctcttatataaaacaatatcatacatttcaaaatcccctgaagggttgcaagattaagcaaatatgtggagaattacatgtactaatggccttctctgcattgcagcaccatcaaacccaccataaaatctttgcttctttccaagcagaaatgggatgcatttcaatctcttcattgccaataacttgaatatttctctgcaacagcacagcaaatgataattcaaaagaacataaaaatgctttcacagagaaacaaagtaatttattccacccacctttcttaacattaatacaaaatctaatgcacactgatattttggctgtgcttgtattctttgcacactgactctgattatttcgtcattaatacaaaatctaatgcacactgatattttggttgtgcttgtattctttgcacactgattcttataatcaatgtgcaaagaatacaaacatagaccacaaagtctcataatatatttatttaatgttataattttttgtaattatttttataatttttattaaatttaagatattttgttttaaaattttaaaataacttatactttaggagggtataggacagagatgatgcaagaatgctagaaattttcctataaacggatcggagcctttgatggttcgtgcccaagcccaactattatatataactaataatgtgcccctgcgtcgctacagaatcaatatggtattgatataataagatatattgagatgcagaagcactaattattttgaaattagcggaacatagattaatcaagacagaaaatattaagaaatatcaataccctaaggcgcttcttaacttggggcaacagtggaccttcgaagttgctgtcaatgtacttgatcaaatccaagctctctcctttgacctggttgtgctctagagaaggcacctgctgggaaacaaaacaaaggttaatcatacatgaaaggagaatataaaacacatgtttcaatatccatcctgaagtggatgcgtacaaggaccatggcaaaatatacacaggagcatgccaaattgacaataagtataaattgaagctagaaacatcaatcagcacagcagcaccctggaaacttaactaaccccccactatatggatgttgatgcatgttgctgcaatcttgtgcaggtatgacatgtataatgactgagcaggctagagcctgaacatagtcaatgatatgctcatgaggtgaaaccaatcgcttatgcaagggtcgatggctgtttgaaattgctagaacacaaactgaagaccgatttcgagttatatagtggacctgaaaatgttcctgaacttttaaaggatgtgcaggaagtgttgttctttcagatttatttttgttttttagtctcaatgtctagcgtcatagttgtaaagcacatgaactgcgaaattctgcagataatggctgcattttttataaatgtgatttttaggtaccagcagcctagcaacggtcttgtttattgcagtggccaaccagtcaattggtacttaaaaagacatgtttgtttaaatgaatgattcaagtgcatggtttgttaatatttgattgaaacacacataaagggtacattaagactctttactggagctctttttttttgaaaacgcaggagaactgcgcctcaatatattaagaagaagaaataagtccaggtcaaagaga

SEQ ID NO: 40241 - DNA, 725 bp, Zea Mays
ttgtgcgattttagacgaatggctgtcgacggagaacaatggagtggacgaactgattagacgccatcttggagggggattgacgcttcaaggtccccaagttgcatagacaaaatcaagagactaatgggctgagctagcaagtacgtgatagcgacctgcaatggcacctatggacccggtatgacatgtataatgactgagcaggctagagcctgaacatagtcaatgatatgctcatgaggtgaaaccaatcgcttatgcaagggtcgatggctgtttgaaattgctagaacacaaactgaagaccgatttcgagttatatagtggacctgaaaatgttcctgaacttttaaaggatgtgcaggaagtgttgttctttcagatttatttttgttttttagtctcaatgtctagcgtcatagttgtaaagcacatgaactgcgaaattctgcagataatggctgcattttttataaatgtgatttttaggtaccagcagcctagcaacggtcttgtttattgcagtggccaaccagtcaattggtacttaaaaagacatgtttgtttaaatgaatgattcaagtgcatggtttgttaatatttgattgaaacacacataaagggtacattaagactctttactggagctctttttttttgaaaacgcaggagaactgcgcctcaatatattaagaagaagaaataagtccaggtcaaagaga

SEQ ID NO: 40242 - DNA, 772 bp, Zea Mays
ttgtgcgattttagacgaatggctgtcgacggagaacaatggagtggacgaactgattagacgccatcttggagggggattgacgcttcaaggtccccaagacgatgataataggcccgctaattcagcagagacggacatttttattcatgctgtggaacgtgtcttgcctaatttgccaaaaagttgcatagacaaaatcaagagactaatgggctgagctagcaagtatgacatgtataatgactgagcaggctagagcctgaacatagtcaatgatatgctcatgaggtgaaaccaatcgcttatgcaagggtcgatggctgtttgaaattgctagaacacaaactgaagaccgatttcgagttatatagtggacctgaaaatgttcctgaacttttaaaggatgtgcaggaagtgttgttctttcagatttatttttgttttttagtctcaatgtctagcgtcatagttgtaaagcacatgaactgcgaaattctgcagataatggctgcattttttataaatgtgatttttaggtaccagcagcctagcaacggtcttgtttattgcagtggccaaccagtcaattggtacttaaaaagacatgtttgtttaaatgaatgattcaagtgcatggtttgttaatatttgattgaaacacacataaagggtacattaagactctttactggagctctttttttttgaaaacgcaggagaactgcgcctcaatatattaagaagaagaaataagtccaggtcaaagaga

SEQ ID NO: 40243 - DNA, 808 bp, Zea Mays
ttgtgcgattttagacgaatggctgtcgacggagaacaatggagtggacgaactgattagacgccatcttggagggggattgacgcttcaaggtccccaagatcgcagtcgtaagctgatgggtagtcctttgctagacgatgataataggcccgctaattcagcagagacggacatttttattcatgctgtggaacgtgtcttgcctaatttgccaaaaagttgcatagacaaaatcaagagactaatgggctgagctagcaagtatgacatgtataatgactgagcaggctagagcctgaacatagtcaatgatatgctcatgaggtgaaaccaatcgcttatgcaagggtcgatggctgtttgaaattgctagaacacaaactgaagaccgatttcgagttatatagtggacctgaaaatgttcctgaacttttaaaggatgtgcaggaagtgttgttctttcagatttatttttgttttttagtctcaatgtctagcgtcatagttgtaaagcacatgaactgcgaaattctgcagataatggctgcattttttataaatgtgatttttaggtaccagcagcctagcaacggtcttgtttattgcagtggccaaccagtcaattggtacttaaaaagacatgtttgtttaaatgaatgattcaagtgcatggtttgttaatatttgattgaaacacacataaagggtacattaagactctttactggagctctttttttttgaaaacgcaggagaactgcgcctcaatatattaagaagaagaaataagtccaggtcaaagaga

SEQ ID NO: 40244 - DNA, 333 bp, Zea Mays
ggcgagatcctcttgccattggcttcgccgcaagataagtggacgaccccctctcctcttctcctcatttcaccaattagcgtcgtgcggagggactgagagaaatagagcgccggtgccaccgtcgctgcgcttgggttttgccgttattgcgacctcgaatccagccaacagagttcgccgcagcgcgtagagcaagattatatcggtgttgggcatggagtagtacccattgggtgtcaattcctcgtcggcgtcgaagcaaagccccatctgcatgttgcttgaattcacctccacccgggattcctgtcgagcaagtgatcgaggacc

SEQ ID NO: 40245 - DNA, 498 bp, Zea Mays
ggcgagatcctcttgccattggcttcgccgcaagataagtggacgaccccctctcctcttctcctcatttcaccaattagcgtcgtgcggagggactgagagaaatagagcgccggtgccaccgtcgctgcgcttgggttttgccgttattgcgacctcgaatccagccaacagagttcgccgcagcgcgtagagcaagattatatcggtgttgggcatggagtagtacccattgggtgtcaattcctcgtcggcgtcgaagcaaagccccatctgcatgttgcttgaattcacctccacccgggattcctggtgaagagcaggtagtccaggaggaggtctacaacgaggagtacgagattatctaggtggcgtcttccagtcagctttatggcgccaaggaataatatttagttcgctttattgttatcatttaattttgtaagacactaccgctatgtaataatatttgtgatatttatctctgcacacttggtc

SEQ ID NO: 40246 - DNA, 1086 bp, Zea Mays
attttggcatgcttaggcttaattttgatgggacccaataggtcacactagtttggttatctttacaccttgtttacccctgaacttttggatagtctttgctattgctatatgtggttttgggtgttaagataattattacacatggtcatgatttattattgttattctattttgttcatgataagactattatgttaataggaacatggagcttaacttgagaaacacgtgccaccacaagggtggaatgggacgccctttgctgactaattaggaaagctagtggaggtctaccttacccgaaaggggcaaggaaagtaggggagttatcggtgtggggaggttctcgggttgattttgctgcgatggcttttcagacgggggattcctgcattgcgctccctagaactgtagcgggttttctgaagctagtggaactttgtaaaggcctcgtagtgttacccggcctcgcttcctggtagaggtgtatgggattcatgaccccttggcagatgggtaacatgacttgtgggtaaagggtacaacctctacagagtgtaaaactggtatactagtcgtgctcgcggtcattagcagctcaggactcttgcatgattaatttatggaattaaattcaatttgtcatttgcatcgcattatggttttattattaactttgatctattactagtttggtatatacttacatttagtaactgctaataaaatctgaccaacttattaaaagcaatgctcagctttaacccttatttgttgatcagccttacacttcacatgagctcccacctttggtgagttcatgcacattattccccacaacttgctgagatatgatcttttgtgagctcacccttgcgacatataaaccccccacaggtgaagagcaggtagtccaggaggaggtctacaacgaggagtacgagattatctaggtggcgtcttccagtcagctttatggcgccaaggaataatatttagttcgctttattgttatcatttaattttgtaagacactaccgctatgtaataatatttgtgatatttatctctgcacacttggtc

SEQ ID NO: 40247 - DNA, 1796 bp, Zea Mays
aaaaaggagatgaaaaataaggaactagcagaacttgatgtagtattggctgagcttggactttctgggatttgagcatcgctgcacaggatgctgagaataaaggtgccaaccagactggtgacacggtcgctacctcctcttggccgctggacgtctctccttcctagccttcgcctgtccctcctcccctgcccgctacccccgtagacaggcacgttgctacctcctccacgccctaggagaagccacagggcccgccacccctcaccatgttcggcgtcgacggccaggaggtggagccatgaatgatctatcctaggtatacctctagcttccctcaccatctccttggcctcttcctcccccttggccttctccttctgatgaatcattttacctagatttgtcactgcttgctaatcgttgctccaaccgttgagtttgcgcggtggatttcttttcctagcatcaacacatgtaaaacaggggagatttagatccaacacatcagcgaagtggcgcccttgctggcacaataatacgtccaggtctcgtagaacacctaacactggtaagtactcctaatatgcaagtggttatgctgatgttgatgaatcgattggtattttgagacttgtattatgtctcctttgaggaggttttattttcaccaggtacactacattatttgatgatcgtattatggttatttgatcactgtattttattatttgatcgctgtattatctggacaaattacgaatatgcctactactgtatcataattacttgttgcctactctatcgacctttgcaaagattgctactgttttgttgtctaaaccacttgctgtcaatatttcttaaagtgttgtgtatctaatcgtcctctaataagcacatcagttaagttcaagttaacacaattacactcccatacatgcatacaatgatgatgacctgttgtacattctgattgcttgggtattcattctctggtgctcatagtctaatggatggtatgatcaccgcttagtatgttctgttctgtttttgaactgaattatctcaaccttttatctaggattgtgtagtggtctagggattgcgtattaggatattgaggacgggattttcacaaattgctatagtccaattattttcttcccttctaccctgctacacgccagatcatatgttataatggtgtttgctgctggaggcacatcccgattcgtcgatagggccgagtgcatctgcctcattcacaagataaacgacgctcctaccccctcctctgttttctacctgcttgaacatatcagcaatcttgcttgtataacttgtggatggtaggcctggagcgctgtcgaattccttccttagcgcaactgctgttcaggtatggacttgaagtttaatgccacacctgctctaggagagcagacaaccttcaagtgggtcattgatcatgggtgtaaaatgttaagctgaatgcaaaccgtcgagatggtcttggtcaaggacctccatggcacctacgttggtgtgggttgtgccgcctcatcgcgaccgtcatcgattgggccttcgaggtgttgtactgtttcttagaattttccagcaacttcgatgggaggaattttgtttgagcttgtgggcccaattcatatcagtcgcgaccctaggactatcccacggcctgcggcgagcttgcagcgctgctgtgcctcggatacgcggacaagtcactacttgggactatttacactcctaaaagggaaacacacagg

SEQ ID NO: 40248 - DNA, 1813 bp, Zea Mays
aaaaaggagatgaaaaataaggaactagcagaacttgatgtagtattggctgagcttggactttctgggatttgagcatcgctgcacaggatgctgagaataaaggtgccaaccagactggtgacacggtcgctacctcctcttggccgctggacgtctctccttcctagccttcgcctgtccctcctcccctgcccgctacccccgtagacaggcacgttgctacctcctccacgccctaggagaagccacagggcccgccacccctcaccatgttcggcgtcgacggccaggaggtggagccatgaatgatctatcctaggtatacctctagcttccctcaccatctccttggcctcttcctcccccttggccttctccttctgatgaatcattttacctagatttgtcactgcttgctaatcgttgctccaaccgttgagtttgcgcggtggatttcttttcctagcatcaacacatgtaaaacaggggagatttagatccaacacatcagcgaagtggcgcccttgctggcacaataatacgtccaggtctcgtagaacacctaacactggtaagtactcctaatatgcaagtggttatgctgatgttgatgaatcgattggtattttgagacttgtattatgtctcctttgaggaggttttattttcaccaggtacactacattatttgatgatcgtattatggttatttgatcactgtattttattatttgatcgctgtattatctggacaaattacgaatatgcctactactgtatcataattacttgttgcctactctatcgacctttgcaaagattgctactgttttgttgtctaaaccacttgctgtcaatatttcttaaagtgttgtgtatctaatcgtcctctaataagcacatcagttaagttcaagttaacacaattacactcccatacatgcatacaatgatgatgacctgttgtacattctgattgcttgggtattcattctctggtgctcatagtctaatggatggtatgatcaccgcttagtatgttctgttctgtttttgaactgaattatctcaaccttttatctaggattgtgtagtggtctagggattgcgtattaggatattgaggacgggattttcacaaattgctatagtccaattattttcttcccttctaccctgctacacgccagatcatatgttataatggtgtttgctgctggaggcacatcccgattcgtcgatagggccgagtgcatctgcctcattcacaagataaacgacgctcctaccccctcctctgttttctacctgcttgaacatatcagcaatcttgcttgtataacttgtggatggtaggcctggagcgctgtcgaattccttccttagcgcaactgctgttcagaccgattatgtatccaggtatggacttgaagtttaatgccacacctgctctaggagagcagacaaccttcaagtgggtcattgatcatgggtgtaaaatgttaagctgaatgcaaaccgtcgagatggtcttggtcaaggacctccatggcacctacgttggtgtgggttgtgccgcctcatcgcgaccgtcatcgattgggccttcgaggtgttgtactgtttcttagaattttccagcaacttcgatgggaggaattttgtttgagcttgtgggcccaattcatatcagtcgcgaccctaggactatcccacggcctgcggcgagcttgcagcgctgctgtgcctcggatacgcggacaagtcactacttgggactatttacactcctaaaagggaaacacacagg

SEQ ID NO: 40249 - DNA, 1655 bp, Zea Mays
gtcaggtctgtcttctcccctctatcttttctccgtctcagctgccagactctcgcccacagttagaaccgcccgaaaatctcgcctgccgttgcgtggtcgaccccacctccttgcggctttatagccgagtctctcccatgactctcccctctcctatcttttgtgggcgccgtgtcttcaccacttctccctctcgtcgtatgctaccgccggtgatctcttctgtggcgacgtactggtctctgcgcgttgccgtgggagtgcgccgggaccttgggtggccgcccgagtcctcgggacgaatcaagcgcctctggtgctcgcgacagttcttgtcggtcgacggggagggagccgtgtcgcgcatcgtcgcagaccgcaacgcgtccatcggcattgttgaggtcctgaagtgtaagtacagcaaagcggaggcaaatatagtgattctgaaaagattgggcgccatggttttgcatggtgttgatgcgaaacgaatgaggtttcacactgacttgaagaacagacggtttgatcatattgtctttaattttcctcgtggtgcattcagaggaaaacagaatgacttgcgtatgatcgacttgcacaaggagttggtgtggggttttttccgcaatgcatgccacattgttcggcaacttggtgaagtccatgttacccacaagtctggggaaccatacgacagctgggatcttgagcacctggcctctgagccttcttttgctatggttgacaaagttccttttcaaagggaagactatccaggttataatcaaaagagaggagatggtaagagatgcaacaaaccttttgatcttggtgcatgttgcacattcaagttccaaatcagaaacttgaagaagctgaagcaaatgaataggaggtctcgtttaatcccaaaccttggaggcaacaactttcatccaggccattcggagagttgccacccggtggtgagcatgccaggcccatgtctgaatgatttgtccgctcaaggtggcattcctccacctctaccaatgagtagaatcccatctcctgatctccttgcacctcgggagcagccttggtatcagcagagaactattcttgatcacctaggagtcgatgactacttctttgcccgggaacaccaaatgagtctgcagagggagtatgaaatgaagaggcaagtcattccattggaacatcgccacacggacagggagtctgttgagaagctagagtggctgcacaggatgatcgcattgtatgatggcaaggacacagaagaacaaagccactgctcaccatcttggtcttctgaaggtaacttgaaatatactctaatctttatcttagaactcttacctatggctaaacttgcaaaattgcggcgggagttgctcactccaacatccaaaggtggtggtggtgcaggtgaaggatttgatgtgacgaagagtggagatgcacgtgttggtctagttggctttccttcgattgggaaatcaacattgttgaacaagctgacagggacattttcagagggaaatcctcgtgttcgtatcttgcacaatgtttttaagttacatgtgtctgattctattgtgatgcgagttcagtggtttatgcttgtgcttcttgaatag

SEQ ID NO: 40250 - DNA, 2280 bp, Zea Mays
tctttagcagggcttaatctttgttttatgtctggattgggatatctagttgtataaggtgaatccaaaggtagggtagaaattttttttatcaagatgagatagtctacatgatgtaggttaaaagtttgtttgatgttaggtgaggatagtcagattatacaattcatcatgacactattgattaggttagctcttatgctcatggttgaggtagtctaatgcactaatttaggtttaggtgcatgaggaaagaacatggtttataggagtaggatctagtttatttcactagtgctcacttgttaagtgactctcattagattctatgattctatttatgaataccatttagttgagcatatcaagctgactttatctttataaaattctagtatattttttttatctcagtggaacttccaattggtatatatttttgtacacctaaaattttcatgtcattaacaggtgtggcatagaaaacaagggtacctcatattttaactattaggtgagtgttgacatagaatgagtgtactatgacataatcgagtttcctttggggttctagattagattggatataactagattaaactagtttaaattagatagatcttccagggtaggatatatattattaggatatgttagaatcttttgagataggaggaattatatggtgtaggtaagtcagaatctctgtcggttgaaacaaaggggttatgcaactatcttgtggttaaggtagttgcataagaccgagttggtcggttattcttaatttagtgcagagtgaatcaagttagaataggtggatagggtctaattcatttcgccagtattaactaacctgtttgagtgggtcacttgggttagtttagattagatgggaactagattagtttagcataactagatttgactaaataagacctaattaaatttggatcagattaggttgaatgcggtctaggtatgaccagattaatctatactaggtctagaatatatttatatgactggtttagtctagataagatctaattaattgggattaaatcatagttgttatcccataatgagataagcaaagtggttaggataagataaaaatctttttaaggtaagatgaatccattaagataagaggatatttttaagataagatggatctattaggataagataaaatcttttaaagataagatgaatctattagatatattttagtgggggatattctaagttgctctattttgtaaacattttcccttatgtctaggtgtatatgtagatgcagttgtggacattactccacaactcatcacactcaatcaaagatccaaatcagacaatatcataaggacaaacattcaagttcatagatatctataaaaatagtttttttttgttcctaagagtaggtctcctattcctaaaggtcactttaggcacatgatttcaaagtgtgaaatccccatttatctttagaaggaaaaggtaagaatcatcagagtaaggcgggaatagatgagaaaagattaagaagagtttagaaaagaattatagtagcaagggtaaggttaatcagagtagaacagtagaaggtgagacaagatcaagaaaagtatagaaagaatcagagtaaggtaagtagataatggttatgtccatttctatctaggtttcgtcctacagtcaacattcctctgataccacttctgtcacacccggattttaggggtccaaaacccggacgcgaacataatcaccaggtgtgctgggaccaagtctcacacatatgatgaatcatggcacaggatcgaatgtcacatctttactacataacaggaattttgtacaaaataaataaataattacattatatggagacaacggtccagcaacccgaagttgactgggagacgacggcctagacctctcacgaacacatcgcagcatcatccatgcgcctcatcctatggtacctgttcttgacctgtgggggggtgtgagacagcaagagtgagctcacatacgttcatcgctcaacaagttgtggggaataatgtgtatgaactcgccaaaggtgggagctcatgtgaagtgtaaggcttaccaaagaggatggctgaagctgagcattacttttaaagttggtcaaaattttattagccattactaagtataagtaaataccaacctaattaaatagtagaaaagaagtaacaacatcacctgcgatgcaatgcatatgacaaaattgaatttaag

SEQ ID NO: 40251 - DNA, 1819 bp, Zea Mays
ggatctgggagcagcaagaccaccactgcagacggcctcgaccacccacatgctctcctccggaccgacgtcgaaatcagggtgacgacatcgtcccacagtgtctccccaaagttgggaggcgacgacgacgattccaagtgtgtgaggtgcgtcgacgagcaaaaggggctaggttgtcccagtagcctagggttcgcgtcacggaatcagagcgcttcctagatctggtcgtcgccggcatctaggcaatggtggcgaagaacgtcgtcggtcgaggtcctggagcggtgttgcgaatggactcgaagtccgtcgacttggagagaggctccaccaggcgccagacggtttgttcagaggtcctgaagtgtaagtacagcaaagcggaggcaaatatagtgattctgaaaagattgggcgccatggttttgcatggtgttgatgcgaaacgaatgaggtttcacactgacttgaagaacagacggtttgatcatattgtctttaattttcctcgtggtgcattcagaggaaaacagaatgacttgcgtatgatcgacttgcacaaggagttggtgtggggttttttccgcaatgcatgccacattgttcggcaacttggtgaagtccatgttacccacaagtctggggaaccatacgacagctgggatcttgagcacctggcctctgagccttcttttgctatggttgacaaagttccttttcaaagggaagactatccaggttataatcaaaagagaggagatggtaagagatgcaacaaaccttttgatcttggtgcatgttgcacattcaagttccaaatcagaaacttgaagaagctgaagcaaatgaataggaggtctcgtttaatcccaaaccttggaggcaacaactttcatccaggccattcggtaactgacaggggggtatttcatccggttgcacctgttgaagcaaggtcttggcaccatttttctcgctagctcacataggaagcatgctgatgtctccacagccttacacagttaatcaatgtcaacgatccgggagatgcggttcatatcccaagccggtggtgagctctgatggcattgcggctggaccttatttgcataaataggagagttgccacccggtggtgagcatgccaggcccatgtctgaatgatttgtccgctcaaggtggcattcctccacctctaccaatgagtagaatcccatctcctgatctccttgcacctcgggagcagccttggtatcagcagagaactattcttgatcacctaggagtcgatgactacttctttgcccgggaacaccaaatgagtctgcagagggagtatgaaatgaagaggcaagtcattccattggaacatcgccacacggacagggagtctgttgagaagctagagtggctgcacaggatgatcgcattgtatgatggcaaggacacagaagaacaaagccactgctcaccatcttggtcttctgaaggtaacttgaaatatactctaatctttatcttagaactcttacctatggctaaacttgcaaaattgcggcgggagttgctcactccaacatccaaaggtggtggtggtgcaggtgaaggatttgatgtgacgaagagtggagatgcacgtgttggtctagttggctttccttcgattgggaaatcaacattgttgaacaagctgacagggacattttcagagggaaatcctcgtgttcgtatcttgcacaatgtttttaagttacatgtgtctgattctattgtgatgcgagttcagtggtttatgcttgtgcttcttgaatag

SEQ ID NO: 40252 - DNA, 1546 bp, Zea Mays
ggatctgggagcagcaagaccaccactgcagacggcctcgaccacccacatgctctcctccggaccgacgtcgaaatcagggtgacgacatcgtcccacagtgtctccccaaagttgggaggcgacgacgacgattccaagtgtgtgaggtgcgtcgacgagcaaaaggggctaggttgtcccagtagcctagggttcgcgtcacggaatcagagcgcttcctagatctggtcgtcgccggcatctaggcaatggtggcgaagaacgtcgtcggtcgaggtcctggagcggtgttgcgaatggactcgaagtccgtcgacttggagagaggctccaccaggcgccagacggtttgttcagaggtcctgaagtgtaagtacagcaaagcggaggcaaatatagtgattctgaaaagattgggcgccatggttttgcatggtgttgatgcgaaacgaatgaggtttcacactgacttgaagaacagacggtttgatcatattgtctttaattttcctcgtggtgcattcagaggaaaacagaatgacttgcgtatgatcgacttgcacaaggagttggtgtggggttttttccgcaatgcatgccacattgttcggcaacttggtgaagtccatgttacccacaagtctggggaaccatacgacagctgggatcttgagcacctggcctctgagccttcttttgctatggttgacaaagttccttttcaaagggaagactatccaggttataatcaaaagagaggagatggtaagagatgcaacaaaccttttgatcttggtgcatgttgcacattcaagttccaaatcagaaacttgaagaagctgaagcaaatgaataggaggtctcgtttaatcccaaaccttggaggcaacaactttcatccaggccattcggagagttgccacccggtggtgagcatgccaggcccatgtctgaatgatttgtccgctcaaggtggcattcctccacctctaccaatgagtagaatcccatctcctgatctccttgcacctcgggagcagccttggtatcagcagagaactattcttgatcacctaggagtcgatgactacttctttgcccgggaacaccaaatgagtctgcagagggagtatgaaatgaagaggcaagtcattccattggaacatcgccacacggacagggagtctgttgagaagctagagtggctgcacaggatgatcgcattgtatgatggcaaggacacagaagaacaaagccactgctcaccatcttggtcttctgaaggtaacttgaaatatactctaatctttatcttagaactcttacctatggctaaacttgcaaaattgcggcgggagttgctcactccaacatccaaaggtggtggtggtgcaggtgaaggatttgatgtgacgaagagtggagatgcacgtgttggtctagttggctttccttcgattgggaaatcaacattgttgaacaagctgacagggacattttcagaggttgctgcctacgagtttacaactttaatcatgtataa

SEQ ID NO: 40253 - DNA, 325 bp, Zea Mays
tcgatccggaagtgggagctggacttctgctcgcggtcgcggcccatcctggacgcgcgcggcaagaaggtgtgggagctcctggtgtgcgagtgcgacgccacgctctcgctccagcacgcccgacttccccagcaacgccaacgccatcaacagcgtgacgctccgcgacacgctggcctccgtgcccacgcccaatcgcgtccgcttcgtccggtcccagacgcagaccaccatcgcccgcgcctgcggcgagctgggcgtaaaggccgtgtcgagccggcggtgcgtgtcgctgctgctgcggctggaggagcggtaagag

SEQ ID NO: 40254 - DNA, 1298 bp, Zea Mays
ctttcgtttcccacatctaagagatctccacatccaaaccctaaaccaactgcctccatcccgaccccgacggccaggtgacatctccacccgaccggcggcctggcgacggctccacctcgactggagcccaggcggcggctccaccccgacaggcggccaggcggcggctccactccaacaggcggccaagcgggttcagcaggcggccaggcggcggctccatcccgacggcggccaggcggcttcttcatcacagaggacatgacgccaccaggtcaaagagtagaccctttttggcttcctgcaggggcgattgagggcatattgttcaaggaaaagagaagaagggtgtagatggaggatacatgcttcgacaatgaaggataatgtgacgataaaggtgaagaagaacccacatcgacatggttgttctagtttaagaagaagtaaaactgtgaagaatgcaactaaattttgggtctgtgaaattgtgaaagattggatcatggaggatgcaaggttgacagctaaagaattgcagaggaggataaaagataagcataaggtagatgtgccttacaaaagagtgtacgatgggagatttagaggacaactagcttgtgcaatagctgtagatgggcataactggatgtatccagttgttgttggagtgttaggctcagaaacaaatgaaaattggagctggtttatgcagatgcttagagatgctattggaacaccagaagggttagctatttgcactgatgctggacaaggagtgatggcaggggttaaggaagtgttcccaaatgcagaacatagagaatgcatgttacatttggtcatgaacttcaagaaaaggtttagtggaaagatatttgatgatcatctttgggcagccgcatatacatggagcccatacttgtttgagaagcactggacgataatggatgaagctatgccggcagcaatggcgtacataaggcaataccatactaggatatggacaagaagccaatttgggacccattgtaaagttgattatgtgaccaacaatttggctgattgctttaacaattggattaagaagtataagggcttgaatttggatgacttgcttgataatatacgacaacttattatgaagaagtgggatgttaggaggacaatctcaagaaagatggaaggggttattctaccacgaatcattaaggacttgaaagaacaaagctttaacttagatatggatgttcagcgtagtggggatacacttggagaggtgtctgtaaagggtg

SEQ ID NO: 40255 - DNA, 1867 bp, Zea Mays
atgacgccaccaggtcaaagagtagaccctttttggcttcctgcagggatggaccctaattcaagttacttgctgaaaatcagactcactggtaatcctaaaaagcgccggaaggagttttcatgctttaatatcaccaaggttgtagattctgatgtttgcaatttcaaggaccttgtcgaagaaattgttgataagtacccccatggatacaatgagatagttcatgttttttactatgataacgttgaaaaaacatttccacaaatcacaacagaccaagaacttcttaaaatgtttagcaaacatgctgacagcaaggtagtgtgtatgaccattacatacactgagcccacagatgatgtccctatcccaaagtgttatgctgatgaggttttagatatcccagacacaccttctatggcatgtccatctctagtggtaggtagccagctcactgaacctacaagccaatccactaaaccttgtactagcaaaccttccatagatcaggatggtgatgatgattatttggcaaatcctgaaccacataatgaacatgtgggtgtggacgacgaaatcctatatttggcaaatcttgaaccatataatgaacatgtgggtgtgtccagagctcatcagaatgttagtgagggcagtgactctgaatctggatctgaatctgatgaagagtatgaagaagaagatggattaattggaaaagatcctccgccacctatgccaattatttgttatgacaaacttgaccctccaatgagtgtaggaagcatatatcccaacatgcaagcatttaagttggcattatctcagcatgttgtaaaccatgaatttgagtttaacactgaaaagagtgacccagggcgattgagggcatattgttcaaggaaaagagaagaagggtgtagatggaggatacatgcttcgacaatgaaggataatgtgacgataaaggtgaagaagaacccacatcgacatggttgttctagtttaagaagaagtaaaactgtgaagaatgcaactaaattttgggtctgtgaaattgtgaaagattggatcatggaggatgcaaggttgacagctaaagaattgcagaggaggataaaagataagcataaggtagatgtgccttacaaaagagtgtacgatgggagatttagaggacaactagcttgtgcaatagctgtagatgggcataactggatgtatccagttgttgttggagtgttaggctcagaaacaaatgaaaattggagctggtttatgcagatgcttagagatgctattggaacaccagaagggttagctatttgcactgatgctggacaaggagtgatggcaggggttaaggaagtgttcccaaatgcagaacatagagaatgcatgttacatttggtcatgaacttcaagaaaaggtttagtggaaagatatttgatgatcatctttgggcagccgcatatacatggagcccatacttgtttgagaagcactggacgataatggatgaagctatgccggcagcaatggcgtacataaggcaataccatactaggatatggacaagaagccaatttgggacccattgtaaagttgattatgtgaccaacaatttggctgattgctttaacaattggattaagaagtataagggcttgaatttggatgacttgcttgataatatacgacaacttattatgaagaagtgggatgttaggaggacaatctcaagaaagatggaaggggttattctaccacgaatcattaaggacttgaaagaacaaagctttaacttagatatggatgttcagcgtagtggggatacacttggagaggtgtctgtaaagggtg

SEQ ID NO: 40256 - DNA, 426 bp, Zea Mays
cacaactgtgtaggacctggtgcgcggcgctgtcgccgctaacggccggctccggcgcctcgacggcttcgcgaaagcaaagcgtgtacactactagcttggtcctcccatcaaccatgttaattcccaggtgcctcttgggaggtggggttgggagcttcttatggtttgcattggatggatgaagcaacaccaataactcatcttccctgttggtggcggcatgtattctgctactttaaaccatgtcacattgatgcatccctaccaccattcttatctgtcataaatagaaattctcctccatacatattaaatttgtagtctagatttttactctgtagacgactcttaaccttatgtggactattaataatgttgcgcgatgccgattgtttaataacccgtattgttgtgcatgagaag

SEQ ID NO: 40257 - DNA, 2045 bp, Zea Mays
ataaacgacctggcccatccctccttcctcatcacacagcgccaccgcgtggttcgttaggaaaggaaatcgattcccccgcatccgatctcttcggtgctagagaaatataggccgccgcctcctcctcattcggtgaaaggtgggcggttagggttgggagatctcttgactcacgacacgagcagcagaattcgtcgagggccgctggttgctgcgagaggtccgggccttcgtgggatctttttcatcggttctttggttcttctctgcagtgaaaattgaatgttctaatggagtccaagggtggcaagaagaagtctagcagtagtcgttcctccctgatgtacgaagctccccttggctacagcatcgaggatatccgccctgcaggcggcatcaagaagttctccgctgcttactcgaactgcgcgaggaagccatcctgatatctctgtcgtcatccccatcctagtagcgtagaaaccacctgcattttcattttgatctccctaatccctccggctagctgctttccagtgaccaaaagatatcaaagaccacttcccgtcttcctcccgtggctgtctgtcatctggctctgaaacgatggcagtcctgcaagttgctgctgctgcccctccccctgtctctgtgattgggttcgagggatttgagaagcgccttgagatcagcttctctgaggcacctgtcttggctgaccccagcggaaggggactgcgtgcgctctcgcgtgcccagatcgactctgttcttgaccttgctcggtgcaccattgtgtccgagctctcaaacgaggacttcgactcttatgtcttatctgagtcgagcctgtttgtctacccatacaagattgtgatcaagacctgtggaactacaaagcttctgctcgctattccgaggatccttgaacttgctgaagagctcctgttgccactcgctgcagttaaatactcccgtggaacgttcatattccctgaagcacagccttccccacacaagaacttcgctgacgaggttgccttcctgaatcgcttcttcggtggcctcaagtccggtggcaatgcttatgtgattggtgactctgcgaagcccgggcagaagtggcacgtctactacgccgctgagcaccctgaggagcctgttgttactctagagatgtgcatgactgggctggacaagaagaaagcttctgtcttcttcaagaccactgctgatggttactcgctgtgcgccaaggagatgaccaagctctctggtatctcggacatcatcccagagatggagatctgtgacttcgacttcgagccctgtggctactccatgaatgctgttcatggccctgctttgtcgaccattcatgtgaccccagaggacggcttcagctatgcaagctacgaggtcatgggctttaacccgggctctttctcttatggtgacctggttaagagggtgctgaggtgctttggtccaactgagttctctgttgccgtgaccatcttcggtgatcgggacaatgcgaagacctgggggacgaaactggatgctgaggcctatgcttgcagcaacatggttgagcaggtgctgccgtttggtggcttgctcatctatcagagcttcactgttacggccgaaacgacccatgggtcgccgaggtcagtcctgcatgacttcgctggtgacattgtcaagaatcgctcagagagtgatgctccctgggaagctgatgctgtggatgagagcgaggaaagagatgtaaagaagatgaaatgctgatgtggtcgacgatagatcagattcagagttgctgccactggttatcttgtgaagcagccaagcctaattatttatgccacataacctgtgctattgtaatgtgtcacatgcttatatttgcaataaacagctctaggtggtcagctttgtctgccgcaatgagcagtgtatcgatattgtggttttgaattgtttggatctaaataaagtcttgtgttcgatacaatttcgatgccttttctattggc

SEQ ID NO: 40258 - DNA, 1993 bp, Zea Mays
ataaacgacctggcccatccctccttcctcatcacacagcgccaccgcgtggttcgttaggaaaggaaatcgattcccccgcatccgatctcttcggtgctagagaaatataggccgccgcctcctcctcattcggtgaaaggtgggcggttagggttgggagatctcttgactcacgacacgagcagcagaattcgtcgagggccgctggttgctgcgagagtgaaaattgaatgttctaatggagtccaagggtggcaagaagaagtctagcagtagtcgttcctccctgatgtacgaagctccccttggctacagcatcgaggatatccgccctgcaggcggcatcaagaagttctccgctgcttactcgaactgcgcgaggaagccatcctgatatctctgtcgtcatccccatcctagtagcgtagaaaccacctgcattttcattttgatctccctaatccctccggctagctgctttccagtgaccaaaagatatcaaagaccacttcccgtcttcctcccgtggctgtctgtcatctggctctgaaacgatggcagtcctgcaagttgctgctgctgcccctccccctgtctctgtgattgggttcgagggatttgagaagcgccttgagatcagcttctctgaggcacctgtcttggctgaccccagcggaaggggactgcgtgcgctctcgcgtgcccagatcgactctgttcttgaccttgctcggtgcaccattgtgtccgagctctcaaacgaggacttcgactcttatgtcttatctgagtcgagcctgtttgtctacccatacaagattgtgatcaagacctgtggaactacaaagcttctgctcgctattccgaggatccttgaacttgctgaagagctcctgttgccactcgctgcagttaaatactcccgtggaacgttcatattccctgaagcacagccttccccacacaagaacttcgctgacgaggttgccttcctgaatcgcttcttcggtggcctcaagtccggtggcaatgcttatgtgattggtgactctgcgaagcccgggcagaagtggcacgtctactacgccgctgagcaccctgaggagcctgttgttactctagagatgtgcatgactgggctggacaagaagaaagcttctgtcttcttcaagaccactgctgatggttactcgctgtgcgccaaggagatgaccaagctctctggtatctcggacatcatcccagagatggagatctgtgacttcgacttcgagccctgtggctactccatgaatgctgttcatggccctgctttgtcgaccattcatgtgaccccagaggacggcttcagctatgcaagctacgaggtcatgggctttaacccgggctctttctcttatggtgacctggttaagagggtgctgaggtgctttggtccaactgagttctctgttgccgtgaccatcttcggtgatcgggacaatgcgaagacctgggggacgaaactggatgctgaggcctatgcttgcagcaacatggttgagcaggtgctgccgtttggtggcttgctcatctatcagagcttcactgttacggccgaaacgacccatgggtcgccgaggtcagtcctgcatgacttcgctggtgacattgtcaagaatcgctcagagagtgatgctccctgggaagctgatgctgtggatgagagcgaggaaagagatgtaaagaagatgaaatgctgatgtggtcgacgatagatcagattcagagttgctgccactggttatcttgtgaagcagccaagcctaattatttatgccacataacctgtgctattgtaatgtgtcacatgcttatatttgcaataaacagctctaggtggtcagctttgtctgccgcaatgagcagtgtatcgatattgtggttttgaattgtttggatctaaataaagtcttgtgttcgatacaatttcgatgccttttctattggc

SEQ ID NO: 40259 - DNA, 819 bp, Zea Mays
cttgctccacgtatttggacgttgtgcttccatgaagcagagtagtactcggcttcctccacaagacatgctcggcctcggcagtgtgctggacgctagagccgcgtctccatttgccggacgtagcctcaactctgccctacatggcgagctctgcaagcgccggcagccttggcgcacaacgcctctgcatggtcgctggtcatcagccatggacgagcccaacgtcgcgctgagcttcgcttctggtggccgccgactcagctcgttatcgtctacagctagccgtggatctcgcctggacctcgtcgttcctgctcgacaacgcttcggcatgccgttgagttttgcctcacctcgccgtcaagcaggctacgaagctccgccacactgcatagcagccactactcctcgccatcaggcctgatgactgactcactgacaccgcgctcgatgtggaagaatggaattagatgaagaaagcgaggttcatcgtggtgctcaccaggtgctcgataaaatgactgagttacgaaaccctcgccgacttcgttgttcttgtgattatcgagccagattcagttatgttgatcacgtgatgcggaagacgagctgagtcaaccaaaagatgttgttaagtgtgggcttcttcgcaaggcgatgctgatgaatgaacttaaggatggatgacccgaacaagtgtcggaccaaaaggtgatcgccaagtggacgtcatctaacaaacactaacctagtgttattccaggcaagccccggtgcatgcaaccccttccttgtgtttttaaaataatttttaca

SEQ ID NO: 40260 - DNA, 1858 bp, Zea Mays
ccacgtatttggacgttgtgcttccatgaagcagagtagtactcggcttcctccacaagacatgctcggcctcggcagtgtgctggacgctagagccgcgtctccatttgccggacgtagcctcaactctgccctacatggcgagctctgcaagcgccggcagccttggcgcacaacgcctctgcatggtcgctggtcatcagccatggacgagcccaacgtcgcgctgagcttcgcttctggtggccgccgactcagctcgttatcgtctacagctagccgtggatctcgcctggacctcgtcgttcctgctcgacaacgcttcggcatgccgttgagttttgcctcacctcgccgtcaaggctacgaagctccgccacactgcatagcagccactactcctcgccatcaggcctgatgactgactcactgacaccgcgctcgatgtggaagaatggaattagatgaagaaagcgaggttcatcgtggtgctcaccaggtgctcgataaaatgactgagttacgaaaccctcgccgacttcgttgttcttgtgattatcgagccagattcagttatggtgagtgacttgctactcctgcataatatatcgaagcatggaatggtttagtatactagttgcgataatttccttgtcgtggttaggatgcatggtgacaatattagatgtttgctgatgtgttcttaccgagtagccgattctattggttcgaggaaagactcgaactacaacccactatcgatgtcgtagtttcgagtgaatttagtattagtgcgatatttaacttgtgatcgacgaaaagcccgaagtagtattcattaatcgatgtagtggatttgagctgaatttaatattagcgcgcatttttgttagccgaattgttagatagattgaataaatatgagtggtgcgaaataaaattaaaatagttctttgtgagcgatgtggtataatttatacagcgagggataagtttagcatttaattaattagtcgataagttctgtctaggctaattgtgttaagtgtgttagtttacctatccatatgttactcttaggagttgatagtggtgaatttaattaagtaaaattttggtagtatactctagttaaaaactatagaacttatgccttgtttaatgttttttaatattcggattaggttcgagtaagttagagaacatgatcgatgtgttgggttgtataaacctatttggtgtttgatttagttgatgtgctatgcctgataatctagattagtagttctaaaatctagttaaagtatttatattcatcaccttaagttataggtatccatggttgttgcgtctaagtattgttagccttcggtgttatgctttagctaagtaaagcatagatcttgtgataaattattgcttcgtgatgttgacttagatccggatgagctagaaaagcgagattatggtgtttagtcatttatcgatgtctactgtttacttatgggagttgttttgtgcctctccattaagtgtttagttttctactgtgtagcattatttatcttgtgctattcctgctcatatttattcatgtgcatcatgcatttcaatttggtgcgctagttgatcacgtgatgcggaagacgagctgagtcaaccaaaagatgttgttaagtgtgggcttcttcgcaaggcgatgctgatgaatgaacttaaggatggatgacccgaacaagtgtcggaccaaaaggtgatcgccaagtggacgtcatctaacaaacactaacctagtgttattccaggcaagccccggtgcatgcaaccccttccttgtgtttttaaaataatttttaca

SEQ ID NO: 40261 - DNA, 1866 bp, Zea Mays
aaaaaaaaaacgaagtcgccttcttcaaaaacctcttcgacgtcgcacccgcaacgcacgctggcgggcggcggccatggcgtacctccctccccacaagcgccaacccagcaccacagcctccacgcccatccccgcacccaacccgccacctccgtccctctcctcctcccttcgctccctctccctctcctccccgcgcggccgcggccgcggcgcagtcggacgccacccgctcgcttctacaaagattttccgcgctgccggctgcatctcccgttggttccctctacctcccttctcccctgccggcgacggcgaggagtacaccctacgcctcgagcccttcccttgttcccccatcgagcacaggaccggcgccaaaccccttgcccttgtcgtcgcctccaccccaggacaaggctcttccggctccactgcggcggcagtcacctccatcgccgagcagtttcttcccgatctccttgccgccgcggagagggccaaggcagaaggcgcgcctaaggatgagttggtgaaactgagtctcgttgcaagactgggaacggtgctcttcgagtgccagccaattcgacgattcatcgtgaattatgtattcagaggtggatcgcccgtttcactggacgaactccgccaggccgctaaagcaggggaagatggttccaggagccagttgcgtaaaacgttctacaccagtttgtctagtgagtgtctggatgatatggagcgaaccatggtgaagaggattgggctggattttgattcgtccaagaagcactatcatgtgaaggtttctgataagaatcgaagtgattctacaatatcttgcaaatgcaccgtggaggaagatgggagtcttgctatccataaggttgaattgaatcaggtacggcacttggtggaagacatatcctgtcttttcaaaggtcttgatctaaggttgatgttgagtaagaaaaggatcctgaaaaacctagattctgaagtggaaaatgctgtaaagagcttggtgtctactgctattattgatcctaatgtgaaagggggagttagatggccacttggaaaggaatcaattggcgagaggttcagcatagttggggtgtggcacacgggctacaaagctttcagaaacgagaccatgaggctcaagctaaggcatgctgacagattcgatcaccgtacctcgactgggggagtttctgatgaagttacattcaaactaactgctatatcttgcaaactggaggaagatgatctggcggagagcgctgtgaaagagatgctggagtctgcggtccaaatgctatgggacaatgcgctcaattaccgggtcgtgccttgagctccggttatgcagacaatatttcttccttgaagatgcaaagcgacatgatttctttgagcccctcctgtcctgtatatacatctgcgatggtgagactcaagttgtacttcaagtgtggcaacaattactagtactaaacaagagaactcctagacacaactgacgctggggctgcccacgcacgccatcaaaaaaaaaaagtagcgttcggttagcttggctggttcccggtcattcggtcccacgtagttaggttgtcgagttctgattgagtcctgaaaaaagtcgcggatggagtcgtcctggaaaatatccccatcctcatcctcgcccttctgcccgaactcaaccgcaatgtacgatcgcacctccccgctctcactttgcaaggacaccacctcggtccataaacaacttgtccaaagtaataagcggacgtgccaaagcgacacacagttcttccatgcaagcaaccagccaagatgccgaggcagcca

SEQ ID NO: 40262 - DNA, 1695 bp, Zea Mays
aaaaaaaaaacgaagtcgccttcttcaaaaacctcttcgacgtcgcacccgcaacgcacgctggcgggcggcggccatggcgtacctccctccccacaagcgccaacccagcaccacagcctccacgcccatccccgcacccaacccgccacctccgtccctctcctcctcccttcgctccctctccctctcctccccgcgcggccgcggccgcggcgcagtcggacgccacccgctcgcttctacaaagattttccgcgctgccggctgcatctcccgacaaggctcttccggctccactgcggcggcagtcacctccatcgccgagcagtttcttcccgatctccttgccgccgcggagagggccaaggcagaaggcgcgcctaaggatgagttggtgaaactgagtctcgttgcaagactgggaacggtgctcttcgagtgccagccaggtggatcgcccgtttcactggacgaactccgccaggccgctaaagcaggggaagatggttccaggagccagttgcgtaaaacgttctacaccagtttgtctagtgagtgtctggatgatatggagcgaaccatggtgaagaggattgggctggattttgattcgtccaagaagcactatcatgtgaaggtttctgataagaatcgaagtgattctacaatatcttgcaaatgcaccgtggaggaagatgggagtcttgctatccataaggttgaattgaatcaggtacggcacttggtggaagacatatcctgtcttttcaaaggtcttgatctaaggttgatgttgagtaagaaaaggatcctgaaaaacctagattctgaagtggaaaatgctgtaaagagcttggtgtctactgctattattgatcctaatgtgaaagggggagttagatggccacttggaaaggaatcaattggcgagaggttcagcatagttggggtgtggcacacgggctacaaagctttcagaaacgagaccatgaggctcaagctaaggcatgctgacagattcgatcaccgtacctcgactgggggagtttctgatgaagttacattcaaactaactgctatatcttgcaaactggaggaagatgatctggcggagagcgctgtgaaagagatgctggagtctgcggtccaaatgctatgggacaatgcgctcaattaccgggtcgtgccttgagctccggttatgcagacaatatttcttccttgaagatgcaaagcgacatgatttctttgagcccctcctgtcctgtatatacatctgcgatggtgagactcaagttgtacttcaagtgtggcaacaattactagtactaaacaagagaactcctagacacaactgacgctggggctgcccacgcacgccatcaaaaaaaaaaagtagcgttcggttagcttggctggttcccggtcattcggtcccacgtagttaggttgtcgagttctgattgagtcctgaaaaaagtcgcggatggagtcgtcctggaaaatatccccatcctcatcctcgcccttctgcccgaactcaaccgcaatgtacgatcgcacctccccgctctcactttgcaaggacaccacctcggtccataaacaacttgtccaaagtaataagcggacgtgccaaagcgacacacagttcttccatgcaagcaaccagccaagatgccgaggcagcca

SEQ ID NO: 40263 - DNA, 277 bp, Zea Mays
atgaaatccgagtcaaacatccagaatacaagggagcaaatctgtcatgtaacattacaaagtttacaagaaacaactcccaataccactgattggacacctattgtcacgcatgcttgtttgttggataaaaggcatcaagaacaaacaacagttgtgctaccgctgagccaatttcttcaggtgttgaaacaacttttgctttatccactgtcgatcatatggcaggaatgcctgaatcgagtgatcataactgcatatggaaaggggagcacaa

SEQ ID NO: 40264 - DNA, 2028 bp, Zea Mays
agctatcgcctattccttccctccctcgcattccggcaggctccgcaaacgtccgtgcgcccccgcgtcgccgcttcctccgtcccttccgttctcggcgaatcgaatccgctagcccccgacatttatggctgccgcgttaactcgcctccgatccgccgtcgagcggctcgggccttcccgcgcccgcgccttctcatcagccgctgctgaggccggggctgcgggaccgtgcagcgactctagggctttcgccgcggcctcggtggccgccggctcaggtctcgggatctggctgctgtcctcgaacccgcagccactcacagagtccggccaggcggaggatgccgccaccgcgggaggtggaggcaacagggccttctccgcagcttttggcggtgtcggagccaccggggagcgggagggcatgtttctgttcggagattcatatcgccgaagggtgttcttcaagtacgagaagaggattaggacgcgcagccctccagagaagatctttgagtacttcgcatccgtccacagcccagaggggaagggagattgaagggggagcgccaccctggcgagctacaatgtgctccatctgagtttttcatgctattcgatacaaatggtgatggtgtcatctccttttctgagtatatcttctttgtaacattacttagtatccctgaatcaagcttccatgtggcttttaagatgtttgaccttgaccacaatggggaaattgacaaagacgagtttaggaaagtgatgacactgatgcgatcctataatagacaaggagctgcccatagggatggtttacgctttggacgcaaggttggtcagccagtggaaaatggtggactggtcgaatacttctttggcaaggatgggaatgaacatctacactatgataagttctctagttttttgaagaaattgcatgatgagattgtccgcttggagtttagtcactacgatgtgaaatcatccaacacaatacctgttaaggactttgcgttatccatggttgcttctgctgatatgatttacatagacaagttactggatagagttgaggatttggacgacaatcttgacctcaaggatctgcgtattacctttgaggagttcaaggcatttgctgatcttcgaagaaggttggaaccatttagaatggctatcttcagctacggcaaagtaaatggtctgttgacgaagcaggatctaaaacgtgccgcatcacatgtttgtggagtggacttgactgataaagtagtagacataattttccatgtgtttgatgctaactgtgatggtaacctgagttcagaggagttcctgaggtcattacaaagaagagaaagtgatattcgccagccagcaacgtcaggtttcctaggggtgatcgcctgttggctgaactgtacaaagtgttctcttcaacagatgctgtcccagtagattcttttttgacgctcatgacagtcttcagttgcccttggttgctctgtgcttattgagctggagaacgtcatcggggagttctgaagtgtgaagaggatttttgttgtaaatattaccctgcggcccctgcttagtagctcctacgttaccacgtagcagctgtaacctgtaaggaattccttccgttctcgttcaagggcttcgatgacatacatcttctcccctgacattaaatctccgtcgacttagctggagccttgctacctatcttgcttttagctcatccctgatgctaatattctgtggattgtggttgaacaatcacacttgtaagactagcttgggaatactatttttctaagagattttcatttttccaaggaaaaataaactaattttctttggaaatttcaaatgaaaatactatgagaaaatgtggttcccaaaccagcctgtaatgattaatcgatgctttttttctgaataagtgaatggtaatgggatccgctggaaacattatattatgtaaaaaacttgtgacataactgatactctatc

SEQ ID NO: 40265 - DNA, 1116 bp, Zea Mays
attttctagaaatgttgatgaacatgactatgctatatattgtccgcttggagtttagtcactacgatgtgaaatcatccaacacaatacctgttaaggactttgcgttatccatggttgcttctgctgatatgatttacatagacaagttactggatagagttgaggatttggacgacaatcttgacctcaaggatctgcgtattacctttgaggagttcaaggcatttgctgatcttcgaagaaggttggaaccatttagaatggctatcttcagctacggcaaagtaaatggtctgttgacgaagcaggatctaaaacgtgccgcatcacatgtttgtggagtggacttgactgataaagtagtagacataattttccatgtgtttgatgctaactgtgatggtaacctgagttcagaggagttcctgaggtcattacaaagaagagaaagtgatattcgccagccagcaacgtcaggtttcctaggggtgatcgcctgttggctgaactgtacaaagtgttctcttcaacagatgctgtcccagtagattcttttttgacgctcatgacagtcttcagttgcccttggttgctctgtgcttattgtaggagctggagaacgtcatcggggagttctgaagtgtgaagaggatttttgttgtaaatattaccctgcggcccctgcttagtagctcctacgttaccacgtagcagctgtaacctgtaaggaattccttccgttctcgttcaagggcttcgatgacatacatcttctcccctgacattaaatctccgtcgacttagctggagccttgctacctatcttgcttttagctcatccctgatgctaatattctgtggattgtggttgaacaatcacacttgtaagactagcttgggaatactatttttctaagagattttcatttttccaaggaaaaataaactaattttctttggaaatttcaaatgaaaatactatgagaaaatgtggttcccaaaccagcctgtaatgattaatcgatgctttttttctgaataagtgaatggtaatgggatccgctggaaacattatattatgtaaaaaacttgtgacataactgatactctatc

SEQ ID NO: 40266 - DNA, 4102 bp, Zea Mays
gtcgcttcctgtcccagttctttctcgcttttcctcctctctgcttttctttgctaccatcggtgtcggaaactccgcttctgcacgaatatttcgtctgctgtcagcttgctcagcggcttcgtttgtttggtgagatgtgttttcccctttctccttcgtcgtgagtttccattccgtggacatctttttccagattccttcgtggattagatcctggctcctctagtcgagatcgtcttgctttttttccgagatggagattaggaccgagaaggcaagtatttttctttggtagctttggcatgtgcagacagataaggaaatgcttctatagttctacctcattgaactctattttggagattgagattgaaaaggcaagtatttcttttttggtaaagtatttcgcaagtggacatctggttccaattttttttaaagggatttggttccaaattcgtgcttggacctgccaggattctattgtttttgccgtatcctcttgctttggtacatgtagatcaacaagcaaatgtttttttatttcattgaacttcaatgagtgcaggttatgttctgtttgtattttattgaacttcattatactattttcttttggtaaagttgttcacatcaagtgcatgttgcattctttttagttttttaacggttctgctttttcagcttgctcttcgttgcatttattttttagctgtgtttccattcctccagctgtgtttccattctccctttgttgaccatttcgatttcgtggacaactaatttcctttgggtgaaatgatctgcacgaagttgagatttcgttttcttttgtttatggacgcatcaagattccaacacgctgttattttcttcgctggtttagtaatgaggaaatccattttgcaaccctaattttagggtttagggttttaactgatattgtgaaaaaagttgttcctccctggtcccaacacttccatctactctctgattgttctgctccagactatggtgtgtaaatctgccgcatcgttttttttgtactggaaagctctaaaaataaggaaattatttgcatcgtttttaaaaagatagcatcttgcacggtcgctttttggagaaagaaaagtaacccaattcggttttgtccaaattagtttcaatttgataccttctcgagttttgcttcctgtttttatcgtttgggtttactaaattgcttagaattcaacatctttccctcataactcacttttttgtctttgttcgactttcgtagaattagatacaatttcctgctcgttccacccaaatttcctcctctcttattgtttttatgtgagtttccttagatcaatacgtgaaggtcaacacatacatgttgtgtttgttgctatgcaaagaatgtcatctaggcacgaggactactatctcaaatcattggagctttctttggcaagtttcatatcataaatagcgtatattgctaccataaattttttacaaccacatttacaacgtggtatccaaaatggttacaacaactcaaccatcatcagagacgtcttcatcaagaatataagtgacatgtctctgaaatttactctttggggaaatcaagcatcaaacttttctatatgtgatatttacaatcaaagcaacaaccaacctattgtcatactgctcgttggatttcttgctaaacaattcaaaggtcaaccatacctaagcggtactacaacaagtttatggtacttcaatcctggaattcctgaggcgcagacctactacaacacgtaaaacaaaataaaaatttggatacaattacttcaaacactcactattttttataccacattttgaatctgctcctctctaatcttatgcccacagttagctaacagtttaataaactatagtctactaagctagcagtagcaatatttaaactgaaattgtagataaaccttatttttttaccattacctctttatatattacattcagaccagtttggtatccctcttcagagaatattcaatacttatatttatttttttacctaaaactaatagccaccgtttcatttcgttttctctataaaaaatcactgacagatgttactgcaaaagaaaaatcgccgctgcctagaatcagtgtctacaaaaacaattcattttttaaatggtgttataattgcttgtatttcttaggcactatttcaattttttaaaatgatgatacatgctatcctctttttcctaaagcgggttacaggacatcctattgtcttcaattttttttaaaaaataaaagtattgttcatactactcatgcacaacttcaatacaaaacaaattaaggtacacaccctctcgttttttgattgaactcttaggataccatgttctctttaaaaaaccaaaaaaaaatatttagatgttgagccaatcattcacatcacattatttacgccaaaatggaaaacataagaggaactttaacaaaaaaacaaaaaatactaaaactaagtcttatctgatcatggttgtgacatcacttgaagtaatgaatacacaatgaatgttggcaaagcccaacaaatactcaaagttggctttctcttagtctgctttctcttaatcaaccactaataactcattctcacaaagggtgggggttagagagggctcataaatggctggaaatgggtttggagtgttttgaacaccaatctctaaaggcatgtgataatatatataccccaacacaaaactagttgtaggaggtcaaaactagcagtttgggactatacacgcccaacactgttgggcctccaagtagcattgccacaacataaattgtctcacaaaaataccatattttttaccctgaactctatttttagtgaccttatttttttccagaaagcttatttcaagggctatccaatctagttaagaacaatatgaaatatcatcaaaatattatgttatgttttctctcatgctatcacttggggttcaattattttgaacacttgagacttgtctatgattcatattgcatccccttgatactatggaatacctatactcaagatcaagataatataataaccacttgagttatgtctttatgtgccatttcttcccaatttcacttcataaggggttgcatcatgtttgtctcatctctttaagcaaacacaccttgagcatgtgacttgaaccatttcaccacatatgagttcgatccattgcttcaagtcacttctagtaatgatttgatcttcaacacaacatgactcctcatagcttgattagtacctcaactcaatgcaagtactctcttcttcaccttagccatgatacctctatcctcaagccttcacttgacactaatgcactcttgattcattcttcaatatctgatcaaatccaatcctctatcatactcttttgttcttgtaaaacaaaccacttatatgagacctttgcataatcatcaactcatgtctcattagctatttgccaaacatgccctctttcatataattctatgatatcccataatataaaaaccattttatcgattccctttgcattgttgtctttgtattgatgttgattgtttccaatcagaagatccaccataatatcctcaaagactagccatagcagaaaggtacccattttggctgcttggtttaagcgacactaccgctccctagcaattttcttcgagtacaacaacacacaaatttcaaattcatttgaacactgttgggggccttcggcttctgaaggtcctcaaaaacatgatttaacaatgcctctggagtataatgtatggacagggatcttcgaacaagaacccacggtatgaagaagcacagaaacagtacgaaggatggaacagagccgaagctgtgcgcaagggagcttcggcatgatggcagaaaggaggaaaccgacttaaagaggaaaagactatctagacccagatagattactatagagttattgtcaaaagcaaaaggcctggatgtaatttcccgtacggttcacgctgacttggcattcgctttcgcgtc

SEQ ID NO: 40267 - DNA, 2099 bp, Zea Mays
caaaagaggaagaggaatacccaccatcactcactcacattgtcacgtactgtgtctacgactgtgcaagtatagtgtcacacattgagacacactgagagagagagatggtgtgcctatgcacgtatagtgtcttactagtaggctctatatatgcgtggtgtgggctgccgtgccgtaccatcactgctctcctgccctcctctttataaacagcgcgcaacgagggagccccggcacttgcttcaatactagctcgctcaccactcaccagtcaccagtctagcaagcaacaacaaaggcgtaggaggaagcttgttttggaccgagcaagcgagccagccgagcgtgggagagagagaaagaggaattaattgatgggcgaggaggccagctgcgacgccgtcagcctgacggaggccggcaccaacgccaagccggtgggcaaggaggtcggccgcgagccggctgcagcccccgccgccgcggccgacccccggctgcagggcatttccgacgccatccgcgtcgtgccgcacttccccaagcaaggcatcatgttcaacgacatcaccacgctgctgctgcgccccagggtgttcaaggacgccgtcgacctgttcgtcgagcggtaccgcgggatgggcatcgacgccgtcgccggcttttccgcctcgtccggtacgtggccccccttgggaccgcgtgatcggacggttgcgtgcggccggcgcacgggatcgggcggtccggggacgccggcggtacacacccgtcgtcggtttccgcgggtggcgcgccctgatgtcacgcggctccgctgtcgctgtcgctgtaactgtttccgagattttgctctgcggctcgctggatcctctgtccgcttccgttccgcgggccgtgttcccgaatttccattttttttatttttctttacaagcgggacgtacaaatcgagcgatttgcgctggctctgataaattgttgggttcacttggacattcctgtccagggattgaggccaggggcttcgtgttcggcccggcgatcgcgctggctattggcgctaagttcatacctctgcgcaagccaaggaagctcccaggtgagagattccatgaccatgcatgttctgtttttcttcttcttcttaacccatctccacactctgcactgtacccagctgttgcttttgtcgatctagtgcccagcctgtggcgacaccctgatcaagtatatgtttagcgaggagggttcttgcttagcccataatctctgacaccgccagagttgtttgtctggcctgcatgcagttgcagtcccgtgaatgggatattaaaagaaaaatgcaacagacggtttatacgagaccgatcattcattcattccccacttctgtccacaatgttgtagaatcatgtgctgacaccggctctcggaaacaattattattattattattggaaggtgaggtgatctccgagaagtacgttctcgagtacgggactgattgcctggagatgcgtgtcggggccatcgagcgatccggcgagcgggtgctggtcatcgacgacctggttgcgaccggagggacactctgtgctgcgatcaggcttctagaacgtgctggagccgatgtggtcgagtgcgcgtgtgtcattgggctcccgaaattcaaggtgtcagagtgatcagggatattggctgtttactccttgctactgcgattgaacagtggagggacgacatggacaaggacaagtatattcggtgcatcactaagtcttggtgaggggagagattgtagtgttttaggctgagtagtgaagagcctgtagttctgcacggaacatgatggttattagttgatgcaacagcgttgctgttctattattgtttgttgaattttgtggctttggtttgaagcctagcctgggctcaaacagggatatgcatggcgcttgagtgaacaacttcgacagcaacacacacatgcttaatgtcagggaagtagctaggaacctgctacttgttacccgtacgtagtgtcatggaactcataaggtttagtggcaaaattcataaaaatgacacgggaa

SEQ ID NO: 40268 - DNA, 1750 bp, Zea Mays
caaaagaggaagaggaatacccaccatcactcactcacattgtcacgtactgtgtctacgactgtgcaagtatagtgtcacacattgagacacactgagagagagagatggtgtgcctatgcacgtatagtgtcttactagtaggctctatatatgcgtggtgtgggctgccgtgccgtaccatcactgctctcctgccctcctctttataaacagcgcgcaacgagggagccccggcacttgcttcaatactagctcgctcaccactcaccagtcaccagtctagcaagcaacaacaaaggcgtaggaggaagcttgttttggaccgagcaagcgagccagccgagcgtgggagagagagaaagaggaattaattgatgggcgaggaggccagctgcgacgccgtcagcctgacggaggccggcaccaacgccaagccggtgggcaaggaggtcggccgcgagccggctgcagcccccgccgccgcggccgacccccggctgcagggcatttccgacgccatccgcgtcgtgccgcacttccccaagcaaggcatcatgttcaacgacatcaccacgctgctgctgcgccccagggtgttcaaggacgccgtcgacctgttcgtcgagcggtaccgcgggatgggcatcgacgccgtcgccgggattgaggccaggggcttcgtgttcggcccggcgatcgcgctggctattggcgctaagttcatacctctgcgcaagccaaggaagctcccaggtgagagattccatgaccatgcatgttctgtttttcttcttcttcttaacccatctccacactctgcactgtacccagctgttgcttttgtcgatctagtgcccagcctgtggcgacaccctgatcaagtatatgtttagcgaggagggttcttgcttagcccataatctctgacaccgccagagttgtttgtctggcctgcatgcagttgcagtcccgtgaatgggatattaaaagaaaaatgcaacagacggtttatacgagaccgatcattcattcattccccacttctgtccacaatgttgtagaatcatgtgctgacaccggctctcggaaacaattattattattattattggaaggtgaggtgatctccgagaagtacgttctcgagtacgggactgattgcctggagatgcgtgtcggggccatcgagcgatccggcgagcgggtgctggtcatcgacgacctggttgcgaccggagggacactctgtgctgcgatcaggcttctagaacgtgctggagccgatgtggtcgagtgcgcgtgtgtcattgggctcccgaaattcaaggtgtcagagtgatcagggatattggctgtttactccttgctactgcgattgaacagtggagggacgacatggacaaggacaagtatattcggtgcatcactaagtcttggtgaggggagagattgtagtgttttaggctgagtagtgaagagcctgtagttctgcacggaacatgatggttattagttgatgcaacagcgttgctgttctattattgtttgttgaattttgtggctttggtttgaagcctagcctgggctcaaacagggatatgcatggcgcttgagtgaacaacttcgacagcaacacacacatgcttaatgtcagggaagtagctaggaacctgctacttgttacccgtacgtagtgtcatggaactcataaggtttagtggcaaaattcataaaaatgacacgggaa

SEQ ID NO: 40269 - DNA, 1674 bp, Zea Mays
gcacttgcttcaatactagctcgctcaccactcaccagtcaccagtctagcaagcaacaacaaaggcgtaggaggaagcttgttttggaccgagcaagcgagccagccgagcgtgggagagagagaaagaggaattaattgatgggcgaggaggccagctgcgacgccgtcagcctgacggaggccggcaccaacgccaagccggtgggcaaggaggtcggccgcgagccggctgcagcccccgccgccgcggccgacccccggctgcagggcatttccgacgccatccgcgtcgtgccgcacttccccaagcaaggcatcatgttcaacgacatcaccacgctgctgctgcgccccagggtgttcaaggacgccgtcgacctgttcgtcgagcggtaccgcgggatgggcatcgacgccgtcgccggcttttccgcctcgtccggtacgtggccccccttgggaccgcgtgatcggacggttgcgtgcggccggcgcacgggatcgggcggtccggggacgccggcggtacacacccgtcgtcggtttccgcgggtggcgcgccctgatgtcacgcggctccgctgtcgctgtcgctgtaactgtttccgagattttgctctgcggctcgctggatcctctgtccgcttccgttccgcgggccgtgttcccgaatttccattttttttatttttctttacaagcgggacgtacaaatcgagcgatttgcgctggctctgataaattgttgggttcacttggacattcctgtccagggattgaggccaggggcttcgtgttcggcccggcgatcgcgctggctattggcgctaagttcatacctctgcgcaagccaaggaagctcccaggtgagagattccatgaccatgcatgttctgtttttcttcttcttcttaacccatctccacactctgcactgtacccagctgttgcttttgtcgatctagtgcccagcctgtggcgacaccctgatcaagtatatgtttagcgaggagggttcttgcttagcccataatctctgacaccgccagagttgtttgtctggcctgcatgcagttgcagtcccgtgaatgggatattaaaagaaaaatgcaacagacggtttatacgagaccgatcattcattcattccccacttctgtccacaatgttgtagaatcatgtgctgacaccggctctcggaaacaattattattattattattggaaggtgaggtgatctccgagaagtacgttctcgagtacgggactgattgcctggagatgcgtgtcggggccatcgagcgatccggcgagcgggtgctggtcatcgacgacctggttgcgaccggagggacactctgtgctgcgatcaggcttctagaacgtgctggagccgatgtggtcgagtgcgcgtgtgtcattgggctcccgaaattcaaggtaccgcgttgctggattcacaactaatctgaactactgatatgcaaaaccagctgtttattattaaaatctagctgacatactgccatatactactgtactagcctgtattacgtattatgataacgttaggttccatatgctgtactagcctgtactagacatgctcggatgagattgtaaaatctgggtttcagatataaaaaacaatctatatatgttgtttcgtgg

SEQ ID NO: 40270 - DNA, 1597 bp, Zea Mays
gcacttgcttcaatactagctcgctcaccactcaccagtcaccagtctagcaagcaacaacaaaggcgtaggaggaagcttgttttggaccgagcaagcgagccagccgagcgtgggagagagagaaagaggaattaattgatgggcgaggaggccagctgcgacgccgtcagcctgacggaggccggcaccaacgccaagccggtgggcaaggaggtcggccgcgagccggctgcagcccccgccgccgcggccgacccccggctgcagggcatttccgacgccatccgcgtcgtgccgcacttccccaagcaaggcatcatgttcaacgacatcaccacgctgctgctgcgccccagggtgttcaaggacgccgtcgacctgttcgtcgagcggtaccgcgggatgggcatcgacgccgtcgccgggattgaggccaggggcttcgtgttcggcccggcgatcgcgctggctattggcgctaagttcatacctctgcgcaagccaaggaagctcccaggtgagagattccatgaccatgcatgttctgtttttcttcttcttcttaacccatctccacactctgcactgtacccagctgttgcttttgtcgatctagtgcccagcctgtggcgacaccctgatcaagtatatgtttagcgaggagggttcttgcttagcccataatctctgacaccgccagagttgtttgtctggcctgcatgcagttgcagtcccgtgaatgggatattaaaagaaaaatgcaacagacggtttatacgagaccgatcattcattcattccccacttctgtccacaatgttgtagaatcatgtgctgacaccggctctcggaaacaattattattattattattggaaggtgaggtgatctccgagaagtacgttctcgagtacgggactgattgcctggagatgcgtgtcggggccatcgagcgatccggcgagcgggtgctggtcatcgacgacctggttgcgaccggagggacactctgtgctgcgatcaggcttctagaacgtgctggagccgatgtggtcgagtgcgcgtgtgtcattgggctcccgaaattcaaggatttgtacaagttgaatggaaaacctgtatacgtgctggttgagtctcgtgaataatcggagaaatgacaacttattctcaggtgtcagagtgatcagggatattggctgtttactccttgctactgcgattgaacagtggagggacgacatggacaaggacaagtatattcggtgcatcactaagtcttggtgaggggagagattgtagtgttttaggctgagtagtgaagagcctgtagttctgcacggaacatgatggttattagttgatgcaacagcgttgctgttctattattgtttgttgaattttgtggctttggtttgaagcctagcctgggctcaaacagggatatgcatggcgcttgagtgaacaacttcgacagcaacacacacatgcttaatgtcagggaagtagctaggaacctgctacttgttacccgtacgtagtgtcatggaactcataaggtttagtggcaaaattcataaaaatgacacgggaa

SEQ ID NO: 40271 - DNA, 1946 bp, Zea Mays
gcacttgcttcaatactagctcgctcaccactcaccagtcaccagtctagcaagcaacaacaaaggcgtaggaggaagcttgttttggaccgagcaagcgagccagccgagcgtgggagagagagaaagaggaattaattgatgggcgaggaggccagctgcgacgccgtcagcctgacggaggccggcaccaacgccaagccggtgggcaaggaggtcggccgcgagccggctgcagcccccgccgccgcggccgacccccggctgcagggcatttccgacgccatccgcgtcgtgccgcacttccccaagcaaggcatcatgttcaacgacatcaccacgctgctgctgcgccccagggtgttcaaggacgccgtcgacctgttcgtcgagcggtaccgcgggatgggcatcgacgccgtcgccggcttttccgcctcgtccggtacgtggccccccttgggaccgcgtgatcggacggttgcgtgcggccggcgcacgggatcgggcggtccggggacgccggcggtacacacccgtcgtcggtttccgcgggtggcgcgccctgatgtcacgcggctccgctgtcgctgtcgctgtaactgtttccgagattttgctctgcggctcgctggatcctctgtccgcttccgttccgcgggccgtgttcccgaatttccattttttttatttttctttacaagcgggacgtacaaatcgagcgatttgcgctggctctgataaattgttgggttcacttggacattcctgtccagggattgaggccaggggcttcgtgttcggcccggcgatcgcgctggctattggcgctaagttcatacctctgcgcaagccaaggaagctcccaggtgagagattccatgaccatgcatgttctgtttttcttcttcttcttaacccatctccacactctgcactgtacccagctgttgcttttgtcgatctagtgcccagcctgtggcgacaccctgatcaagtatatgtttagcgaggagggttcttgcttagcccataatctctgacaccgccagagttgtttgtctggcctgcatgcagttgcagtcccgtgaatgggatattaaaagaaaaatgcaacagacggtttatacgagaccgatcattcattcattccccacttctgtccacaatgttgtagaatcatgtgctgacaccggctctcggaaacaattattattattattattggaaggtgaggtgatctccgagaagtacgttctcgagtacgggactgattgcctggagatgcgtgtcggggccatcgagcgatccggcgagcgggtgctggtcatcgacgacctggttgcgaccggagggacactctgtgctgcgatcaggcttctagaacgtgctggagccgatgtggtcgagtgcgcgtgtgtcattgggctcccgaaattcaaggatttgtacaagttgaatggaaaacctgtatacgtgctggttgagtctcgtgaataatcggagaaatgacaacttattctcaggtgtcagagtgatcagggatattggctgtttactccttgctactgcgattgaacagtggagggacgacatggacaaggacaagtatattcggtgcatcactaagtcttggtgaggggagagattgtagtgttttaggctgagtagtgaagagcctgtagttctgcacggaacatgatggttattagttgatgcaacagcgttgctgttctattattgtttgttgaattttgtggctttggtttgaagcctagcctgggctcaaacagggatatgcatggcgcttgagtgaacaacttcgacagcaacacacacatgcttaatgtcagggaagtagctaggaacctgctacttgttacccgtacgtagtgtcatggaactcataaggtttagtggcaaaattcataaaaatgacacgggaa

SEQ ID NO: 40272 - DNA, 1668 bp, Zea Mays
gcacttgcttcaatactagctcgctcaccactcaccagtcaccagtctagcaagcaacaacaaaggcgtaggaggaagcttgttttggaccgagcaagcgagccagccgagcgtgggagagagagaaagaggaattaattgatgggcgaggaggccagctgcgacgccgtcagcctgacggaggccggcaccaacgccaagccggtgggcaaggaggtcggccgcgagccggctgcagcccccgccgccgcggccgacccccggctgcagggcatttccgacgccatccgcgtcgtgccgcacttccccaagcaaggcatcatgttcaacgacatcaccacgctgctgctgcgccccagggtgttcaaggacgccgtcgacctgttcgtcgagcggtaccgcgggatgggcatcgacgccgtcgccggcttttccgcctcgtccggtacgtggccccccttgggaccgcgtgatcggacggttgcgtgcggccggcgcacgggatcgggcggtccggggacgccggcggtacacacccgtcgtcggtttccgcgggtggcgcgccctgatgtcacgcggctccgctgtcgctgtcgctgtaactgtttccgagattttgctctgcggctcgctggatcctctgtccgcttccgttccgcgggccgtgttcccgaatttccattttttttatttttctttacaagcgggacgtacaaatcgagcgatttgcgctggctctgataaattgttgggttcacttggacattcctgtccagggattgaggccaggggcttcgtgttcggcccggcgatcgcgctggctattggcgctaagttcatacctctgcgcaagccaaggaagctcccaggtgaggtgatctccgagaagtacgttctcgagtacgggactgattgcctggagatgcgtgtcggggccatcgagcgatccggcgagcgggtgctggtcatcgacgacctggttgcgaccggagggacactctgtgctgcgatcaggcttctagaacgtgctggagccgatgtggtcgagtgcgcgtgtgtcattgggctcccgaaattcaagctgggcatccgtagacatgatgactatacatgagattccggtcggcgtcgtttgttattgcctaaataattaaaactatagaaggatttgtacaagttgaatggaaaacctgtatacgtgctggttgagtctcgtgaataatcggagaaatgacaacttattctcaggtgtcagagtgatcagggatattggctgtttactccttgctactgcgattgaacagtggagggacgacatggacaaggacaagtatattcggtgcatcactaagtcttggtgaggggagagattgtagtgttttaggctgagtagtgaagagcctgtagttctgcacggaacatgatggttattagttgatgcaacagcgttgctgttctattattgtttgttgaattttgtggctttggtttgaagcctagcctgggctcaaacagggatatgcatggcgcttgagtgaacaacttcgacagcaacacacacatgcttaatgtcagggaagtagctaggaacctgctacttgttacccgtacgtagtgtcatggaactcataaggtttagtggcaaaattcataaaaatgacacgggaa

SEQ ID NO: 40273 - DNA, 2631 bp, Zea Mays
ctgccggcgcggtcgggcagaagcttccgcatccgctcccattccggcgtccggagtcgctgaccgccaagtcagtcagtcgccgaggcgaggacgacgaggcagacaacgcacccccgcacctgttgttaccagcgcggcgcacgagtccagtcgcgtgcaggcgcgctgcatagggccagagccaagtaagtgggtggggacagaaatatcctcctgctcctcggcctcggcgtgctcgcgggcggagcaggaggggctaggaggaggcggatcggggagcggagatcctagccggagggatggcgaagggcggcgtggagaggggcgcgctgctgccggtctcagcggacgacggcaagggaaacggcggaggggcaggcggcgacgatgccgtgctgttcaaggggtccgccatgacccgccgcggcggcaccgccgcgctctcttacatggcatgctccgtgttgctagtgatgtttaacaaagcagctctctcttcgtataatttcccttgtgcgaatgtcatcacactccttcagatggtgtgctcaacgtgccttctttatgttctgagacgattaaagatcatctccttcactaatagtgatccatcagtgccttctgattcactattctttgtgccgtttaggttattactacgcaccacacctctttccttggcttatttactctacatgctagcttcaatggaatcggtccgtggagttaatgttcctatgtatacaactctacggcgcacgacagttgtgtttacaatgacaatggagtatttcctggcaaagcagaagcacaccccacctataataggcagtgtggctttgattgtattcggagcattcgttgctggagctcgagacttgtcatttgatgctcgtgggtatgctattgtctttgtggccaacattacgacagccatttaccttgctactatcaaccgtataggaaaatctagtggcctcaatagctttggcctgatgtggtgcaatggacttgtctgtggaccttcagtactgttattgacatatattcagggtgacctaaagagggccatggaatttccgtacctttattcccctgggttcatggtaacattaatttgtgcattgctgaccctccttttgtcagttttagtaggcatttaaaggctgtttgtggatgcacatcacgaaattcaaaaaccacgagtaatgttaattagcttcatcggtgtgcttgtactgtcagttactcagttagccagttagcccttgaactcaagctgcgtctggaagtttagtttgcaagatattgttctgtttgtgtactttcaattggccagttagccttgaactcttgctgcggctggaagtttagttttgcaagatattgttctgtttgtgtactgtcaattgcccagttagccttgaactcttgctgtggctggaagtttagtttgcaaaacattgttctgtttgttccactatctttgagatccggccattcaagtccagaaaaactgccactgaaggaaattttcttagttttttcccatgccccaaacctccattccaaagggtgctatggtaccaagaatcccaagtttttcccgtgaaatttctttgatccaaaggagcccttagcttggattgcagatgttactgaagcacgtgagcactaccttgggtgtagtcagtctcattcactgtcacccaagtcaagttttgtggtgctgataattttgataataccaccctctagtcctttaataccatttatcatgttctaatctaccaacaattatccataataccatagcaagggacatgtcagccaccattacaatgacttgttgatagtgcctccagtttatatcgaaattctttcattcagtgcgattactagtgtatagtactatagtatagctgctgtaggtgatcttgaggtcattttacattctaacttgtttattttttataccatactaatttaacactcaaaacaggtagacaacgaaatagtgagtaatgtcaagtagttccattacagcatctaatgccaataatgtgaagttatgaatgtcactaataacgaaatttcacttgtagactgtgctgctattttcgtgcatcctagcatttctactgaactacactatcttctggaacacaatcctgaattctgcactcacacaatcgatgtgtgggaacttgaaggatttcttcaccgttggaattggttgggtgctatttggtggacttccttttgatcttcttaatgttataggacaaggactaggctttctgggctctggattgtatgcctactgcaagatcaaaggaaagtagacgctgatgtctagtgggatcaactgggggtagacggtggtgtgacttggtgtttcattcagggccagtgtgcttaacaaaagtagcgttgtttatgctgtttgctcctacatatgggagagaaattttgtaggtttcctgtatgtattagacttcagccctaatgaacactgcaaaactgaaaaggaaatagagtataccgaatttttactgttaccttatgagttatgaccgtttctcttttaaactcgaatagacgtgcaaaatacaatgaacttatgta

SEQ ID NO: 40274 - DNA, 2301 bp, Zea Mays
ggagaacacctgcatcacgtgtttgactcgttgcctgtgctagtcgccacgttttctgttggattcagcttagtacgtgattttggagctcgtgccggatggttgacttgtgctttggcctttcggcttttggcagcgcgaccgagctttttggaagagtgagagaccgttttcctagttctgttgctatgaattatacgcaaagtggacagtatatacggcatacatacatgtttacgaaattctataagtaaggaatgggctatttcatacaaataattgagcctgcaggctgcagccatgatgaatatgttatttactgtcgtaatgttagctgaattttggtggtaacaaatggagctaccatgctaccttatctgcctttggagtgggtctatgcttattgctcgggcacacttgtgacttgtggaagaacataatcacagaaccctgtcggaatacatttcagaatgaataggtcaatggagtaagctttctagctgctacctgtatgaaattagatcaaacagaggacctgtcatgaagagtgatggtcccctgttatctcatgtactatattgcttgatgctgacgataggatgtaaattacttcaaccccatatttggatgatggttcaactggataagaataaccatttcatagaatagatacatcattgtcttcatctaactatctatctatctagccttttgaactgaaacctgctcatttgttgcatgacgaaattggaacaaaggaaggtggtcccactgaggaaaaacacgagagaaaaatcaacaaaccattttcacttttagggtggggggattagtgtggaagatttgagtcattgttaagtggtgaatgaggttttgattgcacaattaaactcgtctttcatttatatgtgctgcttactggaaggttggagaactgtgaacgggttactgtagttgggctgattatgttggagttactaatgatacccccttttgcattcatgactgaaattgcgctggaagtcacttttgcattgcattcaaaatcattcatctaatccgatctctatgctgcgagtttggacattgcgatctgcttataataccagttgaaggagttctgcacaatgcatgtgttgctagtgatgtttaacaaagcagctctctcttcgtataatttcccttgtgcgaatgtcatcacactccttcagatggtgtgctcaacgtgccttctttatgttctgagacgattaaagatcatctccttcactaatagtgatccatcagtgccttctgattcactattctttgtgccgtttaggttattactacgcaccacacctctttccttggcttatttactctacatgctagcttcaatggaatcggtccgtggagttaatgttcctatgtatacaactctacggcgcacgacagttgtgtttacaatgacaatggagtatttcctggcaaagcagaagcacaccccacctataataggcagtgtggctttgattgtattcggagcattcgttgctggagctcgagacttgtcatttgatgctcgtgggtatgctattgtctttgtggccaacattacgacagccatttaccttgctactatcaaccgtataggaaaatctagtggcctcaatagctttggcctgatgtggtgcaatggacttgtctgtggaccttcagtactgttattgacatatattcagggtgacctaaagagggccatggaatttccgtacctttattcccctgggttcatgactgtgctgctattttcgtgcatcctagcatttctactgaactacactatcttctggaacacaatcctgaattctgcactcacacaatcgatgtgtgggaacttgaaggatttcttcaccgttggaattggttgggtgctatttggtggacttccttttgatcttcttaatgttataggacaaggactaggctttctgggctctggattgtatgcctactgcaagatcaaaggaaagtagacgctgatgtctagtgggatcaactgggggtagacggtggtgtgacttggtgtttcattcagggccagtgtgcttaacaaaagtagcgttgtttatgctgtttgctcctacatatgggagagaaattttgtaggtttcctgtatgtattagacttcagccctaatgaacactgcaaaactgaaaaggaaatagagtataccgaatttttactgttaccttatgagttatgaccgtttctcttttaaactcgaatagacgtgcaaaatacaatgaacttatgta

SEQ ID NO: 40275 - DNA, 2065 bp, Zea Mays
gtttacgaaattctataagtaaggaatgggctatttcatacaaataattgagcctgcaggctgcagccatgatgaatatgttatttactgtcgtaatgttagctgaattttggtggtaacaaatggagctaccatgctaccttatctgcctttggagtgggtctatgcttattgctcgggcacacttgtgacttgtggaagaacataatcacagaaccctgtcggaatacatttcagaatgaataggtcaatggagtaagctttctagctgctacctgtatgaaattagatcaaacagaggacctgtcatgaagagtgatggtcccctgttatctcatgtactatattgcttgatgctgacgataggatgtaaattacttcaaccccatatttggatgatggttcaactggataagaataaccatttcatagaatagatacatcattgtcttcatctaactatctatctatctagccttttgaactgaaacctgctcatttgttgcatgacgaaattggaacaaaggaaggtggtcccactgaggaaaaacacgagagaaaaatcaacaaaccattttcacttttagggtggggggattagtgtggaagatttgagtcattgttaagtggtgaatgaggttttgattgcacaattaaactcgtctttcatttatatgtgctgcttactggaaggttggagaactgtgaacgggttactgtagttgggctgattatgttggagttactaatgatacccccttttgcattcatgactgaaattgcgctggaagtcacttttgcattgcattcaaaatcattcatctaatccgatctctatgctgcgagtttggacattgcgatctgcttataataccagttgaaggagttctgcacaatgcatgtgttgctagtgatgtttaacaaagcagctctctcttcgtataatttcccttgtgcgaatgtcatcacactccttcagatggtgtgctcaacgtgccttctttatgttctgagacgattaaagatcatctccttcactaatagtgatccatcagtgccttctgattcactattctttgtgccgtttaggttattactacgcaccacacctctttccttggcttatttactctacatgcttcaatggaatcggtccgtggagttaatgttcctatgtatacaactctacggcgcacgacagttgtgtttacaatgacaatggagtatttcctggcaaagcagaagcacaccccacctataataggcagtgtggctttgattgtattcggagcattcgttgctggagctcgagacttgtcatttgatgctcgtgggtatgctattgtctttgtggccaacattacgacagccatttaccttgctactatcaaccgtataggaaaatctagtggcctcaatagctttggcctgatgtggtgcaatggacttgtctgtggaccttcagtactgttattgacatatattcagggtgacctaaagagggccatggaatttccgtacctttattcccctgggttcatgactgtgctgctattttcgtgcatcctagcatttctactgaactacactatcttctggaacacaatcctgaattctgcactcacacaatcgatgtgtgggaacttgaaggatttcttcaccgttggaattggttgggtgctatttggtggacttccttttgatcttcttaatgttataggacaaggactaggctttctgggctctggattgtatgcctactgcaagatcaaaggaaagtagacgctgatgtctagtgggatcaactgggggtagacggtggtgtgacttggtgtttcattcagggccagtgtgcttaacaaaagtagcgttgtttatgctgtttgctcctacatatgggagagaaattttgtaggtttcctgtatgtattagacttcagccctaatgaacactgcaaaactgaaaaggaaatagagtataccgaatttttactgttaccttatgagttatgaccgtttctcttttaaactcgaatagacgtgcaaaatacaatgaacttatgta

SEQ ID NO: 40276 - DNA, 2292 bp, Zea Mays
aaattgcgctggaagtcacttttgcattgcattcaaaatcattcatctaatccgatctctatgctgcgagtttggacattgcgatctgcttataataccagttgaaggagttctgcacaatgcatgtgttgctagtgatgtttaacaaagcagctctctcttcgtataatttcccttgtgcgaatgtcatcacactccttcagatggtgtgctcaacgtgccttctttatgttctgagacgattaaagatcatctccttcactaatagtgatccatcagtgccttctgattcactattctttgtgccgtttaggttattactacgcaccacacctctttccttggcttatttactctacatgctagcttcaatggaatcggtccgtggagttaatgttcctatgtatacaactctacggcgcacgacagttgtgtttacaatgacaatggagtatttcctggcaaagcagaagcacaccccacctataataggcagtgtggctttgattgtattcggagcattcgttgctggagctcgagacttgtcatttgatgctcgtgggtatgctattgtctttgtggccaacattacgacagccatttaccttgctactatcaaccgtataggaaaatctagtggcctcaatagctttggcctgatgtggtgcaatggacttgtctgtggaccttcagtactgttattgacatatattcagggtgacctaaagagggccatggaatttccgtacctttattcccctgggttcatggtaacattaatttgtgcattgctgaccctccttttgtcagttttagtaggcatttaaaggctgtttgtggatgcacatcacgaaattcaaaaaccacgagtaatgttaattagcttcatcggtgtgcttgtactgtcagttactcagttagccagttagcccttgaactcaagctgcgtctggaagtttagtttgcaagatattgttctgtttgtgtactttcaattggccagttagccttgaactcttgctgcggctggaagtttagttttgcaagatattgttctgtttgtgtactgtcaattgcccagttagccttgaactcttgctgtggctggaagtttagtttgcaaaacattgttctgtttgttccactatctttgagatccggccattcaagtccagaaaaactgccactgaaggaaattttcttagttttttcccatgccccaaacctccattccaaagggtgctatggtaccaagaatcccaagtttttcccgtgaaatttctttgatccaaaggagcccttagcttggattgcagatgttactgaagcacgtgagcactaccttgggtgtagtcagtctcattcactgtcacccaagtcaagttttgtggtgctgataattttgataataccaccctctagtcctttaataccatttatcatgttctaatctaccaacaattatccataataccatagcaagggacatgtcagccaccattacaatgacttgttgatagtgcctccagtttatatcgaaattctttcattcagtgcgattactagtgtatagtactatagtatagctgctgtaggtgatcttgaggtcattttacattctaacttgtttattttttataccatactaatttaacactcaaaacaggtagacaacgaaatagtgagtaatgtcaagtagttccattacagcatctaatgccaataatgtgaagttatgaatgtcactaataacgaaatttcacttgtagactgtgctgctattttcgtgcatcctagcatttctactgaactacactatcttctggaacacaatcctgaattctgcactcacacaatcgatgtgtgggaacttgaaggatttcttcaccgttggaattggttgggtgctatttggtggacttccttttgatcttcttaatgttataggacaaggactaggctttctgggctctggattgtatgcctactgcaagatcaaaggaaagtagacgctgatgtctagtgggatcaactgggggtagacggtggtgtgacttggtgtttcattcagggccagtgtgcttaacaaaagtagcgttgtttatgctgtttgctcctacatatgggagagaaattttgtaggtttcctgtatgtattagacttcagccctaatgaacactgcaaaactgaaaaggaaatagagtataccgaatttttactgttaccttatgagttatgaccgtttctcttttaaactcgaatagacgtgcaaaatacaatgaacttatgta

SEQ ID NO: 40277 - DNA, 765 bp, Zea Mays
atggaagctaagctaaggcgtcgtcattcagcttaaaaattcgaactcccattagcaagcaaaacgaagcagatcaaaaggacatacttccggcggaacagagtctttgggaagaagacttcaagaagaccacatctatcacaacgttcttttggtgagcactttgagaaagttacttacaatgatcttgccaaagcaacaagggacttctcagaatacaacctaattggaagaggaagctatggttcagtgtacagtgggaaattgaaggaagtggaagtggctgtcaaggtttttaaccttgagatgcaaggtgcagacaaaagcttcttggtagagtgtgaaacgctgagaagtattcaacatcggaatcttcttcccatcataactgcatgctcgagtatagatacaacgggaaattcttttaaggctttaatttatgagcttatgcctaatgggaacttggataaatggatacatcacaaagacaatgaggcacttccaaagcgtctaagcttagctcaaagaattgcagttgtcgtcaatgtagctgatgcattggattatttacaccacgactgtggaaggcccaccatccattgtgacttgaagccaagcaacatccttctcggtgacgatatgaatgctgtcttggcagattttggcattgcacatctttattctgattctcagtcaacttggacaagttcatttagttcgatcggtgtcaaggggtcaattggctatatccctccagccccttat

SEQ ID NO: 40278 - DNA, 3263 bp, Zea Mays
aaaaattcgaactcccattagcaagcaaaacgaagcagatcaaaaggacatacttccggcggaacagaggtgccaattaagagcatcatgcgtaactctaagccgccgagcaaactggccatgcttatggcgttgctgtcgctgtcgtttctgttttgttatggagtcgagaaggtccattgctcgacggttcacgagaacaaccaagattttcactctctgctcgatttcaagaagggcatcaccaacgatccaaatggagccatgagcaattggaccaacaacactcatttctgccggtggaacggtgtgaagtgtaccttgacaccgccatatcgtgtcatggagctcaacctcactggcaacgacttggctggccgaatctccacctctgttggaaacctgacctaccttagtttgctagcactaccaaataatagatttagcggcccaatacctccccttaacaaactccaaaacctaagttacctttccctggacaacaactttttgaatggtgtgattcctgagtcacttacaaactgttccaacttagacacactaggtctctctaaaaataacctcacaggtgttattcctcctagcataggttctcttaccaagctaaaagttattttcctttataaaaataatttgtccggggtcatcccatcaagcctaggtaacatcaccaatttatctgtaatcgctctttcagaaaatcaactcaatggacttattcccactgagttatggcaaatgccacacatagcgtctttgtacctgttttgtaataatctatccggtgaaatcccacaaactatatctaatttatcttctcttcaagagctatccttggcagtcaatatgctgagcaacactttgccatccaacttcggccatgccctccctaatctcaaattgctatacttgggaggcaacttgtttgaaggacaaattccagattctctaggcaatgtttcaggtctagtacatttggatatgtcctacaataagttgactggcaaaatccatagcatatttggaaaacttttagggctatcttttttaaacctcgaggaaaatatgtttgaagcgagtgatagtgcaagttgggatttctttgttgacctgatagcgtgcagttccctgacggtgctttcattggctagcaataatctgcagggagctataccaaattccattgctaacctatccaccaacctcagaaatctactaatgagcgacaaccacctatccggagtagtccccccaagtattgggaaattgaatggcttaattgaacttgaacttgatggcaacaattttaccggtacaattgaggattggatgccaaagttgacaagcctacaaaagttatatctccatgacaatagctttgaaggtacaatcccaccttccattagtaaccttgctcatttgacacttttggatttttcaaataataaattcactggttcaataccacctagcatgggaaacattcaacttctgatcaatttgagccttagcaacaacaatttcagagggacaatacctgccaagtttggggaccttaaacaattagtcttccttgatgtttcatcgaacgaacttggtggggaaattcctaatagtttgggccagtgccaaaatctagccgccattaaaatggaccaaaatgttcttataggaaacatcccgacctccttcagtaatctaaaaagcttgagcttgctcaatctttcccacaacaaattatcaggccccttgccaaattatttgaatgatctaaagcttctcaataaaattgacctatcttacaataatttccatggagagataccaaaagctggtatattagataattctacacttgtttcactggatggcaattcaggattgtgtggaggagccatgaatctgcatatgccttcatgccatactatttctagaagagcaagaaccataagcgatttggttaaaatattgatccccatgtttggattaatgtccctgctacatcttgtctatctagtctttgggaagaagacttcaagaagaccacatctatcacaacgttcttttggtgagcactttgagaaagttacttacaatgatcttgccaaagcaacaagggacttctcagaatacaacctaattggaagaggaagctatggttcagtgtacagtgggaaattgaaggaagtggaagtggctgtcaaggtttttaaccttgagatgcaaggtgcagacaaaagcttcttggtagagtgtgaaacgctgagaagtattcaacatcggaatcttcttcccatcataactgcatgctcgagtatagatacaacgggaaattcttttaaggctttaatttatgagcttatgcctaatgggaacttggataaatggatacatcacaaagacaatgaggcacttccaaagcgtctaagcttagctcaaagaattgcagttgtcgtcaatgtagctgatgcattggattatttacaccacgactgtggaaggcccaccatccattgtgacttgaagccaagcaacatccttctcggtgacgatatgaatgctgtcttggcagattttggcattgcacatctttattctgattctcagtcaacttggacaagttcatttagttcgatcggtgtcaaggggtcaattggctatatccctccagagtacggaggtggtggctctgtatcgacgtccggggatgtttatagttttggtgtagtgtgcttggagattttgatcggcaaaaggccgatagatcctgtgttcatcgggggactagacatcatcagcttcgtcaagaacagttttccagatcaaatatttcacattatggattcacatcttgtggaagaatgcgagcatttaattcaggacaataaagtaacaaacgaagaaatgtaccagtgcctggtggatctgctgcaagtagcgctttcttgcacgtgctcattaccatctgaacggtcgaacatgaagcaggtagcaagcaaactgcatgcaatcaagacgtcacaaattggatataaataatccatgtaaaattaggtgtaccgtgtactcccacgactaggagcgtaaaaatgtactctagcataaaattaagtgttgttcatctactgtgtgcatgtacttcaattgtccaaaaatatagatgcacctatactgtttgtggacatcgttaatttcttttgtaagttcacgtagaatatcttatatttctagataaattggaa

SEQ ID NO: 40279 - DNA, 2099 bp, Zea Mays
catacttccggcggaacagagggagctataccaaattccattgctaacctatccaccaacctcagaaatctactaatgagcgacaaccacctatccggagtagtccccccaagtattgggaaattgaatggcttaattgaacttgaacttgatggcaacaattttaccggtacaattgaggattggatgccaaagttgacaagcctacaaaagttatatctccatgacaatagctttgaaggtacaatcccaccttccattagtaaccttgctcatttgacacttttggatttttcaaataataaattcactggttcaataccacctagcatgggaaacattcaacttctgatcaatttgagccttagcaacaacaatttcagagggacaatacctgccaagtttggggaccttaaacaattagtcttccttgatgtttcatcgaacgaacttggtggggaaattcctaatagtttgggccagtgccaaaatctagccgccattaaaatggaccaaaatgttcttataggaaacatcccgacctccttcagtaatctaaaaagcttgagcttgctcaatctttcccacaacaaattatcaggccccttgccaaattatttgaatgatctaaagcttctcaataaaattgacctatcttacaataatttccatggagagataccaaaagctggtatattagataattctacacttgtttcactggatggcaattcaggattgtgtggaggagccatgaatctgcatatgccttcatgccatactatttctagaagagcaagaaccataagcgatttggttaaaatattgatccccatgtttggattaatgtccctgctacatcttgtctatctagtctttgggaagaagacttcaagaagaccacatctatcacaacgttcttttggtgagcactttgagaaagttacttacaatgatcttgccaaagcaacaagggacttctcagaatacaacctaattggaagaggaagctatggttcagtgtacagtgggaaattgaaggaagtggaagtggctgtcaaggtttttaaccttgagatgcaaggtgcagacaaaagcttcttggtagagtgtgaaacgctgagaagtattcaacatcggaatcttcttcccatcataactgcatgctcgagtatagatacaacgggaaattcttttaaggctttaatttatgagcttatgcctaatgggaacttggataaatggatacatcacaaagacaatgaggcacttccaaagcgtctaagcttagctcaaagaattgcagttgtcgtcaatgtagctgatgcattggattatttacaccacgactgtggaaggcccaccatccattgtgacttgaagccaagcaacatccttctcggtgacgatatgaatgctgtcttggcagattttggcattgcacatctttattctgattctcagtcaacttggacaagttcatttagttcgatcggtgtcaaggggtcaattggctatatccctccagagtacggaggtggtggctctgtatcgacgtccggggatgtttatagttttggtgtagtgtgcttggagattttgatcggcaaaaggccgatagatcctgtgttcatcgggggactagacatcatcagcttcgtcaagaacagttttccagatcaaatatttcacattatggattcacatcttgtggaagaatgcgagcatttaattcaggacaataaagtaacaaacgaagaaatgtaccagtgcctggtggatctgctgcaagtagcgctttcttgcacgtgctcattaccatctgaacggtcgaacatgaagcaggtagcaagcaaactgcatgcaatcaagacgtcacaaattggatataaataatccatgtaaaattaggtgtaccgtgtactcccacgactaggagcgtaaaaatgtactctagcataaaattaagtgttgttcatctactgtgtgcatgtacttcaattgtccaaaaatatagatgcacctatactgtttgtggacatcgttaatttcttttgtaagttcacgtagaatatcttatatttctagataaattggaa

SEQ ID NO: 40280 - DNA, 2161 bp, Zea Mays
tgatgctgtaaaactgtttttaaacccctagggcctcatctgcccacagatcatccagcttaaaaattcgaactcccattagcaagcaaaacgaagcagatcaaaaggacatacttccggcggagcagagtgccaattaagagcataatgtgtaactcgaagccgccgagcaaactggtcatgcttatggcgttgctgtcgctgtcgtttctgctttgttatggagtcgagaaggtacattgctcgacagttcacgagaacaaccaagattttcactctctgctcgatttcaagaagggcatcacaaacgattcaaatggagccatgagcaattggaccaacaacactcatttctgccagtggaacggtgtgaagtgcaccttgacaccgccatatcgtgtcacagagctcaacctcactggcaacgacttggctggccgaatctccacctctcttggaaacctgacctaccttagtttgctagcactaccaaataatagatttagcggcccaattcctcccattaacaaactccaaaacctaagtgttagactactgtatttgtatttatagtatgtctaatattggtagttagtccttgattgtaggcccttgattagaggcccttgattgtaggcatgtagggctgtgcgttgccatgtgtgccacgacgcacagcctatgtatactgtacatctccatggaatacaatcaagcaattcccaacaaatcacactttcatggtatctcacgcggttccgatccgcacgcttccgcaacccacgaccgcgctgtcgctgatccgatcgccgctcttgtcgagctcgtcacccagagcgtcgccgatcccatcgccgcgctgtctgtgaagatcgcctgtcccgttgctggatcagccgggtgcggccgctggtctccccaaatctgctcgcgccgccgatccgccagcaggcgcggcgcttcttctcctacaggctcccgccaggcgagttggatctgctcgcgccgccccactgctcctccagcaggcgcggcgtcttttcaccttctgccaggcgaggtcgcgcgccccactgctcctccagcaggcgcggcgccttttctcctcctgccagccgaggtcgcgcggctcatctctagccaggcgcgctcccgatggcggccgacgatgcagcagccgcccaggccgcggaggaccgccgcctcgcagttgaggccgaagcccgccgtgctgaagacgcccgccgcgccgaagaagcccaccttcgtgctgccgctttggacgagtttgagcgcgcccatgaggccctctgggcgcaagccactgccgtcgtcaacgtcaaggcgctcatccctgtcatcctcgaccaggcaacgaacacctacaccaagtggcgcggcatgttcatcaccgtcctcggcaaatacgccctgactcgtcacgtccttgaggatgaagccttcccatcacgcccggcgtgggttcaagccgattgctgtgtcttgacatggatctacagcaccatctccggcgacctgcaacaatctctgatgatgcggcagggccttgctcgcggggcgtgtgaaagagaaatgtgcccttgggccatttctaagtattttggtgattgtgtgccaacccaagtgctgaaatgtaaatctatgcccatggatggacaaagtgcaaatcaacagtaaaggtatgtttctaagccttagtacattgttttgaagactaatgtattgtgtctaagtgcttgaaacaggagaaaacgaataagagaagagttggctgtgtacagccaaaaggctgtttcggtctggggcaccggactgtccggtggtgcaccggacagtgtccggtgcgccaggctgcctcgggcgaagaggctgctctcgggaaattgtcgacggcgtacggctaaaattcaccggactgtccggtgtgcaccggactgtccggtgagccaacggtcggccgggccaacggtcggccgcggaatccgcgcgcgacacgtggccgagccaacggtcggaagggggcaccggactgtccggtgtgcaccggacatgtccggtgcgccaacggctcccagtctgcaacggtcgactgctctgtttaaggaaggaaatcgggcaccggacagtgtccggtgtgcac

SEQ ID NO: 40281 - DNA, 713 bp, Zea Mays
cacgagctgaaggtctcacatcaactcggaatctctctctagtacctacggaaaagtactccacaacaatctttccagctgaagcaacgaccgcgcagctgcgagacggtaaccgcctcagggtcctcgctgcgaaactgtttttaaaatccctagggcctcatctgcacgtttagcatccaactttcagtttccaactcccaccagcaaagcaaaacaaaacaaaacaaaacaaagaagatcaaaaggtttcaagatatagtggggtgtctgccttcaaggtgtcaattaaaggtgtgtttggttggagagtcaactagaacagagtggttccattccagtttttgagaatagagtcgttctattccacgtttggcaaacagaacatagtcgctctatttttttggttgaagagtagaatagagcggagtcgctctgttatctgtttggttggagagccatatgagtgtagatggtaggagagtgaggagagagcgctcgcatccgatcgttttttgtggatcgagagcattccaactgtttatggtaaattttcatatggagactctaggagccgctccgctcaacttttattggaaaccaaacatctagaaaagtagaatgtaactgctctattttctttcgctcctcaaccaaacacaccctaagagcatcatgcataactctaagccgctgagcaaactggccatgct

SEQ ID NO: 40282 - DNA, 2434 bp, Zea Mays
aacaagatgaccaagaagcacctaatcgccggtgactacgtactaaccgtagaggtatgggtggttttcgtcgacgtgaggtacatggtaatgatgatgcttttagtaaggttaaatttaaaatacctccttttgatggtaaatatgaccctgatgcttacattacttgggagattgcggttgatcaaaagttcgcatgtcatgaatttcctgagaatgcgcgggttagagctgctactagtgagtttactgaatttgcttctgtttagtggatagaacatggtaagaagaatcctaataacatgccacaaacttgggatgcgttgaaacgggtcatgcgggctagatttgttccttcttattatgcacgtgatatgttaaacaagttgcaacaattcagacagggtactaaaagtgtagaagaatattatcaggaattacaaatgggtatgttacgttgtaacatagagaacggtgaggaatctgctatggctagatttgggcgggttaaatagggaaattcaggacatccttgcttataaagattatgctaacgtaacccaattgtttcatcttgcttgcaaagctgaaagggaagtgcagggacgacgtgctagtgcaaggtctaatgtttctgcaggaaaatctacaccatggcagcagcgcacgactacgtccatgaccggccgtacaccagcaccaactccctcgctgagtcgaccagcaccaccgccttcctccggcgacaaaccacgtgcatcttccacaaattcagcaaccaaatctgcccagaaaccagaaggtagtgcctcttcagtaccctccacgggtagaacaagagatgttctgtgttatcgatgcaagggctatggacacgtgcagtgtgattgtcctaatcagcgtgttttggtggtaaaagatgatggtgggtattcctctgctagtgatttggatgaagctatacttgctttgcttgcggctgatgatgtaggcactaaggaaccactcgaagaacagattggtgcagatgatgcagagcattatgagagcctcattgtacagcgtgtgcttagtgcacaaatggaaaaggcagagcagaatcagcaacacacgttgtttcaatcaaagtgcgtcattaaggaacattcatgtcgtttgatcattgatggtggtagctgcaacaacttggctagcagcgacatggtggagaagcttgcacttacgaccaaaccgcacccccatccatatcacattcaatggcttaacaatagtggtaaggtcaaggtaaccaagctggtacgaattaattttgctattggttcatatcgtgatgttgttgactgtgacgttgtgcctatggatgcttgtaatattctgctaggtagaccatggcatcatggtagatcaaatcaatattttctcatacaccatgataagaaaattattttgcttcccatgtcccttgaggttattgtgcgtgatgatgttgctaaagctatgaaaactaaaactgagaacaacaagaatattaaagttgttggtaataacaaagatgggataaaattgaaaggacactgcttgcttgcgacaaaatctaatgttaatgaattaatgcttccacttctgttgcctacgctttggtatgcaaggatgatttaaagccttgcttgggagaggaagttgagcttgagtcgaggacgactcaaatgcaagaaggggagaatgatgaagacatccacactactgatacatctatgccaatacaagtaccaatttttggtcccattactcgcactcgtgctcgtcaactcaaccatcaggtgattacactcttgagttcatgtccatcatatttataccatggagacccatgcactcttgtttttcttaggaaccagggagaagaccgaaagggaaaaggatttgaacatgttggattcggactgcagaagaacaccaacttgtgacggtcaccacggtcacatgcgggctcggattggagtgttcaagcacaacatgggaagtttatcaagtctactttcatatggatctggaattatagtcatatctgttctgaggccaccgtaatcatttttccttaccgagacatttcctgccttttctacccatggtgctgcgtcaccctattttggcccaatgggtcgtgtatcgagttgagtccattagggacgcatcctagggttgcaacacgaccccaatacccttgtggttgtcctcccatgtttataaaccccctagccgccaccaagaacagcgggttttgtttagatcaagtttagctctcgctacttgcttgtaagcgcgcgtgctggttcagctgcccgtcttcttgtcttcggaaccccaccatattggagtttgattttgaaacctacatttacatctggtaattcagtacttgttctacttgttc

SEQ ID NO: 40283 - DNA, 3858 bp, Zea Mays
gctaatgcgtcgtaacgtaagtacaagcgtgtggacgtaatagttctgcaaagcagtttttaaatttaaggggcctcatctgctccagtattattagaattccgaactcccactagcaagcaaaacaaagcagatcaaaaggacggagcagaggtttcaagatatagtggggtgtctgccttcaattttcttaagatctatcgctgagtggagaaagttcattgctcgacggttcatgaaaacaaccaagattttcactctctgctcgatttcaagaacaatatcaccaatgatccaaaaggagtcatgaacagttggaccaacaacacccacttctgcagtggaacagtgtgaagtgcaccttgacgccaccatatggtggcacggagctcaacctctcctacaacaacttagctggccaaatctcctatcttggaaacctgacctatcttaatttgctggctctaccaaataatagatttggtggcctaatcaaatatgtactaggatcaagtctcacacatatgatgactcatggtacagaaacgaatgtcaaatctttattatataatagaagttctgtacaaaatagctaaataattacattatacgaagacaacgatcctccgcaaccatagttgactgggagacaatggcctagacctctcacgaactcatcgcgacatccttcatggtcctcatcttggcggtacgtgtacttgacctgggggtgtgagtacaacaagtgtgagctcacatacgttcatcgctcaacaagtgtgagctcaacaatttacggtgggggctcatgtgaagtctaaggcttacaaaagaagatagttaaagctaagcattgcttttgatcaaaaattttattagcagttactaagtataagtagataccaacccagataaataagagatcgaaattaataataaaactcacaatgcaatgcatatgacatattaagtttaattccataagttaatcatgcgagagtcctgagttgctcttgaccgcgagcacgactgattaccagttttacactctgtagaggttgtacatctttacccacaagtcgtgtcatgttacccatttgctaaggggtcacgacttcccattcatctctaccgaggagatgaggcatggtagcactacgagacctttccaaagttccactagtttgagaaaacccgctacggattcaggaagaaggaagcataggaatccctcgtgcgaaaagcttcatagacagttcgacccgaggacctctctatactctatagtgacacacttcctgcttgctcctttcgggtaaggtaatctctccctatcttttctaattacttggccaagggcgtcccattccacccttgtggtagcactgttatctcaagttaaactccatgttctatataacacaataatcttatcatgaacaatagttaaaccaacaatattaatggaacaagatcgtaattcagatataacattaatctcaaaaccagttagagtaacagcaagtctacccaatagttcatttgttttgcaaggtgtgaggtaaacaaaattagggtaacctattaggtcccatcatattaacctgagcatgtcacaatgattaacatgaacattattaggtaaagaagagtggtcaagaacataacttgcctgtgacttgagattccaagtacttcaccaagttggtcttcaggtttcttgtgacctcgctctgcttgtagcaattcatacaaatagataaggagtacatgaaaataacattacaccaaacatgagaacaaacaacgtaagaatattctacgcgttgctacgagatcgcagacttgagaaccactaaaacggagttacggtggaaaagatatggttttctcatggtttagatgattaaacaataaaactatattttattaatataagtcacatcatcgtatcataaataattgtatcataaataatcacatcatgtctgtcgattaaattaaagcaatagcataaagctaaccataaaaaccgaaaggtaaataaggataaggtaaatatagactagtcaatccttaggtttcaataatgtaatacgggacggtgaattaaaaagtaagtaggacataataggtcagaggacacttgacttcaccaaacacatgttcagggtcttcaaccttggagaactcaaatagcctgatcacttggtcatcgaagcttgactatcgatttctcgaagctcgagaatggatcgcattctaatcgcaacacgaagcgaagaataataggcacaagaaaacaaacatatatgcataagaacaatacaccatacaaaggaaaacattataaaacgtgcaatacgaaatagagcttgctactacggtcacgcaaggaaaggagacgcgatagtcggagctacggtggagaagttagcgcgttcacactaaacaagtattaattagaatatttaatttgacatacttatattaattgacctttatcagatgtaagttagaactattatttagttttgactatcttattattttagtagcggacgattaaacaaatcattaattagccgacacgagtggttataagcgaatgatttaatatcacgcacgggcaacacgctatacgagcgaacgatccgtggcaaggcgagcaacgcacgaaaacgacgcgcacgacatacacagaaatggtgcgcgcgacacacacaaacgacgcacgacaactcgtggaaacagcactcgcgacacacgtgaatgacatgcgatgatgcgcgcgaaacattacgcgcgacaacacgcatgacatgcaaggatcactaacagatatcgcgtttgaaccaagcgaatattaaatcaaggtcatttaagttgacattaattatgttaacgtttacttataatagcccgatttaataattataaattattttcgatagaaaaactaacattaaaatattagctaaacaaatatttaataaattatttaaaacatgtgacatgatgaaacagctttattaaagtgtagacaaagataatacgaggctaacagaacttgaacagtactaaatagatgattaatgccaagagttatcgcctatttaataaactaggggtccatacacaattaaacctatacttcatgggctagcaactaaatttcgcaaggataaggaaatagtatactagcttcataaaaaacaagggattttgcgcaaaagaaaagaggtaactggtctactgcgataccaggagggatctgagtgagctagggtcaagccacatgacgacatgcaaagatgtggccgcagagggatcaattgggatctcgtgcggagcattggacatggcatggtgcaagctcactacggagggcactatggctggccgaccagctcccaggcggccacggctggcagtgggaaggagcaacgatgactggtgccgacgtgcaggggcctcgaccatggagcctcgccgccgcaatgggctcggtcaaggctggccatggtgagcgcagagaagggcatgggagagagaggggtaagtgacgggcttcacctcacaacgatgaacaatagtgagagcatggatgacgacacatggagcttcagcggtcgacgcgacgcgagcttcggatgggtcggcgagggacgaccgcgatgggtgcgcgccaagggaaaaggacgagatgagggagagagggaggagaaggtggagtagtgcaggcgtggggcgcgtttggcggagggagtagtttaggaatatgaatagtgggcgacgctcgtgtgattgacaggtcggcccggcagcgggcgaagctgggggacgcggttgcggcgg

SEQ ID NO: 40284 - DNA, 3742 bp, Zea Mays
atttaaggggcctcatctgctccagtattattagaattccgaactcccactagcaagcaaaacaaagcagatcaaaaggacggagcagagagtggagaaagttcattgctcgacggttcatgaaaacaaccaagattttcactctctgctcgatttcaagaacaatatcaccaatgatccaaaaggagtcatgaacagttggaccaacaacacccacttctgcagtggaacagtgtgaagtgcaccttgacgccaccatatggtggcacggagctcaacctctcctacaacaacttagctggccaaatctcctatcttggaaacctgacctatcttaatttgctggctctaccaaataatagatttggtggcctaatcaaatatgtactaggatcaagtctcacacatatgatgactcatggtacagaaacgaatgtcaaatctttattatataatagaagttctgtacaaaatagctaaataattacattatacgaagacaacgatcctccgcaaccatagttgactgggagacaatggcctagacctctcacgaactcatcgcgacatccttcatggtcctcatcttggcggtacgtgtacttgacctgggggtgtgagtacaacaagtgtgagctcacatacgttcatcgctcaacaagtgtgagctcaacaatttacggtgggggctcatgtgaagtctaaggcttacaaaagaagatagttaaagctaagcattgcttttgatcaaaaattttattagcagttactaagtataagtagataccaacccagataaataagagatcgaaattaataataaaactcacaatgcaatgcatatgacatattaagtttaattccataagttaatcatgcgagagtcctgagttgctcttgaccgcgagcacgactgattaccagttttacactctgtagaggttgtacatctttacccacaagtcgtgtcatgttacccatttgctaaggggtcacgacttcccattcatctctaccgaggagatgaggcatggtagcactacgagacctttccaaagttccactagtttgagaaaacccgctacggattcaggaagaaggaagcataggaatccctcgtgcgaaaagcttcatagacagttcgacccgaggacctctctatactctatagtgacacacttcctgcttgctcctttcgggtaaggtaatctctccctatcttttctaattacttggccaagggcgtcccattccacccttgtggtagcactgttatctcaagttaaactccatgttctatataacacaataatcttatcatgaacaatagttaaaccaacaatattaatggaacaagatcgtaattcagatataacattaatctcaaaaccagttagagtaacagcaagtctacccaatagttcatttgttttgcaaggtgtgaggtaaacaaaattagggtaacctattaggtcccatcatattaacctgagcatgtcacaatgattaacatgaacattattaggtaaagaagagtggtcaagaacataacttgcctgtgacttgagattccaagtacttcaccaagttggtcttcaggtttcttgtgacctcgctctgcttgtagcaattcatacaaatagataaggagtacatgaaaataacattacaccaaacatgagaacaaacaacgtaagaatattctacgcgttgctacgagatcgcagacttgagaaccactaaaacggagttacggtggaaaagatatggttttctcatggtttagatgattaaacaataaaactatattttattaatataagtcacatcatcgtatcataaataattgtatcataaataatcacatcatgtctgtcgattaaattaaagcaatagcataaagctaaccataaaaaccgaaaggtaaataaggataaggtaaatatagactagtcaatccttaggtttcaataatgtaatacgggacggtgaattaaaaagtaagtaggacataataggtcagaggacacttgacttcaccaaacacatgttcagggtcttcaaccttggagaactcaaatagcctgatcacttggtcatcgaagcttgactatcgatttctcgaagctcgagaatggatcgcattctaatcgcaacacgaagcgaagaataataggcacaagaaaacaaacatatatgcataagaacaatacaccatacaaaggaaaacattataaaacgtgcaatacgaaatagagcttgctactacggtcacgcaaggaaaggagacgcgatagtcggagctacggtggagaagttagcgcgttcacactaaacaagtattaattagaatatttaatttgacatacttatattaattgacctttatcagatgtaagttagaactattatttagttttgactatcttattattttagtagcggacgattaaacaaatcattaattagccgacacgagtggttataagcgaatgatttaatatcacgcacgggcaacacgctatacgagcgaacgatccgtggcaaggcgagcaacgcacgaaaacgacgcgcacgacatacacagaaatggtgcgcgcgacacacacaaacgacgcacgacaactcgtggaaacagcactcgcgacacacgtgaatgacatgcgatgatgcgcgcgaaacattacgcgcgacaacacgcatgacatgcaaggatcactaacagatatcgcgtttgaaccaagcgaatattaaatcaaggtcatttaagttgacattaattatgttaacgtttacttataatagcccgatttaataattataaattattttcgatagaaaaactaacattaaaatattagctaaacaaatatttaataaattatttaaaacatgtgacatgatgaaacagctttattaaagtgtagacaaagataatacgaggctaacagaacttgaacagtactaaatagatgattaatgccaagagttatcgcctatttaataaactaggggtccatacacaattaaacctatacttcatgggctagcaactaaatttcgcaaggataaggaaatagtatactagcttcataaaaaacaagggattttgcgcaaaagaaaagaggtaactggtctactgcgataccaggagggatctgagtgagctagggtcaagccacatgacgacatgcaaagatgtggccgcagagggatcaattgggatctcgtgcggagcattggacatggcatggtgcaagctcactacggagggcactatggctggccgaccagctcccaggcggccacggctggcagtgggaaggagcaacgatgactggtgccgacgtgcaggggcctcgaccatggagcctcgccgccgcaatgggctcggtcaaggctggccatggtgagcgcagagaagggcatgggagagagaggggtaagtgacgggcttcacctcacaacgatgaacaatagtgagagcatggatgacgacacatggagcttcagcggtcgacgcgacgcgagcttcggatgggtcggcgagggacgaccgcgatgggtgcgcgccaagggaaaaggacgagatgagggagagagggaggagaaggtggagtagtgcaggcgtggggcgcgtttggcggagggagtagtttaggaatatgaatagtgggcgacgctcgtgtgattgacaggtcggcccggcagcgggcgaagctgggggacgcggttgcggcgg

SEQ ID NO: 40285 - DNA, 4673 bp, Zea Mays
attcaatcaaacaacgacggcggtgcgctaatagacgaacgggatggaagcagaaaagtgacggcaagtaaatgacgagtttgacggactcacggtcttctcttcaccggcggtcaagctaagcctagtgctgttctgtggatgtaacggtgctgtaaaagggtttataaaccccataggaggtcagccagctgagtatccagtttaaagttcagagttcaatctcacagcaccaagcaaaaaggaagcagatcaagggtagccgagcgagcagaggttgtcaattacgtgtcttaatgagtctctggaagcagccgtcgaaactcgccatggttgtagtactgctgctgctgctatgtcatgcagtggacaaagtccattgctcgacgcaccataacaacagccaagattttcattctctgctagagttcaagaagggcatcaccagtgatccgcacggagccttgagcaattggaaccccagcatccacttctgccattggcatggtgtgaactgcagttccacgcgaccatatcgagtcacggagctcaacctcaccggccaaaacttggctggccaaatcagctcctctgttggaaacctgaccttccttcatacccttgatcttagcaacaatagcttcattggccccctacctcttcttaacaagctccgaaacctggacttactctttctgggaagcaaccatttggaggatgttattctagattggcttacaaactgttccaacttagtctacctagatctctctaaaaaccatctcacgggtcatattcctccgaacatagcctttcttaaaaagctagaaggtatcaacctttatggtaattatctcagtggggtcatccctccaaccttaagaaacctctccacactattgttagttgatctttcaaacaatcaactaaatggaagcattcctaatgaagtttggcaaataccgaacatacaaatggtaaatctagcaataaataacctatcaggtggaatcccagatactttcactaacttatcttctcttatgatattaggccttgaccacaatatgctgggcggcacattgccatcaaacattggtgatgtgctccctcatctgcaaggactatacttaggaagcaacttattttttggtacaattccaacttccctaggcaatgcttcaaatctagaagtcgtagacctaccaaacaaccttttcagtggcacaatcccaagttcttttggaaacctttcaaagttgcagattctaaaccttgaggtaaacatgcttgaagcaagacatatgtctcataatcatctacacggacctataccaaattcgattgctaatctgtccactagtcttcaacaactattcatgggttggaataacctttcaggaatagttcccccaactattggaaaacttagtggcttaactaaattatcactagaaaacaacaacctcataggtaccattaaggaatgggtcagaaagatgacaaatctacaagttttaacactacaatcaaacaacttcatagggaaaattccaccttgaattggcaatcttacacagttggcacgtttctctgtagctagtaacaatttcttcggttctatatatgggtgacaatgggctctaacttttacaatataagatttaaggattggatcggattaggatcgggtcctattactattcatttttgaactaaaatttatttagggccctaccattttgtgaagaagcatttggatcgtgatccattaccacccctagttctataccatctaacttctgtgatcctaaattaatgacaaagttagaccttagccataacaatttctaagggagcatacctgttccctaaatcttacttagaactcatctcgctaaatctttcatcaaacaaatttagtggcgaaattcctaaaactttatgaagacttgaacaactaaaggacaatcaaatggaccacaacattcttactagaaacattccgtccacattcagcagtctacacagcttgaacttgttcaatctttcccataacaatttatctggtcgaatgccaaattttctaagtggtctaaatcttagtaaactagacctaccgtacaataataatttccaaggagaaagatcaagaactggtctatttgataatcctacagtcatatcgctagatggaatctgggattgtgtggaggagccatggttttgcatatgcctccttgccatgttgcttcaagaatagtagggagtgcaacattattgatcaaaaatattgatcccaatatttgggttcatgtctctcgtattgcaggtgtagttttactcctagaaaagaggacatcaagaagagcatatagatcagagcaatcttattatgagcattttgagaaagttacctataacgacttagctcaagcaacacatgacttcttagaatccaacctgattgggagaggaagttatggttcggtgtatcaagggaagctgaaggaaggcagaatggaagtggcagtaaatttttttgacctagagatcagaggagcaggaagaagcttcttgtcggagtgtgaagcattgagaagcattcaacactggaatattcttcccatcatagtttcttgttcaatagtagataatgtacgaaatgttttcatagatttaatttatgagtacatgcctaatgggagcttggacacatggctacatcacaaaggcgacgaggaggctacaaaatgtcatggcttgactcaaagtataagcatagctgttaatatagctgatgcattggattatttgcaccatgattgtggacagcaaactatttgttgcgacttgaaacctagcaatatccttctagattgtgacatgaatgctcttttgggagattttgaaattgcacgtttgtatcatgattccgagtcaaaatggacagagtatgggggaggtggtcatgcatcaacgtctggggatgtttatagttttggaatagtgttgttggagattttgacgagcagaagcccaatagatccaacgttcaaggacggctagggcatcatcaactttgttgagaataactttccgaatcaagtatttcaagtcattgactctgacctcctagaagaatgcaggaactcaactcaaggaaataatttggtacaagaaaatgagatctaccaatgcttggttgatctactgcaagtcacactttcgtttctctattcattaccatctgaatgatcgaacatgaagaaagtagccagcagaatgcatgcaatcaaaacatcacatattgggtggaagcacatgtaacaagagcaagggtgttccctaaattatacagtaacatacttaggatgggtcatagtcgaaaatgaccagtggcatggtggtacaggcagttagtaccgaccgggctggttccaatgctggttagttcgatcgactagtcagtagggctaccgaccagtcgacccggttgatatcgtccgcattggaacaaaatcggtcggtaccatcccgtacgctggtaacctagtcgatatcgaccctgaccggtcgatacttactgtctattgccatgtggcagttcctgactatttcacaccattttgaatttcaaaaaaataaataaataaagcttttttaaaaatctataatatggcatataaatagaggagtgtttgagttcattcacaccccactctccaaatcgcttttaacactttatattgcactcctctcactatagtttcactccactaaagcatcattgccatgtctttctcgagctcgagcattgggacgaccgaggacaaggtactcgatatgctccaccagactatattggatgcaatgataaagcttgcttctgggtgattaacgggaagaaggtgaaagacacaacttcggagctacatcgactaggattgtgaagccgcctacgattgattgattcaagactactttgatgacccatgtgtcgggtatggtaattaggggtacctagattacacctctaaaacatgcttaacccctaaaaacatcattagggtacgtcccccgaggtcaaaggatcacaagccacgcttcgcctgaggcctccctcatgggtctccgcaaactccgccttgccagagcctttcctcggacggggtgtgttctcgggagaatccttgtcccggccgaggtcccctcaccctagaacagcgatcttcacctcgcccgagcccgcctcgggtaacagagacaaaccctgggcaagactcaaccaaagtctgtcggggacagccacattcaatgcgcctacctaacccacgcaggcctataggtgtataggagcaacaagaccgcagtcctatcaaagattcaccaactatgattacacatgtgaccactgttcatgcatgtcgtctgcaaactcctgatgggacatacaatatgacaaaggtacagacggtggcgcacatcttcgtatttgttaacggtgcagacggtggatgtaacggtgctgtaaaaagggtttgtaaaccccataggaggtcagctagctgagcatctagtttaaagttgagagtttaatctcacagcaccaagcaaaaggaagcagattgaaagggaattaggcttacacctagttccttaataattttggt

SEQ ID NO: 40286 - DNA, 4657 bp, Zea Mays
gtaaatgacgagtttgacggactcacggtcttctcttcaccggcggtcaagctaagcctagtgctgttctgtggatgtaacggtgctgtaaaagggtttataaaccccataggaggtcagccagctgagtatccagtttaaagttcagagttcaatctcacagcaccaagcaaaaaggaagcagatcaagggtagccgagcgagcagaggttgtcaattacgtgtcttaatgagtctctggaagcagccgtcgaaactcgccatggttgtagtactgctgctgctgctatgtcatgcagtggacaaagtccattgctcgacgcaccataacaacagccaagattttcattctctgctagagttcaagaagggcatcaccagtgatccgcacggagccttgagcaattggaaccccagcatccacttctgccattggcatggtgtgaactgcagttccacgcgaccatatcgagtcacggagctcaacctcaccggccaaaacttggctggccaaatcagctcctctgttggaaacctgaccttccttcatacccttgatcttagcaacaatagcttcattggccccctacctcttcttaacaagctccgaaacctggacttactctttctgggaagcaaccatttggaggatgttattctagattggcttacaaactgttccaacttagtctacctagatctctctaaaaaccatctcacgggtcatattcctccgaacatagcctttcttaaaaagctagaaggtatcaacctttatggtaattatctcagtggggtcatccctccaaccttaagaaacctctccacactattgttagttgatctttcaaacaatcaactaaatggaagcattcctaatgaagtttggcaaataccgaacatacaaatggtaaatctagcaataaataacctatcaggtggaatcccagatactttcactaacttatcttctcttatgatattaggccttgaccacaatatgctgggcggcacattgccatcaaacattggtgatgtgctccctcatctgcaaggactatacttaggaagcaacttattttttggtacaattccaacttccctaggcaatgcttcaaatctagaagtcgtagacctaccaaacaaccttttcagtggcacaatcccaagttcttttggaaacctttcaaagttgcagattctaaaccttgaggtaaacatgcttgaagcaagacatatgtctcataatcatctacacggacctataccaaattcgattgctaatctgtccactagtcttcaacaactattcatgggttggaataacctttcaggaatagttcccccaactattggaaaacttagtggcttaactaaattatcactagaaaacaacaacctcataggtaccattaaggaatgggtcagaaagatgacaaatctacaagttttaacactacaatcaaacaacttcatagggaaaattccaccttgaattggcaatcttacacagttggcacgtttctctgtagctagtaacaatttcttcggttctatatatgggtgacaatgggctctaacttttacaatataagatttaaggattggatcggattaggatcgggtcctattactattcatttttgaactaaaatttatttagggccctaccattttgtgaagaagcatttggatcgtgatccattaccacccctagttctataccatctaacttctgtgatcctaaattaatgacaaagttagaccttagccataacaatttctaagggagcatacctgttccctaaatcttacttagaactcatctcgctaaatctttcatcaaacaaatttagtggcgaaattcctaaaactttatgaagacttgaacaactaaaggacaatcaaatggaccacaacattcttactagaaacattccgtccacattcagcagtctacacagcttgaacttgttcaatctttcccataacaatttatctggtcgaatgccaaattttctaagtggtctaaatcttagtaaactagacctaccgtacaataataatttccaaggagaaagatcaagaactggtctatttgataatcctacagtcatatcgctagatggaatctgggattgtgtggaggagccatggttttgcatatgcctccttgccatgttgcttcaagaatagtagggagtgcaacattattgatcaaaaatattgatcccaatatttgggttcatgtctctcgtattgcaggtgtagttttactcctagaaaagaggacatcaagaagagcatatagatcagagcaatcttattatgagcattttgagaaagttacctataacgacttagctcaagcaacacatgacttcttagaatccaacctgattgggagaggaagttatggttcggtgtatcaagggaagctgaaggaaggcagaatggaagtggcagtaaatttttttgacctagagatcagaggagcaggaagaagcttcttgtcggagtgtgaagcattgagaagcattcaacactggaatattcttcccatcatagtttcttgttcaatagtagataatgtacgaaatgttttcatagatttaatttatgagtacatgcctaatgggagcttggacacatggctacatcacaaaggcgacgaggaggctacaaaatgtcatggcttgactcaaagtataagcatagctgttaatatagctgatgcattggattatttgcaccatgattgtggacagcaaactatttgttgcgacttgaaacctagcaatatccttctagattgtgacatgaatgctcttttgggagattttgaaattgcacgtttgtatcatgattccgagtcaaaatggacaggttcaataagttcaattggtgtaaaaggaacatttggatatattcctccagagtatgggggaggtggtcatgcatcaacgtctggggatgtttatagttttggaatagtgttgttggagattttgacgagcagaagcccaatagatccaacgttcaaggacggctagggcatcatcaactttgttgagaataactttccgaatcaagtatttcaagtcattgactctgacctcctagaagaatgcaggaactcaactcaaggaaataatttggtacaagaaaatgagatctaccaatgcttggttgatctactgcaagtcacactttcgtttctctattcattaccatctgaatgatcgaacatgaagaaagtagccagcagaatgcatgcaatcaaaacatcacatattgggtggaagcacatgtaacaagagcaagggtgttccctaaattatacagtaacatacttaggatgggtcatagtcgaaaatgaccagtggcatggtggtacaggcagttagtaccgaccgggctggttccaatgctggttagttcgatcgactagtcagtagggctaccgaccagtcgacccggttgatatcgtccgcattggaacaaaatcggtcggtaccatcccgtacgctggtaacctagtcgatatcgaccctgaccggtcgatacttactgtctattgccatgtggcagttcctgactatttcacaccattttgaatttcaaaaaaataaataaataaagcttttttaaaaatctataatatggcatataaatagaggagtgtttgagttcattcacaccccactctccaaatcgcttttaacactttatattgcactcctctcactatagtttcactccactaaagcatcattgccatgtctttctcgagctcgagcattgggacgaccgaggacaaggtactcgatatgctccaccagactatattggatgcaatgataaagcttgcttctgggtgattaacgggaagaaggtgaaagacacaacttcggagctacatcgactaggattgtgaagccgcctacgattgattgattcaagactactttgatgacccatgtgtcgggtatggtaattaggggtacctagattacacctctaaaacatgcttaacccctaaaaacatcattagggtacgtcccccgaggtcaaaggatcacaagccacgcttcgcctgaggcctccctcatgggtctccgcaaactccgccttgccagagcctttcctcggacggggtgtgttctcgggagaatccttgtcccggccgaggtcccctcaccctagaacagcgatcttcacctcgcccgagcccgcctcgggtaacagagacaaaccctgggcaagactcaaccaaagtctgtcggggacagccacattcaatgcgcctacctaacccacgcaggcctataggtgtataggagcaacaagaccgcagtcctatcaaagattcaccaactatgattacacatgtgaccactgttcatgcatgtcgtctgcaaactcctgatgggacatacaatatgacaaaggtacagacggtggcgcacatcttcgtatttgttaacggtgcagacggtggatgtaacggtgctgtaaaaagggtttgtaaaccccataggaggtcagctagctgagcatctagtttaaagttgagagtttaatctcacagcaccaagcaaaaggaagcagattgaaagggaattaggcttacacctagttccttaataattttggt

SEQ ID NO: 40287 - DNA, 2465 bp, Zea Mays
ctgtaaaagggtttataaaccccataggaggtcagccagctgagtatccagtttaaagttcagagttcaatctcacagcaccaagcaaaaaggaagcagatcaagggtagccgagcgagcagaggtgtagttttactcctagaaaagaggacatcaagaagagcatatagatcagagcaatcttattatgagcattttgagaaagttacctataacgacttagctcaagcaacacatgacttcttagaatccaacctgattgggagaggaagttatggttcggtgtatcaagggaagctgaaggaaggcagaatggaagtggcagtaaatttttttgacctagagatcagaggagcaggaagaagcttcttgtcggagtgtgaagcattgagaagcattcaacactggaatattcttcccatcatagtttcttgttcaatagtagataatgtacgaaatgttttcatagatttaatttatgagtacatgcctaatgggagcttggacacatggctacatcacaaaggcgacgaggaggctacaaaatgtcatggcttgactcaaagtataagcatagctgttaatatagctgatgcattggattatttgcaccatgattgtggacagcaaactatttgttgcgacttgaaacctagcaatatccttctagattgtgacatgaatgctcttttgggagattttgaaattgcacgtttgtatcatgattccgagtcaaaatggacagagtatgggggaggtggtcatgcatcaacgtctggggatgtttatagttttggaatagtgttgttggagattttgacgagcagaagcccaatagatccaacgttcaaggacggctagggcatcatcaactttgttgagaataactttccgaatcaagtatttcaagtcattgactctgacctcctagaagaatgcaggaactcaactcaaggaaataatttggtacaagaaaatgagatctaccaatgcttggttgatctactgcaagtcacactttcgtttctctattcattaccatctgaatgatcgaacatgaagaaagtagccagcagaatgcatgcaatcaaaacatcacatattgggtggaagcacatgtaacaagagcaagggtgttccctaaattatacagtaacatacttaggatgggtcatagtcgaaaatgaccagtggcatggtggtacaggcagttagtaccgaccgggctggttccaatgctggttagttcgatcgactagtcagtagggctaccgaccagtcgacccggttgatatcgtccgcattggaacaaaatcggtcggtaccatcccgtacgctggtaacctagtcgatatcgaccctgaccggtcgatacttactgtctattgccatgtggcagttcctgactatttcacaccattttgaatttcaaaaaaataaataaataaagcttttttaaaaatctataatatggcatataaatagaggagtgtttgagttcattcacaccccactctccaaatcgcttttaacactttatattgcactcctctcactatagtttcactccactaaagcatcattgccatgtctttctcgagctcgagcattgggacgaccgaggacaaggtactcgatatgctccaccagactatattggatgcaatgataaagcttgcttctgggtgattaacgggaagaaggtgaaagacacaacttcggagctacatcgactaggattgtgaagccgcctacgattgattgattcaagactactttgatgacccatgtgtcgggtatggtaattaggggtacctagattacacctctaaaacatgcttaacccctaaaaacatcattagggtacgtcccccgaggtcaaaggatcacaagccacgcttcgcctgaggcctccctcatgggtctccgcaaactccgccttgccagagcctttcctcggacggggtgtgttctcgggagaatccttgtcccggccgaggtcccctcaccctagaacagcgatcttcacctcgcccgagcccgcctcgggtaacagagacaaaccctgggcaagactcaaccaaagtctgtcggggacagccacattcaatgcgcctacctaacccacgcaggcctataggtgtataggagcaacaagaccgcagtcctatcaaagattcaccaactatgattacacatgtgaccactgttcatgcatgtcgtctgcaaactcctgatgggacatacaatatgacaaaggtacagacggtggcgcacatcttcgtatttgttaacggtgcagacggtggatgtaacggtgctgtaaaaagggtttgtaaaccccataggaggtcagctagctgagcatctagtttaaagttgagagtttaatctcacagcaccaagcaaaaggaagcagattgaaagggaattaggcttacacctagttccttaataattttggt

SEQ ID NO: 40288 - DNA, 5755 bp, Zea Mays
gttcagagttgaaactcacagcaccaagcaaaaaggaagcagatcaagggtagccgagcgagcagaggttgtcaattacgtgccttaatatgagtcattggaagcagccgtcgaaactcgccatgcttgtagtactgctgctgctgctatgtcatgcagtggacaaagtccattgctcgacgcaccataacaacagccaagattttcattccctgcttgagtttcacaagggcatcaccagtgatccgaacgaagccttgagcaattggaaccccagcatccacttctgccattggcatggtgtgaactgcagtttcactcgaccatatcgagtcacggagctcaatctcaccggccaaaacttggctggccaaatcagctcctctcttggaaacctgaccttccttcatacccttgatcttagctacaatagcttcagtggccccctacctcttcttaacaagctccgaaacctggacgtactctttctgggaagcaaccatttgggggatgttattcccgattggcttacaaactcttccaacttagttgatctagatctctctgaaaacaatctcaccggccatattccttcaaacataggcttcctaacgaagctagaaggtatagccctttacaataataatctcaccggtgtcatcccaccaaccttgggaaacatctccacactagaggtagttgatttttcagcgaatcaactaagcggaagcattcctaataaagtttggcaaatctcaaacataacaatgttaaatctaggacaaaataacctatcaggtggaatcccagatactctctctaacttctcttctcttacagcattaggcttgaacaacaataagctaggcagcgcattgccatcaaacattggcgatgtgttccgtcatctaaatgaactatacttagataacaacatttttgtgggtacaattccaacttccctaggtaatccttcgagtctagaagccctagacctatcaaacaatcatttcagtggcaaaatcccaagttcttttggaagactttcaaagttacagattttaaaccttgagctaaacatgcttgaagcaagggatagtgaaggctggcaattctttgatgccctggcaaactgtagttccctgaatatactttcagtgtctcaaaatcttctacatggacctataccaaattcgatttcaaatctgtccaccactcttcaatacctaatgatggcttcgaacaacctatcaggaaccgttcccccaactattggaaaatttagtggcttgattaaattatcacttgcaaacaacaaccttacaggtaccattgaggaatgggtcggaaacatgacaaaactacaaatcttaggactacaatcgaacaactttgcaggggaaattcctccttcaattggcaatcttacacagttgatacacttctctatagccaggaacaatttcttcggctctgtacccatctaacttgtgcaatcttaaattaatgtcgtggttggaccttagccataacaatttccaagggagcatacctgttcagtttggtaactcagaactcatgtcgctaaatctttcatcaaacaaattcagcggcgaaattcctgaaactttaggacatatcgaacaattaacggtcattcaaatggaccaaaacaatcttactggaaacatccgtccacattgaggaatctatacagcttgagcttgctcaccccataacaatttatccggcctaatgccaacttttctaagtggtctaaatctcagtaaactagatctatcctacaatagtttccaaggagtaatacctacaaccggtctattcgataattctacagttgtttcgctagatgggaatccgagattatgtggaggagccatggatttgcatatgcctccatgccatgttgcttcaagaagagcacgcagagcaagcttattgattgaaatattgatcccaatatttgggttcatgtcactcgtattgctggtgcacattttactcctagagaagaggcagtcaagaagactatggatcgaagcaatcatttgaggaagatatggttcggtgtaccgagggaagctgaaggaaatggaagtggcagtaaaggtttttgacctggagatgagaggagcagaaagaagcttcttgtcagagtgtgaagcattgagaagcattcaacaccggaatcttatccccatcataactgcttgctcaatagtaggtactttcaaagctttaatttttgagttcatgtctaatggcaacctggacacatggctacgtcacaaaggagacgaggaggctacaaggtgtcttggcttaactcaaagaataaacatagttgttaatatagctgatgcattggattatttgcaccatggttgtgggcggccaactgttcactgtgacttgaaacccagcaatatacttctagatgatgacatgaatgctctcttgggagattttggaattgcaagtttctattatgattttgagacaaaatggacatgttcaagtagttcaattggtataaagggaacaattggatatattcctccagaatacggagtaggtggccatgcatcaacatgtggggatgtttatagttttgggattgtgttgttggagattttgacgagtaaaaggccaacagaccctatgttcgaagatggcttaaacatcatcaactttgtggagaacaactttccgaatcaaatatttcaagtcattgacgctcacctcctggaagaatgcaggaactcaactcaaggaaataatttggtacaagaaaatgaaatctatcagtgcttggttgatctgctgcaattagcactttcatgcatttgcccattaccatctgaacgattgaacatgaagcaagtagccagcagaatgcatgaaataaaaaaacatcacatattaggtggaagcacaagtaataatagcaagggcgacagatccagaatataaatcttcctatggtgaagctcccaaaatttgaattaaggccctatgtgggagggttatacttcaaaaaatgtagtttcggttttccagcttcaccatgaaacaacttaatagattagtaaggcgtggttcaagtgtgtttggcttgcacatagactccagcttctataatacaattaatttttgtaagtttacttaattacccttaatgattagcgagtggagaaagagacacaaatcggtagttcttataaatcaatggcgtattggataattttggtgcaacttcagagaagtataaaaatagtgtttttgaaacaacctttgaaaagcttcgaaaattttatgaaactagcctctagttttagttttttaaagctagagctagctgagctgggcctgtttggatagaagctgaaataggcttgaaattcttgaagtgaagctctcccaaatagggtctatatataatatgagcataatgaatatttggcatatgcaaagagctagggcctacaaagcttgtatctataaataggtcccagttagataaaatcggttagggagcgcttatcacttcaagtcgaaagactataaaatgtacatttcatgataataataattataaggcagacattcacccaagaaacatgtgcttctcatctcacgcatcgtcgccccttgaccaagggtttcctaagataagtcccatgatgccatggctcaatctcttgtagatttcatcaagacaatatgatgttgtcaccttacctagtagatcttggactaatcgttgtggttggcaagatctgctagttatcttgtgtagtatcaatttatttcatgctgagcttaatgttattagattgatcttgcatgaccaaacatgtatctcttgtacaattgctacaatccacaacatgagaatgcaacatgtgtatgtagcaactcgagagtttgatatgcatatggcatcttaccttacattctttagtcacattgtttattctggatgaactttttttgaggtccttatctatgtttgcttgcatgaccatcaatataccgactacaaatgttcctagggtaattggcatgatacataatatagattggatctaggatgttcctatgaatgatttactatttatttggccctagatttggttgatagtgtgtttaatcctggtgtcttcttagcctattgttgcgctcgtggttgtgcatgtttacttttgctttcaatgaatgtttactttcacttatttagttgataccgacctagaaaagctgacaataacctcaaggtagcgtgttaatgtaattagtacatgctgatccacatgatatggcaggaatttgatgttttaatctgttattgtgcatctatagagtaatttaatgactacattacaccctccctacttgatagatcaagccaagtggcatgcttagaacccactaacaacctcttgcaattagaagcagtcggagccacaacaaagagagatgaccacaataccaatgcatctcttgtctccttgtgtgtcgactgtgttgacgataaaccatagttttcccatgatgagacatgtcaggcacacccgatgagacatcgacatcgaccactgcatcagtcaatttacatccgctcagcgacatcggctcatcttcattgacttatctacatcggctcattctcgtcaacatgacccaagcaaggaaggagattcctagctacagcgacgggattaaatgttggctaccaagcaagactaggccaccctagctcgaggagatcaacctagatatgttgtaatgctatgaccaggctctcaagaggctaaccaatgagcttcttgtgtgcttcacgtggactcactccagtggtgacaaactcacccgaaaattattgagatgtaacaaactaacatcatctctagttgtcgataccaccgatagagggtgtttggtatatgtttaccatatttacttcatattcttagaatatactgtaagattatggggaggctacactagcacaaaacaaaattttcgaccccataaaccaagatctactgctgttaggtcatggaattaccacaagacgtgcaggacaacgaaagccatcttgatgtagacgaacacgtcaagcagtgtcgtgcagtcgccagtgtccttcacgacctcgtgtggttttcctagtgctctagatgtagcacctccaaggtatccacatgtataggaaggaagcatcgcgtaccgacctgttaggtttgcgacggaggcttggcgagggcgagatgggcgcgactgctggtttgctggtggtgaattaggttaaccctaagcacgcgccagcccctcattgtatatccattgtagtgggattctcactccgaggcccatcagcaaccctaaaacccagtctaatttcagatccaatccgagttaggcttccttccccttaagtgtgtgaccttgtaggttcacgtacacatagacatgtcctgagtactcatacttcgcccaataattaacaacggcctctagcaagacatgtcaactcctatgcacatgtaaagatcatatcagatgaaccattacaacattacgtacatcatgttccctttgtctcataatatttcgtctggctctaaaatgacctctctttctcgatactatgaattggaagctagcgtcgatgtaactagttacaacgtgctcctcttacccccattgtaagacccaaaattgatagaag

SEQ ID NO: 40289 - DNA, 3952 bp, Zea Mays
tcaagggtagccgagcgagcagaggttgtcaattacgtgccttaatatgagtcattggaagcagccgtcgaaactcgccatgcttgtagtactgctgctgctgctatgtcatgcagtggacaaagtccattgctcgacgcaccataacaacagccaagattttcattccctgcttgagtttcacaagggcatcaccagtgatccgaacgaagccttgagcaattggaaccccagcatccacttctgccattggcatggtgtgaactgcagtttcactcgaccatatcgagtcacggagctcaatctcaccggccaaaacttggctggccaaatcagctcctctcttggaaacctgaccttccttcatacccttgatcttagctacaatagcttcagtggccccctacctcttcttaacaagctccgaaacctggacgtactctttctgggaagcaaccatttgggggatgttattcccgattggcttacaaactcttccaacttagttgatctagatctctctgaaaacaatctcaccggccatattccttcaaacataggcttcctaacgaagctagaaggtatagccctttacaataataatctcaccggtgtcatcccaccaaccttgggaaacatctccacactagaggtagttgatttttcagcgaatcaactaagcggaagcattcctaataaagtttggcaaatctcaaacataacaatgttaaatctaggacaaaataacctatcaggtggaatcccagatactctctctaacttctcttctcttacagcattaggcttgaacaacaataagctaggcagcgcattgccatcaaacattggcgatgtgttccgtcatctaaatgaactatacttagataacaacatttttgtgggtacaattccaacttccctaggtaatccttcgagtctagaagccctagacctatcaaacaatcatttcagtggcaaaatcccaagttcttttggaagactttcaaagttacagattttaaaccttgagctaaacatgcttgaagcaagggatagtgaaggctggcaattctttgatgccctggcaaactgtagttccctgaatatactttcagtgtctcaaaatcttctacatggacctataccaaattcgatttcaaatctgtccaccactcttcaatacctaatgatggcttcgaacaacctatcaggaaccgttcccccaactattggaaaatttagtggcttgattaaattatcacttgcaaacaacaaccttacaggtaccattgaggaatgggtcggaaacatgacaaaactacaaatcttaggactacaatcgaacaactttgcaggggaaattcctccttcaattggcaatcttacacagttgatacacttctctatagccaggaacaatttcttcggctctgtacccatctaacttgtgcaatcttaaattaatgtcgtggttggaccttagccataacaatttccaagggagcatacctgttcagtttggtaactcagaactcatgtcgctaaatctttcatcaaacaaattcagcggcgaaattcctgaaactttaggacatatcgaacaattaacggtcattcaaatggaccaaaacaatcttactggaaacatccgtccacattgaggaatctatacagcttgagcttgctcaccccataacaatttatccggcctaatgccaacttttctaagtggtctaaatctcagtaaactagatctatcctacaatagtttccaaggagtaatacctacaaccggtctattcgataattctacagttgtttcgctagatgggaatccgagattatgtggaggagccatggatttgcatatgcctccatgccatgttgcttcaagaagagcacgcagagcaagcttattgattgaaatattgatcccaatatttgggttcatgtcactcgtattgctggtgcacattttactcctagagaagaggcagtcaagaagactatggatcgaagcaatcatttggtgagcattttgagaaagttacttataatgacttagctcaatcaacatgtaacttctcagaatctaacttaattggtagaggaagatatggttcggtgtaccgagggaagctgaaggaaatggaagtggcagtaaaggtttttgacctggagatgagaggagcagaaagaagcttcttgtcagagtgtgaagcattgagaagcattcaacaccggaatcttatccccatcataactgcttgctcaatagtaggtactttcaaagctttaatttttgagttcatgtctaatggcaacctggacacatggctacgtcacaaaggagacgaggaggctacaaggtgtcttggcttaactcaaagaataaacatagttgttaatatagctgatgcattggattatttgcaccatggttgtgggcggccaactgttcactgtgacttgaaacccagcaatatacttctagatgatgacatgaatgctctcttgggagattttggaattgcaagtttctattatgattttgagacaaaatggacatgttcaagtagttcaattggtataaagggaacaattggatatattcctccagatcaagccaagtggcatgcttagaacccactaacaacctcttgcaattagaagcagtcggagccacaacaaagagagatgaccacaataccaatgcatctcttgtctccttgtgtgtcgactgtgttgacgataaaccatagttttcccatgatgagacatgtcaggcacacccgatgagacatcgacatcgaccactgcatcagtcaatttacatccgctcagcgacatcggctcatcttcattgacttatctacatcggctcattctcgtcaacatgacccaagcaaggaaggagattcctagctacagcgacgggattaaatgttggctaccaagcaagactaggccaccctagctcgaggagatcaacctagatatgttgtaatgctatgaccaggctctcaagaggctaaccaatgagcttcttgtgtgcttcacgtggactcactccagtggtgacaaactcacccgaaaattattgagatgtaacaaactaacatcatctctagttgtcgataccaccgatagagggtgtttggtatatgtttaccatatttacttcatattcttagaatatactgtaagattatggggaggctacactagcacaaaacaaaattttcgaccccataaaccaagatctactgctgttaggtcatggaattaccacaagacgtgcaggacaacgaaagccatcttgatgtagacgaacacgtcaagcagtgtcgtgcagtcgccagtgtccttcacgacctcgtgtggttttcctagtgctctagatgtagcacctccaaggtatccacatgtataggaaggaagcatcgcgtaccgacctgttaggtttgcgacggaggcttggcgagggcgagatgggcgcgactgctggtttgctggtggtgaattaggttaaccctaagcacgcgccagcccctcattgtatatccattgtagtgggattctcactccgaggcccatcagcaaccctaaaacccagtctaatttcagatccaatccgagttaggcttccttccccttaagtgtgtgaccttgtaggttcacgtacacatagacatgtcctgagtactcatacttcgcccaataattaacaacggcctctagcaagacatgtcaactcctatgcacatgtaaagatcatatcagatgaaccattacaacattacgtacatcatgttccctttgtctcataatatttcgtctggctctaaaatgacctctctttctcgatactatgaattggaagctagcgtcgatgtaactagttacaacgtgctcctcttacccccattgtaagacccaaaattgatagaag

SEQ ID NO: 40290 - DNA, 3782 bp, Zea Mays
gggtagccgagcgagcagaggttgtcaattacgtgccttaatatgagtcattggaagcagccgtcgaaactcgccatgcttgtagtactgctgctgctgctatgtcatgcagtggacaaagtccattgctcgacgcaccataacaacagccaagattttcattccctgcttgagtttcacaagggcatcaccagtgatccgaacgaagccttgagcaattggaaccccagcatccacttctgccattggcatggtgtgaactgcagtttcactcgaccatatcgagtcacggagctcaatctcaccggccaaaacttggctggccaaatcagctcctctcttggaaacctgaccttccttcatacccttgatcttagctacaatagcttcagtggccccctacctcttcttaacaagctccgaaacctggacgtactctttctgggaagcaaccatttgggggatgttattcccgattggcttacaaactcttccaacttagttgatctagatctctctgaaaacaatctcaccggccatattccttcaaacataggcttcctaacgaagctagaaggtatagccctttacaataataatctcaccggtgtcatcccaccaaccttgggaaacatctccacactagaggtagttgatttttcagcgaatcaactaagcggaagcattcctaataaagtttggcaaatctcaaacataacaatgttaaatctaggacaaaataacctatcaggtggaatcccagatactctctctaacttctcttctcttacagcattaggcttgaacaacaataagctaggcagcgcattgccatcaaacattggcgatgtgttccgtcatctaaatgaactatacttagataacaacatttttgtgggtacaattccaacttccctaggtaatccttcgagtctagaagccctagacctatcaaacaatcatttcagtggcaaaatcccaagttcttttggaagactttcaaagttacagattttaaaccttgagctaaacatgcttgaagcaagggatagtgaaggctggcaattctttgatgccctggcaaactgtagttccctgaatatactttcagtgtctcaaaatcttctacatggacctataccaaattcgatttcaaatctgtccaccactcttcaatacctaatgatggcttcgaacaacctatcaggaaccgttcccccaactattggaaaatttagtggcttgattaaattatcacttgcaaacaacaaccttacaggtaccattgaggaatgggtcggaaacatgacaaaactacaaatcttaggactacaatcgaacaactttgcaggggaaattcctccttcaattggcaatcttacacagttgatacacttctctatagccaggaacaatttcttcggctctgtacccatctaacttgtgcaatcttaaattaatgtcgtggttggaccttagccataacaatttccaagggagcatacctgttcagtttggtaactcagaactcatgtcgctaaatctttcatcaaacaaattcagcggcgaaattcctgaaactttaggacatatcgaacaattaacggtcattcaaatggaccaaaacaatcttactggaaacatccgtccacattgaggaatctatacagcttgagcttgctcaccccataacaatttatccggcctaatgccaacttttctaagtggtctaaatctcagtaaactagatctatcctacaatagtttccaaggagtaatacctacaaccggtctattcgataattctacagttgtttcgctagatgggaatccgagattatgtggaggagccatggatttgcatatgcctccatgccatgttgcttcaagaagagcacgcagagcaagcttattgattgaaatattgatcccaatatttgggttcatgtcactcgtattgctggtgcacattttactcctagagaagaggcagtcaagaagactatggatcgaagcaatcatttggtgagcattttgagaaagttacttataatgacttagctcaatcaacatgtaacttctcagaatctaacttaattggtagaggaagatatggttcggtgtaccgagggaagctgaaggaaatggaagtggcagtaaaggtttttgacctggagatgagaggagcagaaagaagcttcttgtcagagtgtgaagcattgagaagcattcaacaccggaatcttatccccatcataactgcttgctcaatagtaggtactttcaaagctttaatttttgagttcatgtctaatggcaacctggacacatggctacgtcacaaaggagacgaggaggctacaaggtgtcttggcttaactcaaagaataaacatagttgttaatatagctgatgcattggattatttgcaccatggttgtgggcggccaactgttcactgtgacttgaaacccagcaatatacttctagatgatgacatgaatgctctcttgggagattttggaattgcaagtttctattatgattttgagacaaaatggacatgttcaagtagttcaattggtataaagggaacaattggatatattcctccaggcacacccgatgagacatcgacatcgaccactgcatcagtcaatttacatccgctcagcgacatcggctcatcttcattgacttatctacatcggctcattctcgtcaacatgacccaagcaaggaaggagattcctagctacagcgacgggattaaatgttggctaccaagcaagactaggccaccctagctcgaggagatcaacctagatatgttgtaatgctatgaccaggctctcaagaggctaaccaatgagcttcttgtgtgcttcacgtggactcactccagtggtgacaaactcacccgaaaattattgagatgtaacaaactaacatcatctctagttgtcgataccaccgatagagggtgtttggtatatgtttaccatatttacttcatattcttagaatatactgtaagattatggggaggctacactagcacaaaacaaaattttcgaccccataaaccaagatctactgctgttaggtcatggaattaccacaagacgtgcaggacaacgaaagccatcttgatgtagacgaacacgtcaagcagtgtcgtgcagtcgccagtgtccttcacgacctcgtgtggttttcctagtgctctagatgtagcacctccaaggtatccacatgtataggaaggaagcatcgcgtaccgacctgttaggtttgcgacggaggcttggcgagggcgagatgggcgcgactgctggtttgctggtggtgaattaggttaaccctaagcacgcgccagcccctcattgtatatccattgtagtgggattctcactccgaggcccatcagcaaccctaaaacccagtctaatttcagatccaatccgagttaggcttccttccccttaagtgtgtgaccttgtaggttcacgtacacatagacatgtcctgagtactcatacttcgcccaataattaacaacggcctctagcaagacatgtcaactcctatgcacatgtaaagatcatatcagatgaaccattacaacattacgtacatcatgttccctttgtctcataatatttcgtctggctctaaaatgacctctctttctcgatactatgaattggaagctagcgtcgatgtaactagttacaacgtgctcctcttacccccattgtaagacccaaaattgatagaag

SEQ ID NO: 40291 - DNA, 1015 bp, Zea Mays
atatcctggccacggtgacctcgatctcaatctaaaattcgtgctaagctcggccggattctataaattggaggcaccccctgttctgcctacttgttacgaactagtgaaccactcctcgctcctgatcgttcaccgtagcgccctaattcggatttccccaaatcagttctccgcactgccgtgaacacctcctctgtcgacccaccgctctgtccctccaccagccttcctagctaccattcttgagtcctgaaaacgaagaagaagctatagtcgaagaagaagttgtcccgcaagctgagaatcattcggttgagaacaacttctattttgacatttgtgggacagatccagaacctcctgcaacacaagataagccccgatgcatttacccctttccttgttgttttaaactctttatcacttgagatgatgcattaggtgataggagttgtgtgctaaacaattgctgcatttccttggaactgattaccattccttgatacctgttttacttaaagttttctgatgcttagctttgctttagaaaacaaaatgttttgttttaaacaaaagatgatgcttcatatgggatgggaagttttcaaagaaaagacttgatggtgaatccatcttggtcatgatgggttcaacatctaaaaatatgtacctatgtctggtaccaaacttttggttgtaaatgataaagatgagaccgggcaggtgacttgcacgagaaggaagtctcggtgtagtgtctccgtttgagtcgcttaaagaccgagccgatgtgggcctgctgaccgatgaccctttaactggccacatgcctcgtcatgggcaagctttgcctcggtcggaccaataccataaaggccaccacgcaatgggagtggagagatggcgagagtagcatgtaccctccgtggcaagaggctggacgctggtgtatctgtgctctccgttggcgtgaacccgttctggtcttgagaaacccggtggcgagttgaca

SEQ ID NO: 40292 - DNA, 3549 bp, Zea Mays
cacccatcgactagggcccctctgtccctatatacggcgccccatcgtgcctcaatccaagcactgagtcgcacccccgtcgtggaaagggaacaacatcgcccccaacaccgagagagatagggggatctgccgcacgagcatcctgcagggatcaccgctctgggctggacagatggtcaaggcaagtctccagagcacgtacgttcgtgacctcatatggtgaggttggtggatgggagcatggttgtttctcaccgaagtttccctccgccaaggaaagccccctgccgcgggccggcgttgctgcttcaccactgtcgcccacttaacacacccacgcgacctagcacggacagatgggcccaggtcaccagcgcctcatctgatccgcgcgcggagctgcgttcaccggtgtgacgctggcgcgtggggccatctcgtcggttccatctcctaccctatattgaactcgtcctgtctattacgaaggagccggagcgaacatcgcaccaagatacagtctgatacctgtgatgcttgcctaggatccctcacggggtataaaactaagccattctcacgcccgaccctccctcaaacctaaacgtcgagactgcgtcgtcggtgatgggtgcgagcgagagagattggcgccgcttggcgccgaagggctgggtgacccgctgtccgccgccgatctctgcccgtgcgcccgctgcccgggggacttcatcatggggtcaggaagagtcaccagagccagtggtacatgcacgtggggtgttgtatgtgcgacatcgaccggcaacagaggaattgctcgttgtcgcttgatgttgccgtaaatccgcctcacaacgtggaacttctcctggtaagccggtctgggcgtgtgggctagtcagggggcttcacggactctcattgttggagttcagggtcgtatgggtcgcgatggtgctctgtggccccaccaattgctcgccgatgccgagcaggcgccaccggaccgccgtgtgcatggatagctcaccactccatctttgcctcaggtaaataacaatccaatgctttacccatgtctggagcatcgtgtagaaccattctgggttgtggattgagcaccagggcgccgagtaggacgtctgtggcgaaaaccccatcgtgggggcctacgcgccgccatcctgcaatggtgagggagaagaaagctttctagccgttgattccttgatgtgcggctaggatcatatcgctcgcatatcctttcgtgtattctacgatatccgttaagatctgatcagatggttgagaggggttgtttgtatggagcattgcaggccgtgcatcttagatcgtactatccacgtcgcttaccgattcataaaatatcccgatctaatctgaacccttgaatcgcgatcgcacggtctggttgatcgataccctttcggtcgtatcctttttgcataagagcccctgagatttctgagaatcaacccgccgtcctgatgcagtggtagaaaatttaatctatgcccctaaaacttgtagtttggcccctgatctcttaaagaatggcaccctcagtctaggacttatagaatttagtaaaataaatccgaaaatggaattttagtataaaaataagtctggaaaccttagaaactcataactcctttattttaactcctttttgatccattccagttgcattaatctcatattaatattgtttatcatatagtaaccttgtattaccatgaaatctatgattaaaatcttgtacctttgctttatagtagacacttaaactttcggaaaatcataactttatgaccgtaactccgaatttagtggttctcgaaccggtgatctcgttacgttgcgtagaacattattatgcattatgttcttatgtttagtgtgatgttaatttttcttataccatgtttgtttgtattgctacgaatagctgcgaggttacgagtcacttgaagaccaagttggtacctgagaatcttgagtctaaggcaaattgtgcccttgatcacttttctccttacccaataatgttcgtgttaatcagtgtgacatgcttaggttaatttgatggaacctaataggtttccctagatttgtttatcccacaccttgtttaccactgaacttttgggtagttttgctattgctctacctggttttgggattaattttacattatgatcatgttctagttatgttattgttttaattattgttcatgacaagatcattgtgttaattggaacatggagcttaacttgagatatccgtgctaccacaagggtggaatgggacgccctcggctgactaattaaaaaggtagtagaggactaccttacccaaaaggggcaatggcggtagaggagctgcgtatagggaagttctcgggtcgatcatgctacgatggcttttcggacgagagatgcctatactgcctttctcaaaaaccgtagcgggttttctgaagctagtggaactttgtaaaggtctcatagtggatccctagccattcacctcggaagtgtctaagggccttacaaaccctggctagacgggatacacgacttgtgggtaaagggcgcaacctctgcagagtgtaaaactggtatatcagtcgtgctcacggttaagagcgacttaggactctcgcatgattaatttatggaactaaacttaatttgtcatatgcattgcattgtgggtgttgttattaattttgatctcataattatttgggttggtatctacttttgcttagtaactgctaataaaattttgaccaactctaaaagcaatgctcagctttaaccatatcctttggtaagtcttacacttcatatgagcccccacctttggtgagttcatgcacattattccccacaacatgttgagcgatgaacgcatgaatgatgtcgcgatgatgttcgtgagaggtctaggtcgtcgtctcccagtcaactatggctgctggatcgttgtcttcatatgatataattatttaattattttgtacacaattcccatatatattaaagatttgacatttgtttatttaccatgagtcatcatacagttggtgaagttcacgcccgggtttggtgcccctaaaacccgggtgtgataggtcatgaagtacctaaagaccaaattggagaagtacctggagttgtaccaaaggattgttgtgcccttgatcacttttctttacttgataatcttctcgataatcattgtgacatgctcaggttaacttgatgggacctaataggttaccctagtattgttcaccctacaccttgcaaacaaatgaactattgggtagtcttgctattgccatacctgattttagaattaatattatatcttaattatgatcatgctccattattattgttggtttaactattgttcatgataagattatcgtgttaattggaacatggagtgaccatgtcacacctggttttagaaggcaaaccgaatgcgaaccatgtacgcgcc

SEQ ID NO: 40293 - DNA, 744 bp, Zea Mays
cgactagggcccctctgtccctatatacggcgccccatcgtgcctcaatccaagcactgagtcgcacccccgtcgtggaaagggaacaacatcgcccccaacaccgagagagatagggggatctgccgcacgagcatcctgcagggatcaccgctctgggctggacagatggtcaaggcaagtctccagagcacgtacgttcgtgacctcatatggtgaggttggtggatgggagcatggttgtttctcaccgaagtttccctccgccaaggaaagccccctgccgcgggccggcgttgctgcttcaccactgtcgttggtgaagttcacgcccgggtttggtgcccctaaaacccgggtgtgataggtcatgaagtacctaaagaccaaattggagaagtacctggagttgtaccaaaggattgttgtgcccttgatcacttttctttacttgataatcttctcgataatcattgtgacatgctcaggttaacttgatgggacctaataggttaccctagtattgttcaccctacaccttgcaaacaaatgaactattgggtagtcttgctattgccatacctgattttagaattaatattatatcttaattatgatcatgctccattattattgttggtttaactattgttcatgataagattatcgtgttaattggaacatggagtgaccatgtcacacctggttttagaaggcaaaccgaatgcgaaccatgtacgcgcc

SEQ ID NO: 40294 - DNA, 1819 bp, Zea Mays
cccgtcgtggaaagggaacaacatcgcccccaacaccgagagagatagggggatctgccgcacgagcatcctgcagggatcaccgctctgggctggacagatggtcaaggcaagtctccagagcacgtacgttcgtgacctcatatggtgaggttggtggatgggagcatggttgtttctcaccgaagtttccctccgccaaggaaagccccctgccgcgggccggcgttgctgcttcaccactgtcgctgcgaggttacgagtcacttgaagaccaagttggtacctgagaatcttgagtctaaggcaaattgtgcccttgatcacttttctccttacccaataatgttcgtgttaatcagtgtgacatgcttaggttaatttgatggaacctaataggtttccctagatttgtttatcccacaccttgtttaccactgaacttttgggtagttttgctattgctctacctggttttgggattaattttacattatgatcatgttctagttatgttattgttttaattattgttcatgacaagatcattgtgttaattggaacatggagcttaacttgagatatccgtgctaccacaagggtggaatgggacgccctcggctgactaattaaaaaggtagtagaggactaccttacccaaaaggggcaatggcggtagaggagctgcgtatagggaagttctcgggtcgatcatgctacgatggcttttcggacgagagatgcctatactgcctttctcaaaaaccgtagcgggttttctgaagctagtggaactttgtaaaggtctcatagtggatccctagccattcacctcggaagtgtctaagggccttacaaaccctggctagacgggatacacgacttgtgggtaaagggcgcaacctctgcagagtgtaaaactggtatatcagtcgtgctcacggttaagagcgacttaggactctcgcatgattaatttatggaactaaacttaatttgtcatatgcattgcattgtgggtgttgttattaattttgatctcataattatttgggttggtatctacttttgcttagtaactgctaataaaattttgaccaactctaaaagcaatgctcagctttaaccatatcctttggtaagtcttacacttcatatgagcccccacctttggtgagttcatgcacattattccccacaacatgttgagcgatgaacgcatgaatgatgtcgcgatgatgttcgtgagaggtctaggtcgtcgtctcccagtcaactatggctgctggatcgttgtcttcatatgatataattatttaattattttgtacacaattcccatatatattaaagatttgacatttgtttatttaccatgagtcatcatacagttggtgaagttcacgcccgggtttggtgcccctaaaacccgggtgtgataggtcatgaagtacctaaagaccaaattggagaagtacctggagttgtaccaaaggattgttgtgcccttgatcacttttctttacttgataatcttctcgataatcattgtgacatgctcaggttaacttgatgggacctaataggttaccctagtattgttcaccctacaccttgcaaacaaatgaactattgggtagtcttgctattgccatacctgattttagaattaatattatatcttaattatgatcatgctccattattattgttggtttaactattgttcatgataagattatcgtgttaattggaacatggagtgaccatgtcacacctggttttagaaggcaaaccgaatgcgaaccatgtacgcgcc

SEQ ID NO: 40295 - DNA, 360 bp, Zea Mays
gttggtcatgatcttgccgagtgcatggccgaggtggttgtccatcttcttccccaccgtcggtgaccacgccggctgattctctatctcctcgtggccagcacggaccaaggtaatcaggagctttctaggtgtccctgtggctggaagatgcttccagtcttgaaggaggattagttaggtttatgtgtgaactttggaagggttctaccttcctgctatggtaataagttatgcattttgagttctatcaggacttgtaataattataaatctttctagcatgtaaaacttgagttttggaataaagaatgttttgtaaagtcttcactctatctccgaagtgtgtttgtatcgaat

SEQ ID NO: 40296 - DNA, 405 bp, Zea Mays
atcttgccgagtgcatggccgaggtggttgtccatcttcttccccaccgtcggtgaccacgccggctgattctctatctcctcgtggccagcacggaccaagaacacctagacgaggtggtacttgacgaagtctactccagtgcctgctcatcaagtggatggagctatttaactaaaggttaggtagaaggatctagaacctcttcactgcaacaaaggcaagccccggtgcatgcaaccccttccttgtgtttttaaataatttttgcacactttaagtttagcgaaatgtgcattaggtttataggagttgcttggaaaccctttgatgcattggctaccttgagatccattccttttatagatacttctggtgaagtaacaaatatgatttacaaaattg

SEQ ID NO: 40297 - DNA, 2429 bp, Zea Mays
agccgccgtccctgcactatcctccctcaggccgccgccgcccctgctccgtcctggcaatcactttgggaaggtggtcagtggaataactttgcttaaaaagcttgaagcagttggtagtgaaactggaaatccttcttatcaagtgaaaattgtagactgtggtgaagtttccaacacaaattctcaggatccgctaaagggagataaagtaagctcaaagacagataacagcagttcagacagtgaaaagggtggccatcgtaccaagcgttccttgacgaaaggtgagctctagaatgttgagccttggcgctctcaccacatttgattacttggggattgagtaaccgggaaaggcgtattgcacttgttgctgctggcgctgctgctggcattgcttcaggcttcaatgcagcagttgctgggtgcttctttgccattgaaactgtattaagacctcttaaagcagaaaattcacctccatttacgactgcaatgataatattggcatctgttatatcatctactgtttcaaatgttttacttggagccagaccagcttttatagtgccagcctatgagctaaaatctgctgccggttggaatggctgctacactagcttcagtctgttcagtcccattgacttcagtactgcttctctttgagctgacaaaggattacaggattttgcttcctctcatgtgaacaagggagaatattgtgaactgaaggtcatgtatcagcgaaaagcaggctttcctcttgtagcaattgtgcactgaaaaactacagtgcccttatgacaccacaatagtaagcaagactacaggacatctatgcgaaatgcagctagccagctacactgatgtagagatcattcaggcagtttaacctctatactgtatcattttaatttaaccagctatttcactactgccttttatagtgtttaggttataaccaatgacatctattagagtttataatttaaactcattgattgaaaaacatttagttgtgatgtcactaaaaggtgaaataaatttcttatagtgtgcattattatccctttttcatttctaagtaaaattcttaacaacttctgtaataataatgattggatttatgaatgttgtttgcactaacatctggtctaatttcattattcttgaacttcttttgtgcccatgcttcattacacatgtaggtcgctcgaatgcaactgtccggcctagcatccaatcgacctcaaccactctgcatcccacgtgtgtgtggagctgatgaacatgtcgatgtgtactgattttttctcatatgtttctagccatgctttaattgattctttgtcaaattgtgcaacttgtgcaaaccatatgattacttggtattattgctttgatatggacatccagaaaaatattcaacttcgaatatctttggctttagtgactagtgactgatgtactttagcgtatccactaaaaaccatgaaagtctaggtatgtgtcatttggcattaggttttgtgatgtaacacttgactcaacatcctctaatatgtatatctgttttgacattatattttttcacatgactaacctttgggcatctctgttttcatattaccaatacaccaatgatgttaggcaaattcctccagctcgagtacttggagattacatagtcttctccattgtttttctagactttgaggttctaagcatgagcaagctgggttatgatggtgttgtggcactgctggttgctgatatatcactttcaatcggtcttgaccagattgaagctctgtatcagtatgcccaatttcagtttgagtgtggtaactactcaggggctgctgattacctttaccagtatggtgctttgtgcacaaacagtgagcgaaatgtgagtgccctctggggaaagctagcagcagaaatcctaatgcagaactgggacctagctttggaggaactcaaccgcttgaaggaaataattgattcaaaggtacttgaatgctatacagacaaatgcacaccatcttattaggtatctagctactgcagttgttgtcaacaaaaaggagaaggaatatgcttaaagagttgattaaggtcattcaacaggagcaccatagctacaaggatcccgtaactgaatttttggaatgcttatatgttaactatgtagttgtgggcttttgaacaatagctggagtgatatgaaacattagtgatgtagttgtgggcttttgaactgcttcaagcaggagtgatgccgttgtggtgcttttgtgactgatcatctctggagcttttgtgaatgatctagctagctatctataaatgatctagttgtgaatgatattataattgtgatgcttttgtgaatatataattgtggtgcttttgtgtttatg

SEQ ID NO: 40298 - DNA, 2043 bp, Zea Mays
agccgccgtccctgcactatcctccctcaggccgccgccgcccctgctccgtcctggcaatcactttgggaaggtggtcagtggaataactttgcttaaaaagcttgaagcagttggtagtgaaactggaaatccttcttatcaagtgaaaattgtagactgtggtgaagtttccaacacaaattctcaggatccgctaaagggagataaagtaagctcaaagacagataacagcagttcagacagtgaaaagggtggccatcgtaccaagcgttccttgacgaaaggcttcaatgcagcagttgctgggtgcttctttgccattgaaactgtattaagacctcttaaagcagaaaattcacctccatttacgactgcaatgataatattggcatctgttatatcatctactgtttcaaatgttttacttggagccagaccagcttttatagtgccagcctatgagctaaaatctgctgccggttggaatggctgctacactagcttcagtctgttcagtcccattgacttcagtactgcttctctttgagctgacaaaggattacaggattttgcttcctctcatgtgaacaagggagaatattgtgaactgaaggtcatgtatcagcgaaaagcaggctttcctcttgtagcaattgtgcactgaaaaactacagtgcccttatgacaccacaatagtaagcaagactacaggacatctatgcgaaatgcagctagccagctacactgatgtagagatcattcaggcagtttaacctctatactgtatcattttaatttaaccagctatttcactactgccttttatagtgtttaggttataaccaatgacatctattagagtttataatttaaactcattgattgaaaaacatttagttgtgatgtcactaaaaggtgaaataaatttcttatagtgtgcattattatccctttttcatttctaagtaaaattcttaacaacttctgtaataataatgattggatttatgaatgttgtttgcactaacatctggtctaatttcattattcttgaacttcttttgtgcccatgcttcattacacatgtaggtcgctcgaatgcaactgtccggcctagcatccaatcgacctcaaccactctgcatcccacgtgtgtgtggagctgatgaacatgtcgatgtgcaaattcctccagctcgagtacttggagattacatagtcttctccattgtttttctagactttgaggttctaagcatgagcaagctgggttatgatggtgttgtggcactgctggttgctgatatatcactttcaatcggtcttgaccagattgaagctctgtatcagtatgcccaatttcagtttgagtgtggtaactactcaggggctgctgattacctttaccagtatggtgctttgtgcacaaacagtgagcgaaatgtgagtgccctctggggaaagctagcagcagaaatcctaatgcagaactgggacctagctttggaggaactcaaccgcttgaaggaaataattgattcaaagaacttctcatcacctctgaatcagctccagaataggatatggctgatgcattgggctctgttcatcttctttaaccatatcaggtacttgaatgctatacagacaaatgcacaccatcttattaggtatctagctactgcagttgttgtcaacaaaaaggagaaggaatatgcttaaagagttgattaaggtcattcaacaggagcaccatagctacaaggatcccgtaactgaatttttggaatgcttatatgttaactatgtagttgtgggcttttgaacaatagctggagtgatatgaaacattagtgatgtagttgtgggcttttgaactgcttcaagcaggagtgatgccgttgtggtgcttttgtgactgatcatctctggagcttttgtgaatgatctagctagctatctataaatgatctagttgtgaatgatattataattgtgatgcttttgtgaatatataattgtggtgcttttgtgtttatg

SEQ ID NO: 40299 - DNA, 2752 bp, Zea Mays
cactatcctccctcaggccgccgccgcccctgctccgtcctggcaatcactttgggaaggtggtcagtggaataactttgcttaaaaagcttgaagcagttggtagtgaaactggaaatccttcttatcaagtgaaaattgtagactgtggtgaagtttccaacacaaattctcaggatccgctaaagggagataaagtaagctcaaagacagataacagcagttcagacagtgaaaagggtggccatcgtaccaagcgttccttgacgaaaggtgagctctagaatgttgagccttggcgctctcaccacatttgattacttggggattgagtaaccgggaaaggcgtattgcacttgttgctgctggcgctgctgctggcattgcttcaggcttcaatgcagcagttgctgggtgcttctttgccattgaaactgtattaagacctcttaaagcagaaaattcacctccatttacgactgcaatgataatattggcatctgttatatcatctactgtttcaaatgttttacttggagccagaccagcttttatagtgccagcctatgagctaaaatctgctgccggttggaatggctgctacactagcttcagtctgttcagtcccattgacttcagtactgcttctctttgagctgacaaaggattacaggattttgcttcctctcatgtgaacaagggagaatattgtgaactgaaggtcatgtatcagcgaaaagcaggctttcctcttgtagcaattgtgcactgaaaaactacagtgcccttatgacaccacaatagtaagcaagactacaggacatctatgcgaaatgcagctagccagctacactgatgtagagatcattcaggcagtttaacctctatactgtatcattttaatttaaccagctatttcactactgccttttatagtgtttaggttataaccaatgacatctattagagtttataatttaaactcattgattgaaaaacatttagttgtgatgtcactaaaaggtgaaataaatttcttatagtgtgcattattatccctttttcatttctaagtaaaattcttaacaacttctgtaataataatgattggatttatgaatgttgtttgcactaacatctggtctaatttcattattcttgaacttcttttgtgcccatgcttcattacacatgtaggtcgctcgaatgcaactgtccggcctagcatccaatcgacctcaaccactctgcatcccacgtgtgtgtggagctgatgaacatgtcgatgtgtactgattttttctcatatgtttctagccatgctttaattgattctttgtcaaattgtgcaacttgtgcaaaccatatgattacttggtattattgctttgatatggacatccagaaaaatattcaacttcgaatatctttggctttagtgactagtgactgatgtactttagcgtatccactaaaaaccatgaaagtctaggtatgtgtcatttggcattaggttttgtgatgtaacacttgactcaacatcctctaatatgtatatctgttttgacattatattttttcacatgactaacctttgggcatctctgttttcatattaccaatacaccaatgatgttaggcaaattcctccagctcgagtacttggagattacatagtcttctccattgtttttctagactttgaggtatttgccatcgtgttattcatcatgtaagcttaaaatatgacacaaagaaactcctaatattatgtcttatttttagactacgcagacaaatagggtagctatgctagatgagatcctggattatgtgaagtttctaaggctttagcctttaggtcaaggttcagctcattgtgctgacatatttgggttattaaccaccaattgggttacttgtttgatcactgataggtccctgattttgaaaatgttaggttctaagcatgagcaagctgggttatgatggtgttgtggcactgctggttgctgatatatcactttcaatcggtcttgaccagattgaagctctgtatcagtatgcccaatttcagtttgagtgtggtaactactcaggggctgctgattacctttaccagtatggtgctttgtgcacaaacagtgagcgaaatgtgagtgccctctggggaaagctagcagcagaaatcctaatgcagaactgggacctagctttggaggaactcaaccgcttgaaggaaataattgattcaaagaacttctcatcacctctgaatcagctccagaataggatatggctgatgcattgggctctgttcatcttctttaaccatatcaggtacttgaatgctatacagacaaatgcacaccatcttattaggtatctagctactgcagttgttgtcaacaaaaaggagaaggaatatgcttaaagagttgattaaggtcattcaacaggagcaccatagctacaaggatcccgtaactgaatttttggaatgcttatatgttaactatgtagttgtgggcttttgaacaatagctggagtgatatgaaacattagtgatgtagttgtgggcttttgaactgcttcaagcaggagtgatgccgttgtggtgcttttgtgactgatcatctctggagcttttgtgaatgatctagctagctatctataaatgatctagttgtgaatgatattataattgtgatgcttttgtgaatatataattgtggtgcttttgtgtttatg

SEQ ID NO: 40300 - DNA, 2018 bp, Zea Mays
agccgtcgcctctccttgctctgctcctctctctcccaagcggctctccctctatctcctcgtttctctcccctcctcttctacagccgctgccaggcaaccgaccgccgagcagcgcagccacccgagccccacgcccgccgcgccaggaaccagcgcccctgctctcgccaggacgccaggaattgctctttctatagcaagtttatgagttcagtttatattccattgaatatttgttgcagtgaagagaaatgagagaaagccttcggttgtagccttcagtttatattccattgaatatttgttgcatccgactcatctctgtttcgattccatccggtttggctcattttttaatcgagtgtgttgtagttttgtaccctaatgtcgtgggagtgctaccgaagtactgatagcatcactttaatttcattagctccgtcctggcaatcactttgggaaggtggtcagtggaataactttgcttaaaaagcttgaagcagttggtagtgaaactggaaatccttcttatcaagtgaaaattgtagactgtggtgaagtttccaacacaaattctcaggatccgctaaagggagataaagtaagctcaaagacagataacagcagttcagacagtgaaaagggtggccatcgtaccaagcgttccttgacgaaaggcttcaatgcagcagttgctgggtgcttctttgccattgaaactgtattaagacctcttaaagcagaaaattcacctccatttacgactgcaatgataatattggcatctgttatatcatctactgtttcaaatgttttacttggagccagaccagcttttatagtgccagcctatgagctaaaatctgctgccggttggaatggctgctacactagcttcagtctgttcagtcccattgacttcagtactgcttctctttgagctgacaaaggattacaggattttgcttcctctcatgtgaacaagggagaatattgtgaactgaaggtcatgtatcagcgaaaagcaggctttcctcttgtagcaattgtgcactgaaaaactacagtgcccttatgacaccacaatagtcgctcgaatgcaactgtccggcctagcatccaatcgacctcaaccactctgcatcccacgtgtgtgtggagctgatgaacatgtcgatgtgcaaattcctccagctcgagtacttggagattacatagtcttctccattgtttttctagactttgaggttctaagcatgagcaagctgggttatgatggtgttgtggcactgctggttgctgatatatcactttcaatcggtcttgaccagattgaagctctgtatcagtatgcccaatttcagtttgagtgtggtaactactcaggggctgctgattacctttaccagtatggtgctttgtgcacaaacagtgagcgaaatgtgagtgccctctggggaaagctagcagcagaaatcctaatgcagaactgggacctagctttggaggaactcaaccgcttgaaggaaataattgattcaaagctccagaataggatatggctgatgcattgggctctgttcatcttctttaaccatatcaggtacttgaatgctatacagacaaatgcacaccatcttattaggtatctagctactgcagttgttgtcaacaaaaaggagaaggaatatgcttaaagagttgattaaggtcattcaacaggagcaccatagctacaaggatcccgtaactgaatttttggaatgcttatatgttaactatgtagttgtgggcttttgaacaatagctggagtgatatgaaacattagtgatgtagttgtgggcttttgaactgcttcaagcaggagtgatgccgttgtggtgcttttgtgactgatcatctctggagcttttgtgaatgatctagctagctatctataaatgatctagttgtgaatgatattataattgtgatgcttttgtgaatatataattgtggtgcttttgtgtttatg

SEQ ID NO: 40301 - DNA, 1936 bp, Zea Mays
agccgtcgcctctccttgctctgctcctctctctcccaagcggctctccctctatctcctcgtttctctcccctcctcttctacagccgctgccaggcaaccgaccgccgagcagcgcagccacccgagccccacgcccgccgcgccaggaaccagcgcccctgctctcgccaggacgccaggaattgctctttctatagcaagtttatgagttcagtttatattccattgaatatttgttgcagtgaagagaaatgagagaaagccttcggttgtagccttcagtttatattccattgaatatttgttgcatccgactcatctctgtttcgattccatccggtttggctcattttttaatcgagtgtgttgtagttttgtaccctaatgtcgtgggagtgctaccgaagtactgatagcatcactttaatttcattagctccgtcctggcaatcactttgggaaggtggtcagtggaataactttgcttaaaaagcttgaagcagttggtagtgaaactggaaatccttcttatcaagtgaaaattgtagactgtggtgaagtttccaacacaaattctcaggatccgctaaagggagataaagtaagctcaaagacagataacagcagttcagacagtgaaaagggtggccatcgtaccaagcgttccttgacgaaaggcttcaatgcagcagttgctgggtgcttctttgccattgaaactgtattaagacctcttaaagcagaaaattcacctccatttacgactgcaatgataatattggcatctgttatatcatctactgtttcaaatgttttacttggagccagaccagcttttatagtgccagcctatgagctaaaatctgctgccggttggaatggctgctacactagcttcagtctgttcagtcccattgacttcagtactgcttctctttgagctgacaaaggattacaggattttgcttcctctcatgtgaacaagggagaatattgtgaactgaaggtcatgtatcagcgaaaagcaggctttcctcttgtagcaattgtgcactgaaaaactacagtgcccttatgacaccacaatagtaagcaagactacaggacatctatgcgaaatgcagctagccagctacactgatgtagagatcattcaggcaaattcctccagctcgagtacttggagattacatagtcttctccattgtttttctagactttgaggttctaagcatgagcaagctgggttatgatggtgttgtggcactgctggttgctgatatatcactttcaatcggtcttgaccagattgaagctctgtatcagtatgcccaatttcagtttgagtgtggtaactactcaggggctgctgattacctttaccagtatggtgctttgtgcacaaacagtgagcgaaatgtgagtgccctctggggaaagctagcagcagaaatcctaatgcagaactgggacctagctttggaggaactcaaccgcttgaaggaaataattgattcaaaggtacttgaatgctatacagacaaatgcacaccatcttattaggtatctagctactgcagttgttgtcaacaaaaaggagaaggaatatgcttaaagagttgattaaggtcattcaacaggagcaccatagctacaaggatcccgtaactgaatttttggaatgcttatatgttaactatgtagttgtgggcttttgaacaatagctggagtgatatgaaacattagtgatgtagttgtgggcttttgaactgcttcaagcaggagtgatgccgttgtggtgcttttgtgactgatcatctctggagcttttgtgaatgatctagctagctatctataaatgatctagttgtgaatgatattataattgtgatgcttttgtgaatatataattgtggtgcttttgtgtttatg

SEQ ID NO: 40302 - DNA, 2703 bp, Zea Mays
agccgtcgcctctccttgctctgctcctctctctcccaagcggctctccctctatctcctcgtttctctcccctcctcttctacagccgctgccaggcaaccgaccgccgagcagcgcagccacccgagccccacgcccgccgcgccaggaaccagcgcccctgctctcgccaggacgccaggaattgctctttctatagcaagtttatgagttcagtttatattccattgaatatttgttgcagtgaagagaaatgagagaaagccttcggttgtagccttcagtttatattccattgaatatttgttgcatccgactcatctctgtttcgattccatccggtttggctcattttttaatcgagtgtgttgtagttttgtaccctaatgtcgtgggagtgctaccgaagtactgatagcatcactttaatttcattagctccgtcctggcaatcactttgggaaggtggtcagtggaataactttgcttaaaaagcttgaagcagttggtagtgaaactggaaatccttcttatcaagtgaaaattgtagactgtggtgaagtttccaacacaaattctcaggatccgctaaagggagataaagtaagctcaaagacagataacagcagttcagacagtgaaaagggtggccatcgtaccaagcgttccttgacgaaaggcttcaatgcagcagttgctgggtgcttctttgccattgaaactgtattaagacctcttaaagcagaaaattcacctccatttacgactgcaatgataatattggcatctgttatatcatctactgtttcaaatgttttacttggagccagaccagcttttatagtgccagcctatgagctaaaatctgctgccggttggaatggctgctacactagcttcagtctgttcagtcccattgacttcagtactgcttctctttgagctgacaaaggattacaggattttgcttcctctcatgtgaacaagggagaatattgtgaactgaaggtcatgtatcagcgaaaagcaggctttcctcttgtagcaattgtgcactgaaaaactacagtgcccttatgacaccacaatagtaagcaagactacaggacatctatgcgaaatgcagctagccagctacactgatgtagagatcattcaggcagtttaacctctatactgtatcattttaatttaaccagctatttcactactgccttttatagtgtttaggttataaccaatgacatctattagagtttataatttaaactcattgattgaaaaacatttagttgtgatgtcactaaaaggtgaaataaatttcttatagtgtgcattattatccctttttcatttctaagtaaaattcttaacaacttctgtaataataatgattggatttatgaatgttgtttgcactaacatctggtctaatttcattattcttgaacttcttttgtgcccatgcttcattacacatgtaggtcgctcgaatgcaactgtccggcctagcatccaatcgacctcaaccactctgcatcccacgtgtgtgtggagctgatgaacatgtcgatgtgtactgattttttctcatatgtttctagccatgctttaattgattctttgtcaaattgtgcaacttgtgcaaaccatatgattacttggtattattgctttgatatggacatccagaaaaatattcaacttcgaatatctttggctttagtgactagtgactgatgtactttagcgtatccactaaaaaccatgaaagtctaggtatgtgtcatttggcattaggttttgtgatgtaacacttgactcaacatcctctaatatgtatatctgttttgacattatattttttcacatgactaacctttgggcatctctgttttcatattaccaatacaccaatgatgttaggcaaattcctccagctcgagtacttggagattacatagtcttctccattgtttttctagactttgaggttctaagcatgagcaagctgggttatgatggtgttgtggcactgctggttgctgatatatcactttcaatcggtcttgaccagattgaagctctgtatcagtatgcccaatttcagtttgagtgtggtaactactcaggggctgctgattacctttaccagtatggtgctttgtgcacaaacagtgagcgaaatgtgagtgccctctggggaaagctagcagcagaaatcctaatgcagaactgggacctagctttggaggaactcaaccgcttgaaggaaataattgattcaaaggtacttgaatgctatacagacaaatgcacaccatcttattaggtatctagctactgcagttgttgtcaacaaaaaggagaaggaatatgcttaaagagttgattaaggtcattcaacaggagcaccatagctacaaggatcccgtaactgaatttttggaatgcttatatgttaactatgtagttgtgggcttttgaacaatagctggagtgatatgaaacattagtgatgtagttgtgggcttttgaactgcttcaagcaggagtgatgccgttgtggtgcttttgtgactgatcatctctggagcttttgtgaatgatctagctagctatctataaatgatctagttgtgaatgatattataattgtgatgcttttgtgaatatataattgtggtgcttttgtgtttatg

SEQ ID NO: 40303 - DNA, 2525 bp, Zea Mays
agccgtcgcctctccttgctctgctcctctctctcccaagcggctctccctctatctcctcgtttctctcccctcctcttctacagccgctgccaggcaaccgaccgccgagcagcgcagccacccgagccccacgcccgccgcgccaggaaccagcgcccctgctctcgccaggacgccaggaattgctctttctatagcaagtttatgactccgtcctggcaatcactttgggaaggtggtcagtggaataactttgcttaaaaagcttgaagcagttggtagtgaaactggaaatccttcttatcaagtgaaaattgtagactgtggtgaagtttccaacacaaattctcaggatccgctaaagggagataaagtaagctcaaagacagataacagcagttcagacagtgaaaagggtggccatcgtaccaagcgttccttgacgaaaggtgagctctagaatgttgagccttggcgctctcaccacatttgattacttggggattgagtaaccgggaaaggcgtattgcacttgttgctgctggcgctgctgctggcattgcttcaggcttcaatgcagcagttgctgggtgcttctttgccattgaaactgtattaagacctcttaaagcagaaaattcacctccatttacgactgcaatgataatattggcatctgttatatcatctactgtttcaaatgttttacttggagccagaccagcttttatagtgccagcctatgagctaaaatctgctgccggttggaatggctgctacactagcttcagtctgttcagtcccattgacttcagtactgcttctctttgagctgacaaaggattacaggattttgcttcctctcatgtgaacaagggagaatattgtgaactgaaggtcatgtatcagcgaaaagcaggctttcctcttgtagcaattgtgcactgaaaaactacagtgcccttatgacaccacaatagtaagcaagactacaggacatctatgcgaaatgcagctagccagctacactgatgtagagatcattcaggcagtttaacctctatactgtatcattttaatttaaccagctatttcactactgccttttatagtgtttaggttataaccaatgacatctattagagtttataatttaaactcattgattgaaaaacatttagttgtgatgtcactaaaaggtgaaataaatttcttatagtgtgcattattatccctttttcatttctaagtaaaattcttaacaacttctgtaataataatgattggatttatgaatgttgtttgcactaacatctggtctaatttcattattcttgaacttcttttgtgcccatgcttcattacacatgtaggtcgctcgaatgcaactgtccggcctagcatccaatcgacctcaaccactctgcatcccacgtgtgtgtggagctgatgaacatgtcgatgtgtactgattttttctcatatgtttctagccatgctttaattgattctttgtcaaattgtgcaacttgtgcaaaccatatgattacttggtattattgctttgatatggacatccagaaaaatattcaacttcgaatatctttggctttagtgactagtgactgatgtactttagcgtatccactaaaaaccatgaaagtctaggtatgtgtcatttggcattaggttttgtgatgtaacacttgactcaacatcctctaatatgtatatctgttttgacattatattttttcacatgactaacctttgggcatctctgttttcatattaccaatacaccaatgatgttaggcaaattcctccagctcgagtacttggagattacatagtcttctccattgtttttctagactttgagatcggtcttgaccagattgaagctctgtatcagtatgcccaatttcagtttgagtgtggtaactactcaggggctgctgattacctttaccagtatggtgctttgtgcacaaacagtgagcgaaatgtgagtgccctctggggaaagctagcagcagaaatcctaatgcagaactgggacctagctttggaggaactcaaccgcttgaaggaaataattgattcaaaggtacttgaatgctatacagacaaatgcacaccatcttattaggtatctagctactgcagttgttgtcaacaaaaaggagaaggaatatgcttaaagagttgattaaggtcattcaacaggagcaccatagctacaaggatcccgtaactgaatttttggaatgcttatatgttaactatgtagttgtgggcttttgaacaatagctggagtgatatgaaacattagtgatgtagttgtgggcttttgaactgcttcaagcaggagtgatgccgttgtggtgcttttgtgactgatcatctctggagcttttgtgaatgatctagctagctatctataaatgatctagttgtgaatgatattataattgtgatgcttttgtgaatatataattgtggtgcttttgtgtttatg

SEQ ID NO: 40304 - DNA, 2158 bp, Zea Mays
agccgtcgcctctccttgctctgctcctctctctcccaagcggctctccctctatctcctcgtttctctcccctcctcttctacagccgctgccaggcaaccgaccgccgagcagcgcagccacccgagccccacgcccgccgcgccaggaaccagcgcccctgctctcgccaggacgccaggaattgctctttctatagcaagtttatgagttcagtttatattccattgaatatttgttgcagtgaagagaaatgagagaaagccttcggttgtagccttcagtttatattccattgaatatttgttgcatccgactcatctctgtttcgattccatccggtttggctcattttttaatcgagtgtgttgtagttttgtaccctaatgtcgtgggagtgctaccgaagtactgatagcatcactttaatttcattagctccgtcctggcaatcactttgggaaggtggtcagtggaataactttgcttaaaaagcttgaagcagttggtagtgaaactggaaatccttcttatcaagtgaaaattgtagactgtggtgaagtttccaacacaaattctcaggatccgctaaagggagataaagtaagctcaaagacagataacagcagttcagacagtgaaaagggtggccatcgtaccaagcgttccttgacgaaaggttggaatggctgctacactagcttcagtctgttcagtcccattgacttcagtactgcttctctttgagctgacaaaggattacaggattttgcttcctctcatgtgaacaagggagaatattgtgaactgaaggtcatgtatcagcgaaaagcaggctttcctcttgtagcaattgtgcactgaaaaactacagtgcccttatgacaccacaatagtaagcaagactacaggacatctatgcgaaatgcagctagccagctacactgatgtagagatcattcaggcagtttaacctctatactgtatcattttaatttaaccagctatttcactactgccttttatagtgtttaggttataaccaatgacatctattagagtttataatttaaactcattgattgaaaaacatttagttgtgatgtcactaaaaggtgaaataaatttcttatagtgtgcattattatccctttttcatttctaagtaaaattcttaacaacttctgtaataataatgattggatttatgaatgttgtttgcactaacatctggtctaatttcattattcttgaacttcttttgtgcccatgcttcattacacatgtaggtcgctcgaatgcaactgtccggcctagcatccaatcgacctcaaccactctgcatcccacgtgtgtgtggagctgatgaacatgtcgatgtgcaaattcctccagctcgagtacttggagattacatagtcttctccattgtttttctagactttgaggttctaagcatgagcaagctgggttatgatggtgttgtggcactgctggttgctgatatatcactttcaatcggtcttgaccagattgaagctctgtatcagtatgcccaatttcagtttgagtgtggtaactactcaggggctgctgattacctttaccagtatggtgctttgtgcacaaacagtgagcgaaatgtgagtgccctctggggaaagctagcagcagaaatcctaatgcagaactgggacctagctttggaggaactcaaccgcttgaaggaaataattgattcaaaggtacttgaatgctatacagacaaatgcacaccatcttattaggtatctagctactgcagttgttgtcaacaaaaaggagaaggaatatgcttaaagagttgattaaggtcattcaacaggagcaccatagctacaaggatcccgtaactgaatttttggaatgcttatatgttaactatgtagttgtgggcttttgaacaatagctggagtgatatgaaacattagtgatgtagttgtgggcttttgaactgcttcaagcaggagtgatgccgttgtggtgcttttgtgactgatcatctctggagcttttgtgaatgatctagctagctatctataaatgatctagttgtgaatgatattataattgtgatgcttttgtgaatatataattgtggtgcttttgtgtttatg

SEQ ID NO: 40305 - DNA, 2218 bp, Zea Mays
agccgtcgcctctccttgctctgctcctctctctcccaagcggctctccctctatctcctcgtttctctcccctcctcttctacagccgctgccaggcaaccgaccgccgagcagcgcagccacccgagccccacgcccgccgcgccaggaaccagcgcccctgctctcgccaggacgccaggaattgctctttctatagcaagtttatgagttcagtttatattccattgaatatttgttgcagtgaagagaaatgagagaaagccttcggttgtagccttcagtttatattccattgaatatttgttgcatccgactcatctctgtttcgattccatccggtttggctcattttttaatcgagtgtgttgtagttttgtaccctaatgtcgtgggagtgctaccgaagtactgatagcatcactttaatttcattagctccgtcctggcaatcactttgggaaggtggtcagtggaataactttgcttaaaaagcttgaagcagttggtagtgaaactggaaatccttcttatcaagtgaaaattgtagactgtggtgaagtttccaacacaaattctcaggatccgctaaagggagataaagtaagctcaaagacagataacagcagttcagacagtgaaaagggtggccatcgtaccaagcgttccttgacgaaaggcttcaatgcagcagttgctgggtgcttctttgccattgaaactgtattaagacctcttaaagcagaaaattcacctccatttacgactgcaatgataatattggcatctgttatatcatctactgtttcaaatgttttacttggagccagaccagcttttatagtgccagcctatgagctaaaatctgctgccggtagctgttctgatcttttcttacagtaacgttggaatggctgctacactagcttcagtctgttcagtcccattgacttcagtactgcttctctttgagctgacaaaggattacaggattttgcttcctctcatggtcgctcgaatgcaactgtccggcctagcatccaatcgacctcaaccactctgcatcccacgtgtgtgtggagctgatgaacatgtcgatgtgtactgattttttctcatatgtttctagccatgctttaattgattctttgtcaaattgtgcaacttgtgcaaaccatatgattacttggtattattgctttgatatggacatccagaaaaatattcaacttcgaatatctttggctttagtgactagtgactgatgtactttagcgtatccactaaaaaccatgaaagtctaggtatgtgtcatttggcattaggttttgtgatgtaacacttgactcaacatcctctaatatgtatatctgttttgacattatattttttcacatgactaacctttgggcatctctgttttcatattaccaatacaccaatgatgttaggcaaattcctccagctcgagtacttggagattacatagtcttctccattgtttttctagactttgagatcggtcttgaccagattgaagctctgtatcagtatgcccaatttcagtttgagtgtggtaactactcaggggctgctgattacctttaccagtatggtgctttgtgcacaaacagtgagcgaaatgtgagtgccctctggggaaagctagcagcagaaatcctaatgcagaactgggacctagctttggaggaactcaaccgcttgaaggaaataattgattcaaagctccagaataggatatggctgatgcattgggctctgttcatcttctttaaccatatcaggtacttgaatgctatacagacaaatgcacaccatcttattaggtatctagctactgcagttgttgtcaacaaaaaggagaaggaatatgcttaaagagttgattaaggtcattcaacaggagcaccatagctacaaggatcccgtaactgaatttttggaatgcttatatgttaactatgtagttgtgggcttttgaacaatagctggagtgatatgaaacattagtgatgtagttgtgggcttttgaactgcttcaagcaggagtgatgccgttgtggtgcttttgtgactgatcatctctggagcttttgtgaatgatctagctagctatctataaatgatctagttgtgaatgatattataattgtgatgcttttgtgaatatataattgtggtgcttttgtgtttatg

SEQ ID NO: 40306 - DNA, 2198 bp, Zea Mays
agccgtcgcctctccttgctctgctcctctctctcccaagcggctctccctctatctcctcgtttctctcccctcctcttctacagccgctgccaggcaaccgaccgccgagcagcgcagccacccgagccccacgcccgccgcgccaggaaccagcgcccctgctctcgccaggacgccaggaattgctctttctatagcaagtttatgagttcagtttatattccattgaatatttgttgcagtgaagagaaatgagagaaagccttcggttgtagccttcagtttatattccattgaatatttgttgcatccgactcatctctgtttcgattccatccggtttggctcattttttaatcgagtgtgttgtagttttgtaccctaatgtcgtgggagtgctaccgaagtactgatagcatcactttaatttcattagctccgtcctggcaatcactttgggaaggtggtcagtggaataactttgcttaaaaagcttgaagcagttggtagtgaaactggaaatccttcttatcaagtgaaaattgtagactgtggtgaagtttccaacacaaattctcaggatccgctaaagggagataaagtaagctcaaagacagataacagcagttcagacagtgaaaagggtggccatcgtaccaagcgttccttgacgaaaggcttcaatgcagcagttgctgggtgcttctttgccattgaaactgtattaagacctcttaaagcagaaaattcacctccatttacgactgcaatgataatattggcatctgttatatcatctactgtttcaaatgttttacttggagccagaccagcttttatagtgccagcctatgagctaaaatctgctgccggttggaatggctgctacactagcttcagtctgttcagtcccattgacttcagtactgcttctctttgagctgacaaaggattacaggattttgcttcctctcatggtcgctcgaatgcaactgtccggcctagcatccaatcgacctcaaccactctgcatcccacgtgtgtgtggagctgatgaacatgtcgatgtgtactgattttttctcatatgtttctagccatgctttaattgattctttgtcaaattgtgcaacttgtgcaaaccatatgattacttggtattattgctttgatatggacatccagaaaaatattcaacttcgaatatctttggctttagtgactagtgactgatgtactttagcgtatccactaaaaaccatgaaagtctaggtatgtgtcatttggcattaggttttgtgatgtaacacttgactcaacatcctctaatatgtatatctgttttgacattatattttttcacatgactaacctttgggcatctctgttttcatattaccaatacaccaatgatgttaggcaaattcctccagctcgagtacttggagattacatagtcttctccattgtttttctagactttgaggttctaagcatgagcaagctgggttatgatggtgttgtggcactgctggttgctgatatatcactttcaatcggtcttgaccagattgaagctctgtatcagtatgcccaatttcagtttgagtgtggtaactactcaggggctgctgattacctttaccagtatggtgctttgtgcacaaacagtgagcgaaatgtgagtgccctctggggaaagctagcagcagaaatcctaatgcagaactgggacctagctttggaggaactcaaccgcttgaaggaaataattgattcaaaggtacttgaatgctatacagacaaatgcacaccatcttattaggtatctagctactgcagttgttgtcaacaaaaaggagaaggaatatgcttaaagagttgattaaggtcattcaacaggagcaccatagctacaaggatcccgtaactgaatttttggaatgcttatatgttaactatgtagttgtgggcttttgaacaatagctggagtgatatgaaacattagtgatgtagttgtgggcttttgaactgcttcaagcaggagtgatgccgttgtggtgcttttgtgactgatcatctctggagcttttgtgaatgatctagctagctatctataaatgatctagttgtgaatgatattataattgtgatgcttttgtgaatatataattgtggtgcttttgtgtttatg

SEQ ID NO: 40307 - DNA, 2180 bp, Zea Mays
agccgtcgcctctccttgctctgctcctctctctcccaagcggctctccctctatctcctcgtttctctcccctcctcttctacagccgctgccaggcaaccgaccgccgagcagcgcagccacccgagccccacgcccgccgcgccaggaaccagcgcccctgctctcgccaggacgccaggaattgctctttctatagcaagtttatgagttcagtttatattccattgaatatttgttgcagtgaagagaaatgagagaaagccttcggttgtagccttcagtttatattccattgaatatttgttgcatccgactcatctctgtttcgattccatccggtttggctcattttttaatcgagtgtgttgtagttttgtaccctaatgtcgtgggagtgctaccgaagtactgatagcatcactttaatttcattagctccgtcctggcaatcactttgggaaggtggtcagtggaataactttgcttaaaaagcttgaagcagttggtagtgaaactggaaatccttcttatcaagtgaaaattgtagactgtggtgaagtttccaacacaaattctcaggatccgctaaagggagataaagtaagctcaaagacagataacagcagttcagacagtgaaaagggtggccatcgtaccaagcgttccttgacgaaaggtgagctctagaatgttgagccttggcgctctcaccacatttgattacttggggattgagtaaccgggaaaggcgtattgcacttgttgctgctggcgctgctgctggcattgcttcaggcttcaatgcagcagttgctgggtgcttctttgccattgaaactgtattaagacctcttaaagcagaaaattcacctccatttacgactgcaatgataatattggcatctgttatatcatctactgtttcaaatgttttacttggagccagaccagcttttatagtgccagcctatgagctaaaatctgctgccggttggaatggctgctacactagcttcagtctgttcagtcccattgacttcagtactgcttctctttgagctgacaaaggattacaggattttgcttcctctcatgtgaacaagggagaatattgtgaactgaaggtcatgtatcagcgaaaagcaggctttcctcttgtagcaattgtgcactgaaaaactacagtgcccttatgacaccacaatagtcgctcgaatgcaactgtccggcctagcatccaatcgacctcaaccactctgcatcccacgtgtgtgtggagctgatgaacatgtcgatgtgttctaagcatgagcaagctgggttatgatggtgttgtggcactgctggttgctgatatatcactttcaatcggtcttgaccagattgaagctctgtatcagtatgcccaatttcagtttgagtgtggtaactactcaggggctgctgattacctttaccagtatggtgctttgtgcacaaacagtgagcgaaatgtgagtgccctctggggaaagctagcagcagaaatcctaatgcagaactgggacctagctttggaggaactcaaccgcttgaaggaaataattgattcaaaggttctaacttcaatgttttgttctgtgttctttgttctttgtgtacactatatcaccaatcatgttccttcctgatctttgggtagaacttctcatcacctctgaatcagctccagaataggatatggctgatgcattgggctctgttcatcttctttaaccatatcaggtacttgaatgctatacagacaaatgcacaccatcttattaggtatctagctactgcagttgttgtcaacaaaaaggagaaggaatatgcttaaagagttgattaaggtcattcaacaggagcaccatagctacaaggatcccgtaactgaatttttggaatgcttatatgttaactatgtagttgtgggcttttgaacaatagctggagtgatatgaaacattagtgatgtagttgtgggcttttgaactgcttcaagcaggagtgatgccgttgtggtgcttttgtgactgatcatctctggagcttttgtgaatgatctagctagctatctataaatgatctagttgtgaatgatattataattgtgatgcttttgtgaatatataattgtggtgcttttgtgtttatg

SEQ ID NO: 40308 - DNA, 2392 bp, Zea Mays
agccgtcgcctctccttgctctgctcctctctctcccaagcggctctccctctatctcctcgtttctctcccctcctcttctacagccgctgccaggcaaccgaccgccgagcagcgcagccacccgagccccacgcccgccgcgccaggaaccagcgcccctgctctcgccaggacgccaggaattgctctttctatagcaagtttatgagttcagtttatattccattgaatatttgttgcagtgaagagaaatgagagaaagccttcggttgtagccttcagtttatattccattgaatatttgttgcatccgactcatctctgtttcgattccatccggtttggctcattttttaatcgagtgtgttgtagttttgtaccctaatgtcgtgggagtgctaccgaagtactgatagcatcactttaatttcattagctccgtcctggcaatcactttgggaaggtggtcagtggaataactttgcttaaaaagcttgaagcagttggtagtgaaactggaaatccttcttatcaagtgaaaattgtagactgtggtgaagtttccaacacaaattctcaggatccgctaaagggagataaagtaagctcaaagacagataacagcagttcagacagtgaaaagggtggccatcgtaccaagcgttccttgacgaaaggcttcaatgcagcagttgctgggtgcttctttgccattgaaactgtattaagacctcttaaagcagaaaattcacctccatttacgactgcaatgataatattggcatctgttatatcatctactgtttcaaatgttttacttggagccagaccagcttttatagtgccagcctatgagctaaaatctgctgccggttggaatggctgctacactagcttcagtctgttcagtcccattgacttcagtactgcttctctttgagctgacaaaggattacaggattttgcttcctctcatgtgaacaagggagaatattgtgaactgaaggtcatgtatcagcgaaaagcaggctttcctcttgtagcaattgtgcactgaaaaactacagtgcccttatgacaccacaatagtcgctcgaatgcaactgtccggcctagcatccaatcgacctcaaccactctgcatcccacgtgtgtgtggagctgatgaacatgtcgatgtgtactgattttttctcatatgtttctagccatgctttaattgattctttgtcaaattgtgcaacttgtgcaaaccatatgattacttggtattattgctttgatatggacatccagaaaaatattcaacttcgaatatctttggctttagtgactagtgactgatgtactttagcgtatccactaaaaaccatgaaagtctaggtatgtgtcatttggcattaggttttgtgatgtaacacttgactcaacatcctctaatatgtatatctgttttgacattatattttttcacatgactaacctttgggcatctctgttttcatattaccaatacaccaatgatgttaggcaaattcctccagctcgagtacttggagattacatagtcttctccattgtttttctagactttgaggttctaagcatgagcaagctgggttatgatggtgttgtggcactgctggttgctgatatatcactttcaatcggtcttgaccagattgaagctctgtatcagtatgcccaatttcagtttgagtgtggtaactactcaggggctgctgattacctttaccagtatggtgctttgtgcacaaacagtgagcgaaatgtgagtgccctctggggaaagctagcagcagaaatcctaatgcagaactgggacctagctttggaggaactcaaccgcttgaaggaaataattgattcaaagaacttctcatcacctctgaatcagctccagaataggatatggctgatgcattgggctctgttcatcttctttaaccatatcaggtacttgaatgctatacagacaaatgcacaccatcttattaggtatctagctactgcagttgttgtcaacaaaaaggagaaggaatatgcttaaagagttgattaaggtcattcaacaggagcaccatagctacaaggatcccgtaactgaatttttggaatgcttatatgttaactatgtagttgtgggcttttgaacaatagctggagtgatatgaaacattagtgatgtagttgtgggcttttgaactgcttcaagcaggagtgatgccgttgtggtgcttttgtgactgatcatctctggagcttttgtgaatgatctagctagctatctataaatgatctagttgtgaatgatattataattgtgatgcttttgtgaatatataattgtggtgcttttgtgtttatg

SEQ ID NO: 40309 - DNA, 2407 bp, Zea Mays
agccgtcgcctctccttgctctgctcctctctctcccaagcggctctccctctatctcctcgtttctctcccctcctcttctacagccgctgccaggcaaccgaccgccgagcagcgcagccacccgagccccacgcccgccgcgccaggaaccagcgcccctgctctcgccaggacgccaggaattgctctttctatagcaagtttatgagttcagtttatattccattgaatatttgttgcagtgaagagaaatgagagaaagccttcggttgtagccttcagtttatattccattgaatatttgttgcatccgactcatctctgtttcgattccatccggtttggctcattttttaatcgagtgtgttgtagttttgtaccctaatgtcgtgggagtgctaccgaagtactgatagcatcactttaatttcattagctccgtcctggcaatcactttgggaaggtggtcagtggaataactttgcttaaaaagcttgaagcagttggtagtgaaactggaaatccttcttatcaagtgaaaattgtagactgtggtgaagtttccaacacaaattctcaggatccgctaaagggagataaagtaagctcaaagacagataacagcagttcagacagtgaaaagggtggccatcgtaccaagcgttccttgacgaaaggcttcaatgcagcagttgctgggtgcttctttgccattgaaactgtattaagacctcttaaagcagaaaattcacctccatttacgactgcaatgataatattggcatctgttatatcatctactgtttcaaatgttttacttggagccagaccagcttttatagtgccagcctatgagctaaaatctgctgccggttggaatggctgctacactagcttcagtctgttcagtcccattgacttcagtactgcttctctttgagctgacaaaggattacaggattttgcttcctctcatgtgaacaagggagaatattgtgaactgaaggtcatgtatcagcgaaaagcaggctttcctcttgtagcaattgtgcactgaaaaactacagtgcccttatgacaccacaatagtaagcaagactacaggacatctatgcgaaatgcagctagccagctacactgatgtagagatcattcaggcagtttaacctctatactgtatcattttaatttaaccagctatttcactactgccttttatagtgtttaggttataaccaatgacatctattagagtttataatttaaactcattgattgaaaaacatttagttgtgatgtcactaaaaggtgaaataaatttcttatagtgtgcattattatccctttttcatttctaagtaaaattcttaacaacttctgtaataataatgattggatttatgaatgttgtttgcactaacatctggtctaatttcattattcttgaacttcttttgtgcccatgcttcattacacatgtaggtcgctcgaatgcaactgtccggcctagcatccaatcgacctcaaccactctgcatcccacgtgcaaattcctccagctcgagtacttggagattacatagtcttctccattgtttttctagactttgaggttctaagcatgagcaagctgggttatgatggtgttgtggcactgctggttgctgatatatcactttcaatcggtcttgaccagattgaagctctgtatcagtatgcccaatttcagtttgagtgtggtaactactcaggggctgctgattacctttaccagtatggtgctttgtgcacaaacagtgagcgaaatgtgagtgccctctggggaaagctagcagcagaaatcctaatgcagaactgggacctagctttggaggaactcaaccgcttgaaggaaataattgattcaaagaacttctcatcacctctgaatcagctccagaataggatatggctgatgcattgggctctgttcatcttctttaaccatatcaggtacttgaatgctatacagacaaatgcacaccatcttattaggtatctagctactgcagttgttgtcaacaaaaaggagaaggaatatgcttaaagagttgattaaggtcattcaacaggagcaccatagctacaaggatcccgtaactgaatttttggaatgcttatatgttaactatgtagttgtgggcttttgaacaatagctggagtgatatgaaacattagtgatgtagttgtgggcttttgaactgcttcaagcaggagtgatgccgttgtggtgcttttgtgactgatcatctctggagcttttgtgaatgatctagctagctatctataaatgatctagttgtgaatgatattataattgtgatgcttttgtgaatatataattgtggtgcttttgtgtttatg

SEQ ID NO: 40310 - DNA, 2353 bp, Zea Mays
agccgtcgcctctccttgctctgctcctctctctcccaagcggctctccctctatctcctcgtttctctcccctcctcttctacagccgctgccaggcaaccgaccgccgagcagcgcagccacccgagccccacgcccgccgcgccaggaaccagcgcccctgctctcgccaggacgccaggaattgctctttctatagcaagtttatgagttcagtttatattccattgaatatttgttgcagtgaagagaaatgagagaaagccttcggttgtagccttcagtttatattccattgaatatttgttgcatccgactcatctctgtttcgattccatccggtttggctcattttttaatcgagtgtgttgtagttttgtaccctaatgtcgtgggagtgctaccgaagtactgatagcatcactttaatttcattagctccgtcctggcaatcactttgggaaggtggtcagtggaataactttgcttaaaaagcttgaagcagttggtagtgaaactggaaatccttcttatcaagtgaaaattgtagactgtggtgaagtttccaacacaaattctcaggatccgctaaagggagataaagtaagctcaaagacagataacagcagttcagacagtgaaaagggtggccatcgtaccaagcgttccttgacgaaaggcttcaatgcagcagttgctgggtgcttctttgccattgaaactgtattaagacctcttaaagcagaaaattcacctccatttacgactgcaatgataatattggcatctgttatatcatctactgtttcaaatgttttacttggagccagaccagcttttatagtgccagcctatgagctaaaatctgctgccggttggaatggctgctacactagcttcagtctgttcagtcccattgacttcagtactgcttctctttgagctgacaaaggattacaggattttgcttcctctcatgtgaacaagggagaatattgtgaactgaaggtcatgtatcagcgaaaagcaggctttcctcttgtagcaattgtgcactgaaaaactacagtgcccttatgacaccacaatagtaagcaagactacaggacatctatgcgaaatgcagctagccagctacactgatgtagagatcattcaggcagtttaacctctatactgtatcattttaatttaaccagctatttcactactgccttttatagtgtttaggttataaccaatgacatctattagagtttataatttaaactcattgattgaaaaacatttagttgtgatgtcactaaaaggtgaaataaatttcttatagtgtgcattattatccctttttcatttctaagtaaaattcttaacaacttctgtaataataatgattggatttatgaatgttgtttgcactaacatctggtctaatttcattattcttgaacttcttttgtgcccatgcttcattacacatgtaggtcgctcgaatgcaactgtccggcctagcatccaatcgacctcaaccactctgcatcccacgtgtgtgtggagctgatgaacatgtcgatgtgcaaattcctccagctcgagtacttggagattacatagtcttctccattgtttttctagactttgaggttctaagcatgagcaagctgggttatgatggtgttgtggcactgctggttgctgatatatcactttcaatcggtcttgaccagattgaagctctgtatcagtatgcccaatttcagtttgagtgtggtaactactcaggggctgctgattacctttaccagtatggtgctttgtgcacaaacagtgagcgaaatgtgagtgccctctggggaaagctagcagcagaaatcctaatgcagaactgggacctagctttggaggaactcaaccgcttgaaggaaataattgattcaaaggtacttgaatgctatacagacaaatgcacaccatcttattaggtatctagctactgcagttgttgtcaacaaaaaggagaaggaatatgcttaaagagttgattaaggtcattcaacaggagcaccatagctacaaggatcccgtaactgaatttttggaatgcttatatgttaactatgtagttgtgggcttttgaacaatagctggagtgatatgaaacattagtgatgtagttgtgggcttttgaactgcttcaagcaggagtgatgccgttgtggtgcttttgtgactgatcatctctggagcttttgtgaatgatctagctagctatctataaatgatctagttgtgaatgatattataattgtgatgcttttgtgaatatataattgtggtgcttttgtgtttatg

SEQ ID NO: 40311 - DNA, 2905 bp, Zea Mays
agccgtcgcctctccttgctctgctcctctctctcccaagcggctctccctctatctcctcgtttctctcccctcctcttctacagccgctgccaggcaaccgaccgccgagcagcgcagccacccgagccccacgcccgccgcgccaggaaccagcgcccctgctctcgccaggacgccaggaattgctctttctatagcaagtttatgagttcagtttatattccattgaatatttgttgcagtgaagagaaatgagagaaagccttcggttgtagccttcagtttatattccattgaatatttgttgcatccgactcatctctgtttcgattccatccggtttggctcattttttaatcgagtgtgttgtagttttgtaccctaatgtcgtgggagtgctaccgaagtactgatagcatcactttaatttcattagctccgtcctggcaatcactttgggaaggtggtcagtggaataactttgcttaaaaagcttgaagcagttggtagtgaaactggaaatccttcttatcaagtgaaaattgtagactgtggtgaagtttccaacacaaattctcaggatccgctaaagggagataaagtaagctcaaagacagataacagcagttcagacagtgaaaagggtggccatcgtaccaagcgttccttgacgaaaggtgagctctagaatgttgagccttggcgctctcaccacatttgattacttggggattgagtaaccgggaaaggcgtattgcacttgttgctgctggcgctgctgctggcattgcttcaggcttcaatgcagcagttgctgggtgcttctttgccattgaaactgtattaagacctcttaaagcagaaaattcacctccatttacgactgcaatgataatattggcatctgttatatcatctactgtttcaaatgttttacttggagccagaccagcttttatagtgccagcctatgagctaaaatctgctgccggttggaatggctgctacactagcttcagtctgttcagtcccattgacttcagtactgcttctctttgagctgacaaaggattacaggattttgcttcctctcatgtgaacaagggagaatattgtgaactgaaggtcatgtatcagcgaaaagcaggctttcctcttgtagcaattgtgcactgaaaaactacagtgcccttatgacaccacaatagtaagcaagactacaggacatctatgcgaaatgcagctagccagctacactgatgtagagatcattcaggcagtttaacctctatactgtatcattttaatttaaccagctatttcactactgccttttatagtgtttaggttataaccaatgacatctattagagtttataatttaaactcattgattgaaaaacatttagttgtgatgtcactaaaaggtgaaataaatttcttatagtgtgcattattatccctttttcatttctaagtaaaattcttaacaacttctgtaataataatgattggatttatgaatgttgtttgcactaacatctggtctaatttcattattcttgaacttcttttgtgcccatgcttcattacacatgtaggtcgctcgaatgcaactgtccggcctagcatccaatcgacctcaaccactctgcatcccacgtgtgtgtggagctgatgaacatgtcgatgtgtactgattttttctcatatgtttctagccatgctttaattgattctttgtcaaattgtgcaacttgtgcaaaccatatgattacttggtattattgctttgatatggacatccagaaaaatattcaacttcgaatatctttggctttagtgactagtgactgatgtactttagcgtatccactaaaaaccatgaaagtctaggtatgtgtcatttggcattaggttttgtgatgtaacacttgactcaacatcctctaatatgtatatctgttttgacattatattttttcacatgactaacctttgggcatctctgttttcatattaccaatacaccaatgatgttaggcaaattcctccagctcgagtacttggagattacatagtcttctccattgtttttctagactttgaggttctaagcatgagcaagctgggttatgatggtgttgtggcactgctggttgctgatatatcactttcaatcggtcttgaccagattgaagctctgtatcagtatgcccaatttcagtttgagtgtggtaactactcaggggctgctgattacctttaccagtatggtgctttgtgcacaaacagtgagcgaaatgtgagtgccctctggggaaagctagcagcagaaatcctaatgcagaactgggacctagctttggaggaactcaaccgcttgaaggaaataattgattcaaagaacttctcatcacctctgaatcagctccagaataggatatggctgatgcattgggctctgttcatcttctttaaccatatcaggtacttgaatgctatacagacaaatgcacaccatcttattaggtatctagctactgcagttgttgtcaacaaaaaggagaaggaatatgcttaaagagttgattaaggtcattcaacaggagcaccatagctacaaggatcccgtaactgaatttttggaatgcttatatgttaactatgtagttgtgggcttttgaacaatagctggagtgatatgaaacattagtgatgtagttgtgggcttttgaactgcttcaagcaggagtgatgccgttgtggtgcttttgtgactgatcatctctggagcttttgtgaatgatctagctagctatctataaatgatctagttgtgaatgatattataattgtgatgcttttgtgaatatataattgtggtgcttttgtgtttatg

SEQ ID NO: 40312 - DNA, 2670 bp, Zea Mays
agccgtcgcctctccttgctctgctcctctctctcccaagcggctctccctctatctcctcgtttctctcccctcctcttctacagccgctgccaggcaaccgaccgccgagcagcgcagccacccgagccccacgcccgccgcgccaggaaccagcgcccctgctctcgccaggacgccaggaattgctctttctatagcaagtttatgagttcagtttatattccattgaatatttgttgcagtgaagagaaatgagagaaagccttcggttgtagccttcagtttatattccattgaatatttgttgcatccgactcatctctgtttcgattccatccggtttggctcattttttaatcgagtgtgttgtagttttgtaccctaatgtcgtgggagtgctaccgaagtactgatagcatcactttaatttcattagctccgtcctggcaatcactttgggaaggtggtcagtggaataactttgcttaaaaagcttgaagcagttggtagtgaaactggaaatccttcttatcaagtgaaaattgtagactgtggtgaagtttccaacacaaattctcaggatccgctaaagggagataaagtaagctcaaagacagataacagcagttcagacagtgaaaagggtggccatcgtaccaagcgttccttgacgaaaggcttcaatgcagcagttgctgggtgcttctttgccattgaaactgtattaagacctcttaaagcagaaaattcacctccatttacgactgcaatgataatattggcatctgttatatcatctactgtttcaaatgttttacttggagccagaccagcttttatagtgccagcctatgagctaaaatctgctgccggttggaatggctgctacactagcttcagtctgttcagtcccattgacttcagtactgcttctctttgagctgacaaaggattacaggattttgcttcctctcatgtgaacaagggagaatattgtgaactgaaggtcatgtatcagcgaaaagcaggctttcctcttgtagcaattgtgcactgaaaaactacagtgcccttatgacaccacaatagtaagcaagactacaggacatctatgcgaaatgcagctagccagctacactgatgtagagatcattcaggcagtttaacctctatactgtatcattttaatttaaccagctatttcactactgccttttatagtgtttaggttataaccaatgacatctattagagtttataatttaaactcattgattgaaaaacatttagttgtgatgtcactaaaaggtgaaataaatttcttatagtgtgcattattatccctttttcatttctaagtaaaattcttaacaacttctgtaataataatgattggatttatgaatgttgtttgcactaacatctggtctaatttcattattcttgaacttcttttgtgcccatgcttcattacacatgtaggtcgctcgaatgcaactgtccggcctagcatccaatcgacctcaaccactctgcatcccacgtgtgtgtggagctgatgaacatgtcgatgtaaaaatattcaacttcgaatatctttggctttagtgactagtgactgatgtactttagcgtatccactaaaaaccatgaaagtctaggtatgtgtcatttggcattaggttttgtgatgtaacacttgactcaacatcctctaatatgtatatctgttttgacattatattttttcacatgactaacctttgggcatctctgttttcatattaccaatacaccaatgatgttaggcaaattcctccagctcgagtacttggagattacatagtcttctccattgtttttctagactttgaggttctaagcatgagcaagctgggttatgatggtgttgtggcactgctggttgctgatatatcactttcaatcggtcttgaccagattgaagctctgtatcagtatgcccaatttcagtttgagtgtggtaactactcaggggctgctgattacctttaccagtatggtgctttgtgcacaaacagtgagcgaaatgtgagtgccctctggggaaagctagcagcagaaatcctaatgcagaactgggacctagctttggaggaactcaaccgcttgaaggaaataattgattcaaagaacttctcatcacctctgaatcagctccagaataggatatggctgatgcattgggctctgttcatcttctttaaccatatcaggtacttgaatgctatacagacaaatgcacaccatcttattaggtatctagctactgcagttgttgtcaacaaaaaggagaaggaatatgcttaaagagttgattaaggtcattcaacaggagcaccatagctacaaggatcccgtaactgaatttttggaatgcttatatgttaactatgtagttgtgggcttttgaacaatagctggagtgatatgaaacattagtgatgtagttgtgggcttttgaactgcttcaagcaggagtgatgccgttgtggtgcttttgtgactgatcatctctggagcttttgtgaatgatctagctagctatctataaatgatctagttgtgaatgatattataattgtgatgcttttgtgaatatataattgtggtgcttttgtgtttatg

SEQ ID NO: 40313 - DNA, 2230 bp, Zea Mays
agccgtcgcctctccttgctctgctcctctctctcccaagcggctctccctctatctcctcgtttctctcccctcctcttctacagccgctgccaggcaaccgaccgccgagcagcgcagccacccgagccccacgcccgccgcgccaggaaccagcgcccctgctctcgccaggacgccaggaattgctctttctatagcaagtttatgagttcagtttatattccattgaatatttgttgcagtgaagagaaatgagagaaagccttcggttgtagccttcagtttatattccattgaatatttgttgcatccgactcatctctgtttcgattccatccggtttggctcattttttaatcgagtgtgttgtagttttgtaccctaatgtcgtgggagtgctaccgaagtactgatagcatcactttaatttcattagctccgtcctggcaatcactttgggaaggtggtcagtggaataactttgcttaaaaagcttgaagcagttggtagtgaaactggaaatccttcttatcaagtgaaaattgtagactgtggtgaagtttccaacacaaattctcaggatccgctaaagggagataaagtaagctcaaagacagataacagcagttcagacagtgaaaagggtggccatcgtaccaagcgttccttgacgaaaggtgagctctagaatgttgagccttggcgctctcaccacatttgattacttggggattgagtaaccgggaaaggcgtattgcacttgttgctgctggcgctgctgctggcattgcttcaggcttcaatgcagcagttgctgggtgcttctttgccattgaaactgtattaagacctcttaaagcagaaaattcacctccatttacgactgcaatgataatattggcatctgttatatcatctactgtttcaaatgttttacttggagccagaccagcttttatagtgccagcctatgagctaaaatctgctgccggttggaatggctgctacactagcttcagtctgttcagtcccattgacttcagtactgcttctctttgagctgacaaaggattacaggattttgcttcctctcatgtgaacaagggagaatattgtgaactgaaggtcatgtatcagcgaaaagcaggctttcctcttgtagcaattgtgcactgaaaaactacagtgcccttatgacaccacaatagtaagcaagactacaggacatctatgcgaaatgcagctagccagctacactgatgtagagatcattcaggtcgctcgaatgcaactgtccggcctagcatccaatcgacctcaaccactctgcatcccacgtgtgtgtggagctgatgaacatgtcgatgtgcaaattcctccagctcgagtacttggagattacatagtcttctccattgtttttctagactttgaggttctaagcatgagcaagctgggttatgatggtgttgtggcactgctggttgctgatatatcactttcaatcggtcttgaccagattgaagctctgtatcagtatgcccaatttcagtttgagtgtggtaactactcaggggctgctgattacctttaccagtatggtgctttgtgcacaaacagtgagcgaaatgtgagtgccctctggggaaagctagcagcagaaatcctaatgcagaactgggacctagctttggaggaactcaaccgcttgaaggaaataattgattcaaagaacttctcatcacctctgaatcagctccagaataggatatggctgatgcattgggctctgttcatcttctttaaccatatcaggtacttgaatgctatacagacaaatgcacaccatcttattaggtatctagctactgcagttgttgtcaacaaaaaggagaaggaatatgcttaaagagttgattaaggtcattcaacaggagcaccatagctacaaggatcccgtaactgaatttttggaatgcttatatgttaactatgtagttgtgggcttttgaacaatagctggagtgatatgaaacattagtgatgtagttgtgggcttttgaactgcttcaagcaggagtgatgccgttgtggtgcttttgtgactgatcatctctggagcttttgtgaatgatctagctagctatctataaatgatctagttgtgaatgatattataattgtgatgcttttgtgaatatataattgtggtgcttttgtgtttatg

SEQ ID NO: 40314 - DNA, 1892 bp, Zea Mays
agccgtcgcctctccttgctctgctcctctctctcccaagcggctctccctctatctcctcgtttctctcccctcctcttctacagccgctgccaggcaaccgaccgccgagcagcgcagccacccgagccccacgcccgccgcgccaggaaccagcgcccctgctctcgccaggacgccaggaattgctctttctatagcaagtttatgagttcagtttatattccattgaatatttgttgcagtgaagagaaatgagagaaagccttcggttgtagccttcagtttatattccattgaatatttgttgcatccgactcatctctgtttcgattccatccggtttggctcattttttaatcgagtgtgttgtagttttgtaccctaatgtcgtgggagtgctaccgaagtactgatagcatcactttaatttcattagctccgtcctggcaatcactttgggaaggtggtcagtggaataactttgcttaaaaagcttgaagcagttggtagtgaaactggaaatccttcttatcaagtgaaaattgtagactgtggtgaagtttccaacacaaattctcaggatccgctaaagggagataaagtaagctcaaagacagataacagcagttcagacagtgaaaagggtggccatcgtaccaagcgttccttgacgaaaggcttcaatgcagcagttgctgggtgcttctttgccattgaaactgtattaagacctcttaaagcagaaaattcacctccatttacgactgcaatgataatattggcatctgttatatcatctactgtttcaaatgttttacttggagccagaccagcttttatagtgccagcctatgagctaaaatctgctgccggttggaatggctgctacactagcttcagtctgttcagtcccattgacttcagtactgcttctctttgagctgacaaaggattacaggattttgcttcctctcatgtgaacaagggagaatattgtgaactgaaggtcatgtatcagcgaaaagcaggctttcctcttgtagcaattgtgcactgaaaaactacagtgcccttatgacaccacaatagtcgctcgaatgcaactgtccggcctagcatccaatcgacctcaaccactctgcatcccacgtgtgtgtggagctgatgaacatgtcgatgtgttctaagcatgagcaagctgggttatgatggtgttgtggcactgctggttgctgatatatcactttcaatcggtcttgaccagattgaagctctgtatcagtatgcccaatttcagtttgagtgtggtaactactcaggggctgctgattacctttaccagtatggtgctttgtgcacaaacagtgagcgaaatgtgagtgccctctggggaaagctagcagcagaaatcctaatgcagaactgggacctagctttggaggaactcaaccgcttgaaggaaataattgattcaaaggtacttgaatgctatacagacaaatgcacaccatcttattaggtatctagctactgcagttgttgtcaacaaaaaggagaaggaatatgcttaaagagttgattaaggtcattcaacaggagcaccatagctacaaggatcccgtaactgaatttttggaatgcttatatgttaactatgtagttgtgggcttttgaacaatagctggagtgatatgaaacattagtgatgtagttgtgggcttttgaactgcttcaagcaggagtgatgccgttgtggtgcttttgtgactgatcatctctggagcttttgtgaatgatctagctagctatctataaatgatctagttgtgaatgatattataattgtgatgcttttgtgaatatataattgtggtgcttttgtgtttatg

SEQ ID NO: 40315 - DNA, 2369 bp, Zea Mays
agccgtcgcctctccttgctctgctcctctctctcccaagcggctctccctctatctcctcgtttctctcccctcctcttctacagccgctgccaggcaaccgaccgccgagcagcgcagccacccgagccccacgcccgccgcgccaggaaccagcgcccctgctctcgccaggacgccaggaattgctctttctatagcaagtttatgagttcagtttatattccattgaatatttgttgcagtgaagagaaatgagagaaagccttcggttgtagccttcagtttatattccattgaatatttgttgcatccgactcatctctgtttcgattccatccggtttggctcattttttaatcgagtgtgttgtagttttgtaccctaatgtcgtgggagtgctaccgaagtactgatagcatcactttaatttcattagctccgtcctggcaatcactttgggaaggtggtcagtggaataactttgcttaaaaagcttgaagcagttggtagtgaaactggaaatccttcttatcaagtgaaaattgtagactgtggtgaagtttccaacacaaattctcaggatccgctaaagggagataaagtaagctcaaagacagataacagcagttcagacagtgaaaagggtggccatcgtaccaagcgttccttgacgaaaggcttcaatgcagcagttgctgggtgcttctttgccattgaaactgtattaagacctcttaaagcagaaaattcacctccatttacgactgcaatgataatattggcatctgttatatcatctactgtttcaaatgttttacttggagccagaccagcttttatagtgccagcctatgagctaaaatctgctgccggttggaatggctgctacactagcttcagtctgttcagtcccattgacttcagtactgcttctctttgagctgacaaaggattacaggattttgcttcctctcatgtgaacaagggagaatattgtgaactgaaggtcatgtatcagcgaaaagcaggctttcctcttgtagcaattgtgcactgaaaaactacagtgcccttatgacaccacaatagtaagcaagactacaggacatctatgcgaaatgcagctagccagctacactgatgtagagatcattcaggcagtttaacctctatactgtatcattttaatttaaccagctatttcactactgccttttatagtgtttaggttataaccaatgacatctattagagtttataatttaaactcattgattgaaaaacatttagttgtgatgtcactaaaaggtgaaataaatttcttatagtgtgcattattatccctttttcatttctaagtaaaattcttaacaacttctgtaataataatgattggatttatgaatgttgtttgcactaacatctggtctaatttcattattcttgaacttcttttgtgcccatgcttcattacacatgtaggtcgctcgaatgcaactgtccggcctagcatccaatcgacctcaaccactctgcatcccacgtgtgtgtggagctgatgaacatgtcgatgtgttctaagcatgagcaagctgggttatgatggtgttgtggcactgctggttgctgatatatcactttcaatcggtcttgaccagattgaagctctgtatcagtatgcccaatttcagtttgagtgtggtaactactcaggggctgctgattacctttaccagtatggtgctttgtgcacaaacagtgagcgaaatgtgagtgccctctggggaaagctagcagcagaaatcctaatgcagaactgggacctagctttggaggaactcaaccgcttgaaggaaataattgattcaaagaacttctcatcacctctgaatcagctccagaataggatatggctgatgcattgggctctgttcatcttctttaaccatatcaggtacttgaatgctatacagacaaatgcacaccatcttattaggtatctagctactgcagttgttgtcaacaaaaaggagaaggaatatgcttaaagagttgattaaggtcattcaacaggagcaccatagctacaaggatcccgtaactgaatttttggaatgcttatatgttaactatgtagttgtgggcttttgaacaatagctggagtgatatgaaacattagtgatgtagttgtgggcttttgaactgcttcaagcaggagtgatgccgttgtggtgcttttgtgactgatcatctctggagcttttgtgaatgatctagctagctatctataaatgatctagttgtgaatgatattataattgtgatgcttttgtgaatatataattgtggtgcttttgtgtttatg

SEQ ID NO: 40316 - DNA, 2309 bp, Zea Mays
agccgtcgcctctccttgctctgctcctctctctcccaagcggctctccctctatctcctcgtttctctcccctcctcttctacagccgctgccaggcaaccgaccgccgagcagcgcagccacccgagccccacgcccgccgcgccaggaaccagcgcccctgctctcgccaggacgccaggaattgctctttctatagcaagtttatgagttcagtttatattccattgaatatttgttgcagtgaagagaaatgagagaaagccttcggttgtagccttcagtttatattccattgaatatttgttgcatccgactcatctctgtttcgattccatccggtttggctcattttttaatcgagtgtgttgtagttttgtaccctaatgtcgtgggagtgctaccgaagtactgatagcatcactttaatttcattagctccgtcctggcaatcactttgggaaggtggtcagtggaataactttgcttaaaaagcttgaagcagttggtagtgaaactggaaatccttcttatcaagtgaaaattgtagactgtggtgaagtttccaacacaaattctcaggatccgctaaagggagataaagtaagctcaaagacagataacagcagttcagacagtgaaaagggtggccatcgtaccaagcgttccttgacgaaaggcttcaatgcagcagttgctgggtgcttctttgccattgaaactgtattaagacctcttaaagcagaaaattcacctccatttacgactgcaatgataatattggcatctgttatatcatctactgtttcaaatgttttacttggagccagaccagcttttatagtgccagcctatgagctaaaatctgctgccggttggaatggctgctacactagcttcagtctgttcagtcccattgacttcagtactgcttctctttgagctgacaaaggattacaggattttgcttcctctcatgtgaacaagggagaatattgtgaactgaaggtcatgtatcagcgaaaagcaggctttcctcttgtagcaattgtgcactgaaaaactacagtgcccttatgacaccacaatagtcgctcgaatgcaactgtccggcctagcatccaatcgacctcaaccactctgcatcccacgtgtgtgtggagctgatgaacatgtcgatgtgtactgattttttctcatatgtttctagccatgctttaattgattctttgtcaaattgtgcaacttgtgcaaaccatatgattacttggtattattgctttgatatggacatccagaaaaatattcaacttcgaatatctttggctttagtgactagtgactgatgtactttagcgtatccactaaaaaccatgaaagtctaggtatgtgtcatttggcattaggttttgtgatgtaacacttgactcaacatcctctaatatgtatatctgttttgacattatattttttcacatgactaacctttgggcatctctgttttcatattaccaatacaccaatgatgttaggcaaattcctccagctcgagtacttggagattacatagtcttctccattgtttttctagactttgaggttctaagcatgagcaagctgggttatgatggtgttgtggcactgctggttgctgatatatcactttcaatcggtcttgaccagattgaagctctgtatcagtatgcccaatttcagtttgagtgtggtaactactcaggggctgctgattacctttaccagtatggtgctttgtgcacaaacagtgagcgaaatgtgagtgccctctggggaaagctagcagcagaaatcctaatgcagaactgggacctagctttggaggaactcaaccgcttgaaggaaataattgattcaaaggtacttgaatgctatacagacaaatgcacaccatcttattaggtatctagctactgcagttgttgtcaacaaaaaggagaaggaatatgcttaaagagttgattaaggtcattcaacaggagcaccatagctacaaggatcccgtaactgaatttttggaatgcttatatgttaactatgtagttgtgggcttttgaacaatagctggagtgatatgaaacattagtgatgtagttgtgggcttttgaactgcttcaagcaggagtgatgccgttgtggtgcttttgtgactgatcatctctggagcttttgtgaatgatctagctagctatctataaatgatctagttgtgaatgatattataattgtgatgcttttgtgaatatataattgtggtgcttttgtgtttatg

SEQ ID NO: 40317 - DNA, 4413 bp, Zea Mays
gggaagcgtgccaaacaacgagtcccgccccgcctgcaaaatccacggcgaaatttgaatcccttcgcacaacggctcagctctcattcttctcttccaccgaccacccgacaactctcacgtctcacaacaccaaagcatccgccagctactcctcctgctgcgatcaagccgctctcgaagcaagcagacgctcctccgatcctctctcttctccccgccgtgtcgtcaacaacctctctccctcctctcgctgcggtctcccccgctccgttactccgattccaccagcgacaggcgaactctgtgctgcatcgatctcaagtaacaccggcttgaggtcaggtcgcccgatcgaggatgggttctctcgccgatccgtacgcgctacgctgcgtctccgacctgcctccgccattccgctctatgttcaggttcagatacttcaattccttgcagagtgagtgcttccatgtatgtttcttctcggatgtgaacatggttatctcggcacctacggggagtgggaagaccgtactatttgaactctgcattctgaggctcctctcaaggttcctttcaccagattggaggttcaatttaaataaaggaactctgaaaacaatctacattgcaccgtcgaaggcgctggtacaggaaaagctgcgggactggaacatgaagctgggcccattagggatcaattgcttggagatgactggtgacggtgaattttgcaacactaaagccatccatgatgctgatttaatactcaccactcctgagaagttcgattctatgagtcgacatggtataaaaagtggtagattgggtttcttctgtgacattgctcttgtccttattgatgaagttcaccttctaaatgatccacgtggagctgcgttagaagcagttgtcagtaggataaaaatgctatcgcgacatgataacatgaaatcttttcctctggctaatgttcgattaatcgctgtttctgctactatccctaatattgaggacatagcacagtggctcttagcaccccgagaaggaatcaaaagatttggagaagaaatgaggccagtgaagttgacaaccaaggttatgctccagctaaaaatgactttctttttgagaggaaatataaatggaatatggattacagatatactgatgcaacattcaagggggaagtctgcacttattttctgttctacgagaaaaggtgcacaagaagcagcgcagtgcctttcacaaactggagcatcgcttggctattcgaatccatttatgaaatcaatgcagcagtatgaacatctaaaggcggcttccctaacctgtagtgacaagcaactgcaagcttgcatcatacatggagttggttttcataatggtggtctttgcttaaaagaccgaggtcttgttgaggggcttttcctcaagggtgatcttcaagttctatgcacaacaaatactttggcacatggcgtcaacttgcctgcacatacagttgtgataaagtcaacacagttcttcaacaaagagaagggcctatatgttgaatatgagagatccatggtgcttcagatgtgtgggagggctggacgtccaccattcgatgatactggaacaattataatcatgacaagaaaagaaacggttcatctatatgagaaccttctaaatggatgtgaaatggtggagtctcagttgctgtcatgtgcggtggagcatctaaatgcagaaatcgttcagttgacagtatctgacatcattctggcggttgagtggatcaagtgctcgtatttgtacatcagaataaggaagaatcctgagaactatggagttaagagggggactcctcaagatctccttgaaaagcaaattcaagatatatgtgtcgataagattcatgagttggtggagtatggactgatttggacagatgaaggagctttcgttttacaaccgctagaacctgggaggctgatggcaaaattctacctgaagtttgatacaatgaagcttatagtcaaagcttctggctattgcagtttggaagatttattgcatgtcatctgtcactctgcagagataacttggatccaactacgccgaaatgataagaagattctaaatgacataaacgctgacaaagatggtagacttctatttcatattgtcatgaagaatggaaaaaggaagaagcgtgttcagacaagagaagagaaaatattcttgctagcaaatgattgcttaactggagactctctaatccatgatttatccctcaaccaggaaacaaatgcaatatgctcaaatggatgtaggattgccaaatgcatgcgagaatattttatatacaaaaagaattacagatctgccattaattctatgatccttgcaaatagtctgcatcaaaagctttgggagagcagtccatttctgctgaaacaactgcctgggattggaattgtaacagcaaaggctctgaagactgctggagtttatagctttgagaccttggcaactgctgatgcaagaaagatagaattggccacagggcgcaattatccatttgggaatcatatcaaagaatcaatgtcatcattaccacccaaaattgacatacacatagaggaaactggaaacagacttgggaaatcgaccattactgtaacactaactcgtctatcacaggcagttaaatccagtaaacgcaactgtgctgacatggttgtggcctcagaggaagacaatgtgatcctctttcatgagaatataagcccatattctgtaaaagtttttgtgccatgcccccaaaatgcacgggtgactctgaaggttgatctaatatttgaagaatatgttggtcttgatgtccacaagaagcatgtagtaagcagggaagatggtttgtacgtgaccaaggagcatgggatagataaccttgaacctacgtacaatatcccttcagagatttgtttggttagctccaggacaactcgaacaagccgatctcaatctcacactgaacagaaccctctttccaaagaggtttatgtcatagaagatgatggcgctgctgtgagtgctgtcagtgctctcgagaaagctgatgatgcagtgggaaccataaaatttaacaacttggcttcactggaggtcccaagctttgatctactgcctgaagaagagtatggagctcctggaccagcagaggcagaatgcaaaggtgccacagacagcacgatttttgatcacatacgcaaaaagtccaaagacttccccactctgatgctatcaaaatccatggattgctcatatgaacctcttatactgaagaagatgaagatatcaagggaccagtttggagtaaagcatggttgtctgcatgcgggtgaggccaccacaatggattttgatcctgttgagcctagggtctctccaaccaatactgctgagaagttccgcgggatcctgggtagaagttcagaaaggagtcgcatgctgtttggaaaaatggatagcccgtttgagaagagcgagatgctgggcacgacgccagctgaaagttctcttcggttcgcgggtggaaaagacagctcactggagaagaacaagaccctgatcagaactccagctgaaaactctctccaaattgcagcacgtggaaaggagagcaaggtgagcaaggtgctgacaaatctagataaaagccctcttgggtttgcgggtggaaaggagagcaagatgagcaatgtaccgagcacttcagctgaaaactctctccagtttgcagctaggcgtgtcagatcatctgagaagagcaagatgctgacaactccatatgaaagctctcaagcgtttttgggcgaaaaggacagcccatcggagaaaagcaaaatccttattaatagtccagttgagtatcctttcaagaaaggaagtccaggtgaaaatcctttcaaaacatgtagtccagttgaaaactccctcaaatttgcagctcaacgtgacagcccatctgagaagaggaaatcctgcatcagcaatccccttccgcccttccagcaggctgttcaatgcacaaagcaagtaggagttgcaggtcaaccctttgatattaaggaatattgcaaggaaatattgaggagcagaaatgacagtcaaggaggcgatccttttgctggttacaagagtatcttttcttttctatgatctgctgaacagctagcaaatatgatcctgaacaatgtacattatgacactcaaataacagctagcaataatctttttcttgtcattgctgaccatcttctgcccaaagtaggaacataaaatgcatgtgatttggtcaaagtgtgtaaagagttgccccacaatttgtgtgttacatcactttattgtgcc

SEQ ID NO: 40318 - DNA, 4364 bp, Zea Mays
gtcaacaacctctctccctcctctcgctgcggtctcccccgctccgttactccgattccaccagcgacaggcgaactctgtgctgcatcgatctcaagtaacaccggcttgaggtcaggtcgcccgatcgaggatgggttctctcgccgatccgtacgcgctacgctgcgtctccgacctgcctccgccattccgctctatgttcaggttcagatacttcaattccttgcagagtgagtgcttccatgtatgtttcttctcggatgtgaacatggttatctcggcacctacggggagtgggaagaccgtactatttgaactctgcattctgaggctcctctcaaggttcctttcaccagattggaggttcaatttaaataaaggaactctgaaaacaatctacattgcaccgtcgaaggcgctggtacaggaaaagctgcgggactggaacatgaagctgggcccattagggatcaattgcttggagatgactggtgacggtgaattttgcaacactaaagccatccatgatgctgatttaatactcaccactcctgagaagttcgattctatgagtcgacatggtataaaaagtggtagattgggtttcttctgtgacattgctcttgtccttattgatgaagttcaccttctaaatgatccacgtggagctgcgttagaagcagttgtcagtaggataaaaatgctatcgcgacatgataacatgaaatcttttcctctggctaatgttcgattaatcgctgtttctgctactatccctaatattgaggacatagcacagtggctcttagcaccccgagaaggaatcaaaagatttggagaagaaatgaggccagtgaagttgacaaccaaggtctttggttatgctccagctaaaaatgactttctttttgagagggtatgcatcattactatccaaaatcttccttcgtcacgattagagtaaaagttagcagggaagttttaattcagatttggttctgcatctccctgagttgtatcatattgtgccaaatagttggattttatataatgctaactgcttaattatttttgtttgtttcaacttgtagaggttgcagagttttatttatgatatactgatgcaacattcaagggggaagtctgcacttattttctgttctacgagaaaaggtgcacaagaagcagcgcagtgcctttcacaaactggagcatcgcttggctattcgaatccatttatgaaatcaatgcagcagtatgaacatctaaaggcggcttccctaacctgtagtgacaagcaactgcaagcttgcatcatacatggagttggttttcataatggtggtctttgcttaaaagaccgaggtcttgttgaggggcttttcctcaagggtgatcttcaagttctatgcacaacaaatactttggcacatggcgtcaacttgcctgcacatacagttgtgataaagtcaacacagttcttcaacaaagagaagggcctatatgttgaatatgagagatccatggtgcttcagatgtgtgggagggctggacgtccaccattcgatgatactggaacaattataatcatgacaagaaaagaaacggttcatctatatgagaaccttctaaatggatgtgaaatggtggagtctcagttgctgtcatgtgcggtggagcatctaaatgcagaaatcgttcagttgacagtatctgacatcattctggcggttgagtggatcaagtgctcgtatttgtacatcagaataaggaagaatcctgagaactatggagttaagagggggactcctcaagatctccttgaaaagcaaattcaagatatatgtgtcgataagattcatgagttggtggagtatggactgatttggacagatgaaggagctttcgttttacaaccgctagaacctgggaggctgatggcaaaattctacctgaagtttgatacaatgaagcttatagtcaaagcttctggctattgcagtttggaagatttattgcatgtcatctgtcactctgcagagataacttggatccaactacgccgaaatgataagaagattctaaatgacataaacgctgacaaagatggtagacttctatttcatattgtcatgaagaatggaaaaaggaagaagcgtgttcagacaagagaagagaaaatattcttgctagcaaatgattgcttaactggagactctctaatccatgatttatccctcaaccaggaaacaaatgcaatatgctcaaatggatgtaggattgccaaatgcatgcgagaatattttatatacaaaaagaattacagatctgccattaattctatgatccttgcaaatagtctgcatcaaaagctttgggagagcagtccatttctgctgaaacaactgcctgggattggaattgtaacagcaaaggctctgaagactgctggagtttatagctttgagaccttggcaactgctgatgcaagaaagatagaattggccacagggcgcaattatccatttgggaatcatatcaaagaatcaatgtcatcattaccacccaaaattgacatacacatagaggaaactggaaacagacttgggaaatcgaccattactgtaacactaactcgtctatcacaggcagttaaatccagtaaacgcaactgtgctgacatggttgtggcctcagaggaagacaatgtgatcctctttcatgagaatataagcccatattctgtaaaagtttttgtgccatgcccccaaaatgcacgggtgactctgaaggttgatctaatatttgaagaatatgttggtcttgatgtccacaagaagcatgtagtaagcagggaagatggtttgtacgtgaccaaggagcatgggatagataaccttgaacctacgtacaatatcccttcagagatttgtttggttagctccaggacaactcgaacaagccgatctcaatctcacactgaacagaaccctctttccaaagaggtttatgtcatagaagatgatggcgctgctgtgagtgctgtcagtgctctcgagaaagctgatgatgcagtgggaaccataaaatttaacaacttggcttcactggaggtcccaagctttgatctactgcctgaagaagagtatggagctcctggaccagcagaggcagaatgcaaaggtgccacagacagcacgatttttgatcacatacgcaaaaagtccaaagacttccccactctgatgctatcaaaatccatggattgctcatatgaacctcttatactgaagaagatgaagatatcaagggaccagtttggagtaaagcatggttgtctgcatgcgggtgaggccaccacaatggattttgatcctgttgagcctagggtctctccaaccaatactgctgagaagttccgcgggatcctgggtagaagttcagaaaggagtcgcatgctgtttggaaaaatggatagcccgtttgagaagagcgagatgctgggcacgacgccagctgaaagttctcttcggttcgcgggtggaaaagacagctcactggagaagaacaagaccctgatcagaactccagctgaaaactctctccaaattgcagcacgtggaaaggagagcaaggtgagcaaggtgctgacaaatctagataaaagccctcttgggtttgcgggtggaaaggagagcaagatgagcaatgtaccgagcacttcagctgaaaactctctccagtttgcagctaggcgtgtcagatcatctgagaagagcaagatgctgacaactccatatgaaagctctcaagcgtttttgggcgaaaaggacagcccatcggagaaaagcaaaatccttattaatagtccagttgagtatcctttcaagaaaggaagtccaggtgaaaatcctttcaaaacatgtagtccagttgaaaactccctcaaatttgcagctcaacgtgacagcccatctgagaagaggaaatcctgcatcagcaatccccttccgcccttccagcaggctgttcaatgcacaaagcaagtaggagttgcaggtcaaccctttgatattaaggaatattgcaaggaaatattgaggagcagaaatgacagtcaaggaggcgatccttttgctggttacaagagtatcttttcttttctatgatctgctgaacagctagcaaatatgatcctgaacaatgtacattatgacactcaaataacagctagcaataatctttttcttgtcattgctgaccatcttctgcccaaagtaggaacataaaatgcatgtgatttggtcaaagtgtgtaaagagttgccccacaatttgtgtgttacatcactttattgtgcc

SEQ ID NO: 40319 - DNA, 4112 bp, Zea Mays
gctgcatcgatctcaagtaacaccggcttgaggtcaggtcgcccgatcgaggatgggttctctcgccgatccgtacgcgctacgctgcgtctccgacctgcctccgccattccgctctatgttcaggttcagatacttcaattccttgcagagtgagtgcttccatgtatgtttcttctcggatgtgaacatggttatctcggcacctacggggagtgggaagaccgtactatttgaactctgcattctgaggctcctctcaaggttcctttcaccagattggaggttcaatttaaataaaggaactctgaaaacaatctacattgcaccgtcgaaggcgctggtacaggaaaagctgcgggactggaacatgaagctgggcccattagggatcaattgcttggagatgactggtgacggtgaattttgcaacactaaagccatccatgatgctgatttaatactcaccactcctgagaagttcgattctatgagtcgacatggtataaaaagtggtagattgggtttcttctgtgacattgctcttgtccttattgatgaagttcaccttctaaatgatccacgtggagctgcgttagaagcagttgtcagtaggataaaaatgctatcgcgacatgataacatgaaatcttttcctctggctaatgttcgattaatcgctgtttctgctactatccctaatattgaggacatagcacagtggctcttagcaccccgagaaggaatcaaaagatttggagaagaaatgaggccagtgaagttgacaaccaaggtctttggttatgctccagctaaaaatgactttctttttgagaggaaatataaatggaatatggattacagatatactgatgcaacattcaagggggaagtctgcacttattttctgttctacgagaaaaggtgcacaagaagcagcgcagtgcctttcacaaactggagcatcgcttggctattcgaatccatttatgaaatcaatgcagcagtatgaacatctaaaggcggcttccctaacctgtagtgacaagcaactgcaagcttgcatcatacatggagttggttttcataatggtggtctttgcttaaaagaccgaggtcttgttgaggggcttttcctcaagggtgatcttcaagttctatgcacaacaaatactttggcacatggcgtcaacttgcctgcacatacagttgtgataaagtcaacacagttcttcaacaaagagaagggcctatatgttgaatatgagagatccatggtgcttcagatgtgtgggagggctggacgtccaccattcgatgatactggaacaattataatcatgacaagaaaagaaacggttcatctatatgagaaccttctaaatggatgtgaaatggtggagtctcagttgctgtcatgtgcggtggagcatctaaatgcagaaatcgttcagttgacagtatctgacatcattctggcggttgagtggatcaagtgctcgtatttgtacatcagaataaggaagaatcctgagaactatggagttaagagggggactcctcaagatctccttgaaaagcaaattcaagatatatgtgtcgataagattcatgagttggtggagtatggactgatttggacagatgaaggagctttcgttttacaaccgctagaacctgggaggctgatggcaaaattctacctgaagtttgatacaatgaagcttatagtcaaagcttctggctattgcagtttggaagatttattgcatgtcatctgtcactctgcagagataacttggatccaactacgccgaaatgataagaagattctaaatgacataaacgctgacaaagatggtagacttctatttcatattgtcatgaagaatggaaaaaggaagaagcgtgttcagacaagagaagagaaaatattcttgctagcaaatgattgcttaactggagactctctaatccatgatttatccctcaaccaggaaacaaatgcaatatgctcaaatggatgtaggattgccaaatgcatgcgagaatattttatatacaaaaagaattacagatctgccattaattctatgatccttgcaaatagtctgcatcaaaagctttgggagagcagtccatttctgctgaaacaactgcctgggattggaattgtaacagcaaaggctctgaagactgctggagtttatagctttgagaccttggcaactgctgatgcaagaaagatagaattggccacagggcgcaattatccatttgggaatcatatcaaagaatcaatgtcatcattaccacccaaaattgacatacacatagaggaaactggaaacagacttgggaaatcgaccattactgtaacactaactcgtctatcacaggcagttaaatccagtaaacgcaactgtgctgacatggttgtggcctcagaggaagacaatgtgatcctctttcatgagaatataagcccatattctgtaaaagtttttgtgccatgcccccaaaatgcacgggtgactctgaaggttgatctaatatttgaagaatatgttggtcttgatgtccacaagaagcatgtagtaagcagggaagatggtttgtacgtgaccaaggagcatgggatagataaccttgaacctacgtacaatatcccttcagagatttgtttggttagctccaggacaactcgaacaagccgatctcaatctcacactgaacagaaccctctttccaaagaggtttatgtcatagaagatgatggcgctgctgtgagtgctgtcagtgctctcgagaaagctgatgatgcagtgggaaccataaaatttaacaacttggcttcactggaggtcccaagctttgatctactgcctgaagaagagtatggagctcctggaccagcagaggcagaatgcaaaggtgccacagacagcacgatttttgatcacatacgcaaaaagtccaaagacttccccactctgatgctatcaaaatccatggattgctcatatgaacctcttatactgaagaagatgaagatatcaagggaccagtttggagtaaagcatggttgtctgcatgcgggtgaggccaccacaatggattttgatcctgttgagcctagggtctctccaaccaatactgctgagaagttccgcgggatcctgggtagaagttcagaaaggagtcgcatgctgtttggaaaaatggatagcccgtttgagaagagcgagatgctgggcacgacgccagctgaaagttctcttcggttcgcgggtggaaaagacagctcactggagaagaacaagaccctgatcagaactccagctgaaaactctctccaaattgcagcacgtggaaaggagagcaaggtgagcaaggtgctgacaaatctagataaaagccctcttgggtttgcgggtggaaaggagagcaagatgagcaatgtaccgagcacttcagctgaaaactctctccagtttgcagctaggcgtgtcagatcatctgagaagagcaagatgctgacaactccatatgaaagctctcaagcgtttttgggcgaaaaggacagcccatcggagaaaagcaaaatccttattaatagtccagttgagtatcctttcaagaaaggaagtccaggtgaaaatcctttcaaaacatgtagtccagttgaaaactccctcaaatttgcagctcaacgtgacagcccatctgagaagaggaaatcctgcatcagcaatccccttccgcccttccagcaggctgttcaatgcacaaagcaagtaggagttgcaggtcaaccctttgatattaaggaatattgcaaggaaatattgaggagcagaaatgacagtcaaggaggcgatccttttgctggttacaagagtatcttttcttttctatgatctgctgaacagctagcaaatatgatcctgaacaatgtacattatgacactcaaataacagctagcaataatctttttcttgtcattgctgaccatcttctgcccaaagtaggaacataaaatgcatgtgatttggtcaaagtgtgtaaagagttgccccacaatttgtgtgttacatcactttattgtgcc

SEQ ID NO: 40320 - DNA, 3009 bp, Zea Mays
ctttgcaagctccattttttcattggttttcataatggtggtctttgcttaaaagaccgaggtcttgttgaggggcttttcctcaagggtgatcttcaagttctatgcacaacaaatactttggcacatggcgtcaacttgcctgcacatacagttgtgataaagtcaacacagttcttcaacaaagagaagggcctatatgttgaatatgagagatccatggtgcttcagatgtgtgggagggctggacgtccaccattcgatgatactggaacaattataatcatgacaagaaaagaaacggttcatctatatgagaaccttctaaatggatgtgaaatggtggagtctcagttgctgtcatgtgcggtggagcatctaaatgcagaaatcgttcagttgacagtatctgacatcattctggcggttgagtggatcaagtgctcgtatttgtacatcagaataaggaagaatcctgagaactatggagttaagagggggactcctcaagatctccttgaaaagcaaattcaagatatatgtgtcgataagattcatgagttggtggagtatggactgatttggacagatgaaggagctttcgttttacaaccgctagaacctgggaggctgatggcaaaattctacctgaagtttgatacaatgaagcttatagtcaaagcttctggctattgcaggatccaactacgccgaaatgataagaagattctaaatgacataaacgctgacaaagatggtagacttctatttcatattgtcatgaagaatggaaaaaggaagaagcgtgttcagacaagagaagagaaaatattcttgctagcaaatgattgcttaactggagactctctaatccatgatttatccctcaaccaggaaacaaatgcaatatgctcaaatggatgtaggattgccaaatgcatgcgagaatattttatatacaaaaagaattacagatctgccattaattctatgatccttgcaaatagtctgcatcaaaagctttgggagagcagtccatttctgctgaaacaactgcctgggattggaattgtaacagcaaaggctctgaagactgctggagtttatagctttgagaccttggcaactgctgatgcaagaaagatagaattggccacagggcgcaattatccatttgggaatcatatcaaagaatcaatgtcatcattaccacccaaaattgacatacacatagaggaaactggaaacagacttgggaaatcgaccattactgtaacactaactcgtctatcacaggcagttaaatccagtaaacgcaactgtgctgacatggttgtggcctcagaggaagacaatgtgatcctctttcatgagaatataagcccatattctgtaaaagtttttgtgccatgcccccaaaatgcacgggtgactctgaaggttgatctaatatttgaagaatatgttggtcttgatgtccacaagaagcatgtagtaagcagggaagatggtttgtacgtgaccaaggagcatgggatagataaccttgaacctacgtacaatatcccttcagagatttgtttggttagctccaggacaactcgaacaagccgatctcaatctcacactgaacagaaccctctttccaaagaggtttatgtcatagaagatgatggcgctgctgtgagtgctgtcagtgctctcgagaaagctgatgatgcagtgggaaccataaaatttaacaacttggcttcactggaggtcccaagctttgatctactgcctgaagaagagtatggagctcctggaccagcagaggcagaatgcaaaggtgccacagacagcacgatttttgatcacatacgcaaaaagtccaaagacttccccactctgatgctatcaaaatccatggattgctcatatgaacctcttatactgaagaagatgaagatatcaagggaccagtttggagtaaagcatggttgtctgcatgcgggtgaggccaccacaatggattttgatcctgttgagcctagggtctctccaaccaatactgctgagaagttccgcgggatcctgggtagaagttcagaaaggagtcgcatgctgtttggaaaaatggatagcccgtttgagaagagcgagatgctgggcacgacgccagctgaaagttctcttcggttcgcgggtggaaaagacagctcactggagaagaacaagaccctgatcagaactccagctgaaaactctctccaaattgcagcacgtggaaaggagagcaaggtgagcaaggtgctgacaaatctagataaaagccctcttgggtttgcgggtggaaaggagagcaagatgagcaatgtaccgagcacttcagctgaaaactctctccagtttgcagctaggcgtgtcagatcatctgagaagagcaagatgctgacaactccatatgaaagctctcaagcgtttttgggcgaaaaggacagcccatcggagaaaagcaaaatccttattaatagtccagttgagtatcctttcaagaaaggaagtccaggtgaaaatcctttcaaaacatgtagtccagttgaaaactccctcaaatttgcagctcaacgtgacagcccatctgagaagaggaaatcctgcatcagcaatccccttccgcccttccagcaggctgttcaatgcacaaagcaagtaggagttgcaggtcaaccctttgatattaaggaatattgcaaggaaatattgaggagcagaaatgacagtcaaggaggcgatccttttgctggttacaagagtatcttttcttttctatgatctgctgaacagctagcaaatatgatcctgaacaatgtacattatgacactcaaataacagctagcaataatctttttcttgtcattgctgaccatcttctgcccaaagtaggaacataaaatgcatgtgatttggtcaaagtgtgtaaagagttgccccacaatttgtgtgttacatcactttattgtgcc

SEQ ID NO: 40321 - DNA, 2678 bp, Zea Mays
agtgccgccagcgctgcaacatgatcttgagacagctgcttggtgaagagcttgctgtattcttctagcgcctccagcctaactgagatttgttcgtccaccagtcccatgtggcggagcaaacccacccgcacttgctcatcagaggaaatattactgtgttgattccttcagaacattttggtaatgacatgaatacaccttttctctgtcctcccaactctgaggttgggcatacagaacctgggaggctgatggcaaaattctacctgaagtttgatacaatgaagcttatagtcaaagcttctggctattgcagtttggaagatttattgcatgtcatctgtcactctgcagagataacttggatccaactacgccgaaatgataagaagattctaaatgacataaacgctgacaaagatggtagacttctatttcatattgtcatgaagaatggaaaaaggaagaagcgtgttcagacaagagaagagaaaatattcttgctagcaaatgattgcttaactggagactctctaatccatgatttatccctcaaccaggaaacaaatgcaatatgctcaaatggatgtaggattgccaaatgcatgcgagaatattttatatacaaaaagaattacagatctgccattaattctatgatccttgcaaatagtctgcatcaaaagctttgggagagcagtccatttctgctgaaacaactgcctgggattggaattgtaacagcaaaggctctgaagactgctggagtttatagctttgagaccttggcaactgctgatgcaagaaagatagaattggccacagggcgcaattatccatttgggaatcatatcaaagaatcaatgtcatcattaccacccaaaattgacatacacatagaggaaactggaaacagacttgggaaatcgaccattactgtaacactaactcgtctatcacaggcagttaaatccagtaaacgcaactgtgctgacatggttgtggcctcagaggaagacaatgtgatcctctttcatgagaatataagcccatattctgtaaaagtttttgtgccatgcccccaaaatgcacgggtgactctgaaggttgatctaatatttgaagaatatgttggtcttgatgtccacaagaagcatgtagtaagcagggaagatggtttgtacgtgaccaaggagcatgggatagataaccttgaacctacgtacaatatcccttcagagatttgtttggttagctccaggacaactcgaacaagccgatctcaatctcacactgaacagaaccctctttccaaagaggtttatgtcatagaagatgatggcgctgctgtgagtgctgtcagtgctctcgagaaagctgatgatgcagtgggaaccataaaatttaacaacttggcttcactggaggtcccaagctttgatctactgcctgaagaagagtatggagctcctggaccagcagaggcagaatgcaaaggtgccacagacagcacgatttttgatcacatacgcaaaaagtccaaagacttccccactctgatgctatcaaaatccatggattgctcatatgaacctcttatactgaagaagatgaagatatcaagggaccagtttggagtaaagcatggttgtctgcatgcgggtgaggccaccacaatggattttgatcctgttgagcctagggtctctccaaccaatactgctgagaagttccgcgggatcctgggtagaagttcagaaaggagtcgcatgctgtttggaaaaatggatagcccgtttgagaagagcgagatgctgggcacgacgccagctgaaagttctcttcggttcgcgggtggaaaagacagctcactggagaagaacaagaccctgatcagaactccagctgaaaactctctccaaattgcagcacgtggaaaggagagcaaggtgagcaaggtgctgacaaatctagataaaagccctcttgggtttgcgggtggaaaggagagcaagatgagcaatgtaccgagcacttcagctgaaaactctctccagtttgcagctaggcgtgtcagatcatctgagaagagcaagatgctgacaactccatatgaaagctctcaagcgtttttgggcgaaaaggacagcccatcggagaaaagcaaaatccttattaatagtccagttgagtatcctttcaagaaaggaagtccaggtgaaaatcctttcaaaacatgtagtccagttgaaaactccctcaaatttgcagctcaacgtgacagcccatctgagaagaggaaatcctgcatcagcaatccccttccgcccttccagcaggctgttcaatgcacaaagcaagtaggagttgcaggtcaaccctttgatattaaggaatattgcaaggaaatattgaggagcagaaatgacagtcaaggaggcgatccttttgctggttacaagagtatcttttcttttctatgatctgctgaacagctagcaaatatgatcctgaacaatgtacattatgacactcaaataacagctagcaataatctttttcttgtcattgctgaccatcttctgcccaaagtaggaacataaaatgcatgtgatttggtcaaagtgtgtaaagagttgccccacaatttgtgtgttacatcactttattgtgcc

SEQ ID NO: 40322 - DNA, 2415 bp, Zea Mays
cccaactctgaggttgggcatacagaacctgggaggctgatggcaaaattctacctgaagtttgatacaatgaagcttatagtcaaagcttctggctattgcaggatccaactacgccgaaatgataagaagattctaaatgacataaacgctgacaaagatggtagacttctatttcatattgtcatgaagaatggaaaaaggaagaagcgtgttcagacaagagaagagaaaatattcttgctagcaaatgattgcttaactggagactctctaatccatgatttatccctcaaccaggaaacaaatgcaatatgctcaaatggatgtaggattgccaaatgcatgcgagaatattttatatacaaaaagaattacagatctgccattaattctatgatccttgcaaatagtctgcatcaaaagctttgggagagcagtccatttctgctgaaacaactgcctgggattggaattgtaacagcaaaggctctgaagactgctggagtttatagctttgagaccttggcaactgctgatgcaagaaagatagaattggccacagggcgcaattatccatttgggaatcatatcaaagaatcaatgtcatcattaccacccaaaattgacatacacatagaggaaactggaaacagacttgggaaatcgaccattactgtaacactaactcgtctatcacaggcagttaaatccagtaaacgcaactgtgctgacatggttgtggcctcagaggaagacaatgtgatcctctttcatgagaatataagcccatattctgtaaaagtttttgtgccatgcccccaaaatgcacgggtgactctgaaggttgatctaatatttgaagaatatgttggtcttgatgtccacaagaagcatgtagtaagcagggaagatggtttgtacgtgaccaaggagcatgggatagataaccttgaacctacgtacaatatcccttcagagatttgtttggttagctccaggacaactcgaacaagccgatctcaatctcacactgaacagaaccctctttccaaagaggtttatgtcatagaagatgatggcgctgctgtgagtgctgtcagtgctctcgagaaagctgatgatgcagtgggaaccataaaatttaacaacttggcttcactggaggtcccaagctttgatctactgcctgaagaagagtatggagctcctggaccagcagaggcagaatgcaaaggtgccacagacagcacgatttttgatcacatacgcaaaaagtccaaagacttccccactctgatgctatcaaaatccatggattgctcatatgaacctcttatactgaagaagatgaagatatcaagggaccagtttggagtaaagcatggttgtctgcatgcgggtgaggccaccacaatggattttgatcctgttgagcctagggtctctccaaccaatactgctgagaagttccgcgggatcctgggtagaagttcagaaaggagtcgcatgctgtttggaaaaatggatagcccgtttgagaagagcgagatgctgggcacgacgccagctgaaagttctcttcggttcgcgggtggaaaagacagctcactggagaagaacaagaccctgatcagaactccagctgaaaactctctccaaattgcagcacgtggaaaggagagcaaggtgagcaaggtgctgacaaatctagataaaagccctcttgggtttgcgggtggaaaggagagcaagatgagcaatgtaccgagcacttcagctgaaaactctctccagtttgcagctaggcgtgtcagatcatctgagaagagcaagatgctgacaactccatatgaaagctctcaagcgtttttgggcgaaaaggacagcccatcggagaaaagcaaaatccttattaatagtccagttgagtatcctttcaagaaaggaagtccaggtgaaaatcctttcaaaacatgtagtccagttgaaaactccctcaaatttgcagctcaacgtgacagcccatctgagaagaggaaatcctgcatcagcaatccccttccgcccttccagcaggctgttcaatgcacaaagcaagtaggagttgcaggtcaaccctttgatattaaggaatattgcaaggaaatattgaggagcagaaatgacagtcaaggaggcgatccttttgctggttacaagagtatcttttcttttctatgatctgctgaacagctagcaaatatgatcctgaacaatgtacattatgacactcaaataacagctagcaataatctttttcttgtcattgctgaccatcttctgcccaaagtaggaacataaaatgcatgtgatttggtcaaagtgtgtaaagagttgccccacaatttgtgtgttacatcactttattgtgcc

SEQ ID NO: 40323 - DNA, 3107 bp, Zea Mays
gtcttcttctggtttctcctcctttcccgtcgccagacttgatttcgtgtagctgcgctgctcgtttcttccgattgattttgttttgatatatatattttgatacttttccgtcgacacttcagttggcttcgtcatctggtcgctgggattttcggtctccgatcggttggttcccagtagactcgttcccttgaagcaacatcacctgttgtatcctgagttcgctctcaacttgtgccctcggatttttccggcgccgtagggcacgcggcgactcttacatacattatcaatcgaaaaccgagtcaaaccatcggcatctttgattttttttcaaaaaaggaagcatattttgtggttcgtgctggcaacggtgatgagtcctacagacctgtaatgactcctgcggagatgatcgcatggtctataagaacatctaagggactgagttgtctttgaattcctagtttgcacttttttgtagtcagcgaatgattacgaatccctcttgttttgtctgtctggcttctcttgatttcggtgtgcctgcgagccttgatggtttgtcggcagtgtcaagaatgtgaagcaaaaacaagcggtgttcctctcgctatccggcgcggaattctctgatgcgattggacgtcgaggaactacacttaactactcttttatttatattttttcttcgtgtttttatgtattgtcagaattttgtttcattagtaaaacagaattgcattttcttaattgaacagagcaaacactgaacaccgaactgaatggaggaaatagcattcatacctgataaaaaccagactcttgattgtttctttaggacaaatgctgccgcccatggagcaaacctgatttgtactgtctaagtagacctaagtattttaagtgtatactgagactaaccaggtaacaaaaactaaccaggataaataaaagtaattaaggataagtataataattgttttcaaataattttacaacctaatgtagtaaacattttaggcaaatggtgattaaattaattatttcaaaccgcatgagtttgatgttgatgctcacctttctcaaaggaacttggacctttgctcaaaggaacttaggtggtggtcaggttgagtttctgacgttcaaccttatgttcaaccttcttagcgaaaatctcctacagctctttagtaccttctactgttagttcctcatttaatgcaatattctactggcaatatcttctggaatcctatatgattcttatgtgcgatatgagggtagatagtacacggtgcaggaaatgcatgattgtttaccctcacttaattactctcttaattactctacatttagcaaggttggagaagtcccacttaggtaaggcttataaaactttctaaacgaatttacaccataatttattttctgttagtttctaaagttttttttttctgtttttaaatcataacccaaactattccacaaaacttgcacttcatatctcttccaagatgacaaataacataaataatgcatacaaaaattcccacaatatactcatgttgtttactatttatttctatatttccaagaaatcatcaacttcactttctaattcccaaaagccatttcatcgatagtacatactcatagtatatttatcacataaagaatcttatgagaaatctaacaaaatcgaaattatattttttttgacaattattttaattactatgagttttggaagaaaacacattttctttatttaaatgaaaaccctatataaaagtgtatggaaatcaacatgcaacatttttaacatatagatctattctcaagacatccaacaaaatttgtttcaacatttttggagttctaaaactcaagttattgttttccaaagctttttttgcatataaaaccgaaaatagaaaaagaaaaggaaaacgactttgcatgctagcccctaaactttactcaaaaaaatttcatagatccgcccttactccactattgacttatgtcattgacaatgccaaccccctagacttcccagtcttctcactcgcggccctcttctccttctcacatagcacagataaaaaaatgcaggcaggtatggagcatgacaaatgtgggcatggagagcacagaggagccttgaaacagatcttactggcagcgagcgacatgttacaagctggagcagggacgcggtgaacacaacgttgaaggacgacgacgaaaggacgtggtcggcctcgggtcgagggagctctggcgcggcgaggtcacttgaggaactttgcggtggtaatggaagaaggatggcgacgaggtccgtggaagaaagaaggtgatagagggcaaggcccgatctttcgtgacataggataacttgattgggtggagatctcgatgttgatgattcaaggctccgaacgaacggatcctgacaatcactacacctctgctccgttagttatcacccgtgacacacgagtgacctcgccacgaaggttttatccctgcaagcgcaatcaagaacacaagcaagaataggaagaacacaatcaaaactgtattggtcaggaggtggggtctcacaaactgatgaacaacgatactgttcgatgacagatatgatctaagaaaaatccaaacctaatggtggtggttgttgctgctaatatagagtttaggggcatgaaatcctctggactcgtccttaatgggctgcaacgcgatacacgaccatcagcccaacagacggtgtcacatcaccaaaaaagaatctagacgctcacatgtttttatgattcctgttgactccagatgaattttagctcaggactagtttggttggttagcttatctccttagttttccaaccataacaagcccaacccaatcggagtttagatgtgtcatgggcgtcccttttagtccagacttgtcatgtaacccgagatgaaagtgcagttcacttggacttgatctcgtccctgttgtggacgcccttgcctctcctccttgaaaccttggcctttcccaagtacttgctggtcctctccaaggttcctaattaacaaaac

SEQ ID NO: 40324 - DNA, 2242 bp, Zea Mays
ccgtgcggctggctctgcattctcccctccggccctcccctcgtcttctcttctcttctccccgcggagcgagcgagagaagcaaggccgctccgtgcccccaaccccgctcactgagcaaagcggaaaaagcgaggaaaatatcctgctccagcgaagcaccgcaggccgcagccgcagccgcagcagagaagagcagacgccatcgcccgcagccgccgcccccggagaatggtgcgggccggaccgcgacgggcgaaggagggcgccgcggcccccggcggcccccgccgccgctgatagtagtctacctgctgctaaccagccatctgaaggcacagtggtcgcacgcgaggggcccggattgattgggtgataggcggcgggcgcagatccaccgaccccctcgtcgtgcgcctgtgtctctggttccggtccgtgtccccttggccgcttggtggaggccggaggcgtggtcggtgcgtttggagtttgggtatggcgggtggcggcgagggggatcgcgtgggtgtcgggggagcccagcagttcgtggaccggagcaaggtgaggattcttctctgcgacggcgacgccaccagctcccgggaggtgctgcggctcctctgcaactgctcataccatgtgacctgcgccaagtctccgcggcaggtgatcaatatcctcaactacgagggcggcgagatcgacatcatcctggctgaggtcgatcttccggtctccaagtgcttcaagatgctcaagtacattgcccggaacaaggacctgcgtcacatccccatcataatgatgtccaacagagacgaggtgtctgttgttgtcaagtgcttgcggcttggcgccgccgagtacctggtgaagccgctgcgcacgaatgagttgctgaacctttggacccatgtgtggcggcggagacggatgcttggtttgcccgagaaaaacttcttcaatgacaacttcgagttggtgctctcagaacctagcgatgccaataccaatagcaccaccctcctctcagacgagaccgacgataggcctaaaggaaacacgaatcaagaaacaggcacctcaaagcaacttgaatacgagtctaatccttcggttgctgagcccgaccagagagaaaagatggagggtgttccaggctctgccctagatgccagtaaaaaatcctctccaagaagagcgttttcacgccctataaaaactaacctgagggttgccgagtcgtctgcatttctagcatatgtcaagccaagcaccccagccaccagctcatttgacagcgaattacaaaggggtggcagccgattagattccttggataaccagggtaattgctctagcgcaaccgatagaagtgacactggtactgatgtaaatattcggagtaaagaagcttttgagatgcctgcgcagtaccctatgggatggtagagcacaacatggcactttcgtcggcgcaagattttcaagcaaacataaacaatgctcaagcacatacaccgccagcgatgcttcctcagtacaatgtttatcctcagtgccatggtttacctgtgataccatcatttcagtttaatccttctggcatgagtacgcactcaagtcatttaccaacgcaaaatgtgtggtcatcggcatcgagcacaccaccagtgcctgaggaaacatgcagtcgctctgaaaggagggctgcagcacttgccaagttcaggctgaagaggaaagagcgctgctttgacaagaaggtgaggtatgtgaaccggaagaaactcgctgaaacgaggccaagggtgcgaggtcagtttgttagacagccaaccaatacggatgtcatcagcattggagatgatatatctgaagacgaagatgacgatccatcgtccagggaggtagatatggtttcttctccagagtagtagtggagaggtcctccatgtgaaaaaatagactgcagatggttactgctcatcttgttacaactcagtagacctaggcaatacaccctttttgctcacacacagtattacatttttgtccctaaaacatgtggctgttaccctggttgctttaatgaagaaatcatctttgataaagtgtagctgaagttttgctagttattgttgcacagaccagtctaatcaatatgatcttatggcaggataatcttttgagaaaaacagggctattattgtacattcctcctattattccttat

SEQ ID NO: 40325 - DNA, 767 bp, Zea Mays
gttgaacttgaacagcacgcaagaatggaggcggaaagagctggagcgtgtctccccctcccctaccaggcgaccaaatccatagtacggaatggacggcgatgtctccatccaaggcgacctgtacagctatggcgtcctcctgctcgagatgttcacggggaagcggccgacggatgcctcgttccagggaggccggactctgcagagctacgtcgcgtcctgctacccggacaaggtactggaggtagccgaccctggcctacggcatcagctgggcaacgggtgtttgagcggaggggacgtttgttgcgacgagatcgacgccgaaaagctgcgcaggtgcatggcgtcggtatttcgagtcggcttgcaatgctcccaggaaccacccagagcgagaatgcatgtcgggactgccatcaaagaactcgaggcggtcaaggatgccctgctaaacgactgagtctggatagaatctctcggcaacagaaacacaataaaacctgacagaaaaaaattgacggttagtgaataagttttagggacaacatcttcatttcttctaaagcggtagcaaacatattgttttcagattatctgctttgacttcggcaacgtgcttcgtctgagcgcttgaactgaatcttcttccactttcctatttacctgtattgatacatataaattagttgctcctgaaatagattgtgaaatggctaataccagttagttttgaggaccttcgataaagacattccttcaac

SEQ ID NO: 40326 - DNA, 1405 bp, Zea Mays
gttgaacttgaacagcacgcaagaatggaggcggaaagagctggagcgtgtctccccctcccctaccaggcgaccaaatccatgtgcgtgctgctcctcgctgctgcttccatgctgagcagcagccataccaccaccgccgccgcacatggtgctgcttctgctactgcctctcctccaccagcggcgttgctgatcgccacggccgacgaccagcaggctctgctcgccttcaaggacctcgtcaccggcgaccctcacggggtgctgacctcatggaccgccgctggcaacacgaccgccggcgtctgcagctggagaggcgtggggtgccgctcccgccggcggcgccctggccgcgtcacctcgctggagctggcgtccgccaacctgaccttcaccgtctcgcctttcctcgccaacctgacgttcctcggcacgctcaacctctcgcacaacttcctgtcgggcaacatcccccgggagctcggcttcttgccccgcctctcgtacctggacctccggcacaactccctgcagggcgtggttccaggatccctcgccggcgcctccaggctcctggtcctgcagctggaggtcctggacgtcggctccaaccagctctccggtgcgatcccgcagtcgctcggctcgctctcgaggctcacgtacctggggctgtacctgaacaatctctcaggaagtgttccggcgtctctcgagtacggaatggacggcgatgtctccatccaaggcgacctgtacagctatggcgtcctcctgctcgagatgttcacggggaagcggccgacggatgcctcgttccagggaggccggactctgcagagctacgtcgcgtcctgctacccggacaaggtactggaggtagccgaccctggcctacggcatcagctgggcaacgggtgtttgagcggaggggacgtttgttgcgacgagatcgacgccgaaaagctgcgcaggtgcatggcgtcggtatttcgagtcggcttgcaatgctcccaggaaccacccagagcgagaatgcatgtcgggactgccatcaaagaactcgaggcggtcaaggatgccctgctaaacgactgagtctggatagaatctctcggcaacagaaacacaataaaacctgacagaaaaaaattgacggttagtgaataagttttagggacaacatcttcatttcttctaaagcggtagcaaacatattgttttcagattatctgctttgacttcggcaacgtgcttcgtctgagcgcttgaactgaatcttcttccactttcctatttacctgtattgatacatataaattagttgctcctgaaatagattgtgaaatggctaataccagttagttttgaggaccttcgataaagacattccttcaac

SEQ ID NO: 40327 - DNA, 1676 bp, Zea Mays
ctcccagatacacctcgtgccgaaacccctcgcatcctggaaaaaaactctctctctccggaatcgtttggcctccagatcctagccaggtggcggcgatcgcgtgccgccggacgtcgtccgtttctggcgtctcgtgcaggaggcgcgccgccgccggcggcttgatcacgccgctggaggaacgccgatcgtccctgcctctgtttcgtcgcatccggcggctcacttagatggaactatcaaggatttccacagaaaaatttgatgatgcagttaaatccatgactgatgctggtttcttgaaggaaactgttgaacaagcactgaaaaaactgataatattatatgaggaaaactgggagcatatagaagctgataattattcgactttggttgaagctttacttggtcattcagatcccaaagcagggcagaaaaagcgagctgagaagaatctcaatgtggattcagaccattataataagaagctgaagattaaaggtggtcagacgcctagatctagtatgcatggcagtgccaagaaagaggcatcaaaagacagtaccatgatgtcaatgatataacaagaggcgaagaatgtgtgagcattccaatagtctgtggagaggatggggttcttcctcctccatttcactacatatcacaaaataccaccttccaagatgcctgtatcaacctctcacttgctagaattggagatgaaaattgctgttctggttgttttggggattgtctagcggagccacttccttgcgcttgtgcaagagaaactggcggagactttgcttatacgagagatggcctgcttaaagaaggatttctagatgcgtgtgtctcaatgctccgggaaccacttaaacaaccgcacttctactgtaagggtgtctgtcctattgagcaaataatgaagggagtcagctcagcgaaacctgatgcttgtaaagggcaccttattaagaagtttatcaaggaatgctggataaaatgcggctgcaccagaaattgtggaaaccgtgtggttcagcgaggcattactcgcaaactgcaggtgtttttagcttctcggaaaaagggatggggcttgcgttctgctgaaaatcttcctcgtggtgcttttgtatgcgagtatgttggtgaaatattaacaaacactgaactacataagcgaaacactgagctatatggaaaaaataataaaaaggctggtaaagcaaggcatacataccctgtgaatctcgatgctgactggggcactgaaggtgttctaaatgacgaggaagccctttgcctagatggtaccttttatgggaacgtggcgaggtttatgaaccataggtgcattgatggtaacatcatcgcaattcctgttgaagttgagacgcctgaccaccactactatcatctggcattcttcacaacgagggaagtagaggcttttgaagaattgacatgggactatggaattgattttgatgatgtcaaccatcctgtaaaagcattcaaatgccattgtggaagcacattttgtcggggaagataaaagacctatctcaggaggatgtaaatctctggtgttgtcctgagaatattcaaggctcgtggcgggttcttttggaccatcctacttattgcaatgctttgcgtgctaaaag

SEQ ID NO: 40328 - DNA, 2172 bp, Zea Mays
aacgaaacgggaacgaatcgccgtgcctcccctatcgctggtatccgttgtccagcactccagcccccgtccgtttcccacgaattccgcgtcccacccggccacactttctctacgagcgccccccatctcacccacccaaaattaaaatcctcccggaaatcagagacgcgaatccctcgccccaggccccgaaacctccgagttctctcgccaattcgatccgcctcaccgccgccgcccgtccgccggtcggccttgactgctccgttgcacgtggcggttcgcagcgcggaatctaccttgtgttgagagatccggggaaacccttgttcccggtcgttccggctcgaatcttctgcggactggcaatgtaagcgttctccatcggagggcgacgatctacggggcggttgttggcggggtcgcgggaatggagcacgtgttcggagggaagtttaagcttgggaagaagatcgggagcggatctttcggcgagctctatctcggcgtcaacatacagagcggcgaggaggaatctgtaaaatcaaggcatcctcagcttcattatgagtcgaaactatacatgcttctccaagggggaactggaattcctcatttgaaatggtttggggtggatggggagtacaatgtcatggtcattgatcttcttggtccaagtctggaagacgtattcaaccagtgcaacagaaagttttcccttaaaacagtacttatgctagctgatcagatgataactagggtagagtacatgcacacgagggggttccttcatcgtgatatcaagccagacaatttccttgtgggcttaggtcgtaaagcaaatcaggtttatatcattgactatggccttgcgaagaagtatcgggacctccaaactcataaacacattccatacagggagaacaaaaacctcacaggaactgcacgatatgctagtgtaaacacccatcttggagtagaacaaagcagaagagatgacttagagtctcttggttatgtgctgatgtacttcttaagaggaagccttccttggcaaggcctgaaagctggaacaaaaaaacaaaagtatgacaaaattagtgagaagaaaatgctaacctcaattgaggccctttgtaaatcttatccatcagaattcattacgtacttccattattgtcgctctttgcgttttgaagataagccagactatagctatttgaagaaaaatttccgggatttattcatccgtgaaggttaccagcttgattatgtatttgattggactgtgtcaaggcaagctgtggacaataacagattgcgactgagcgggaagacaggtggcttggtgggaccatctgtggatagggctgaacgagctgcagcaagacaagatgttccagatagattcactggtcaagctggtgcttttgctagaagaaccggctctggttctggtcaatacggagaacacacaaagcacaggactctgttggattcacttatggcatccaagatggctgttgattcagataaaagaaagcattcatcatctcggaatggaagcacatcaaggaaggctcttctgtcaagcagccgaggttctggagatcccagcgacccaaatcgcagtagccacctagtcccgaccaccagcagcagcagccgtccatcaaccaatcaaaggcttcaccagtcaactggacttgagggcaggacctcgtcattcccaaaacctggaagaatcggccaggatgatcccactatgaggagttttgaacgccttactatcagcgcagagaggaggagatgaatctttggaggtgcaaaaggtctgaccattgacgagtatactgatttcattgaatattcattcggttccagatgatgcttactgatgagcaagtcaaaagattatgtactgtgcatgatgctgagctcttcacattgcgatgctcgtcgaatcttggcacagatttgagttctgtacattcgttttccaaacggttagcgaagcatttagcaccccgttagggacgtgcaaaatgatgatgattaacacttatataatgacaatgaaataaaaatagctcgctaggctagctttacctttgatgtagattttcatttgtgcaatggagtattagacataaggtcatgtttgatcca

SEQ ID NO: 40329 - DNA, 1320 bp, Zea Mays
gatcccgaacatgagttacatagtactagtaccatactaccattgtaagaaaaggactacttatcacagggagaacaaaaacctcacaggaactgcacgatatgctagtgtaaacacccatcttggagtagaacaaagcagaagagatgacttagagtctcttggttatgtgctgatgtacttcttaagaggaagccttccttggcaaggcctgaaagctggaacaaaaaaacaaaagtatgacaaaattagtgagaagaaaatgctaacctcaattgaggccctttgtaaatcttatccatcagaattcattacgtacttccattattgtcgctctttgcgttttgaagataagccagactatagctatttgaagaaaaatttccgggatttattcatccgtgaaggttaccagcttgattatgtatttgattggactgtgtcaaggcaagctgtggacaataacagattgcgactgagcgggaagacaggtggcttggtgggaccatctgtggatagggctgaacgagctgcagcaagacaagatgttccagatagattcactggtcaagctggtgcttttgctagaagaaccggctctggttctggtcaatacggagaacacacaaagcacaggactctgttggattcacttatggcatccaagatggctgttgattcagataaaagaaagcattcatcatctcggaatggaagcacatcaaggaaggctcttctgtcaagcagccgaggttctggagatcccagcgacccaaatcgcagtagccacctagtcccgaccaccagcagcagcagccgtccatcaaccaatcaaaggcttcaccagtcaactggacttgagggcaggacctcgtcattcccaaaacctggaagaatcggccaggatgatcccactatgaggagttttgaacgccttactatcagcgcagagaggaggagatgaatctttggaggtgcaaaaggtctgaccattgacgagtatactgatttcattgaatattcattcggttccagatgatgcttactgatgagcaagtcaaaagattatgtactgtgcatgatgctgagctcttcacattgcgatgctcgtcgaatcttggcacagatttgagttctgtacattcgttttccaaacggttagcgaagcatttagcaccccgttagggacgtgcaaaatgatgatgattaacacttatataatgacaatgaaataaaaatagctcgctaggctagctttacctttgatgtagattttcatttgtgcaatggagtattagacataaggtcatgtttgatcca

SEQ ID NO: 40330 - DNA, 1223 bp, Zea Mays
caaattagctgtttacacggtgtggtatatgtgttagctttcgtcttcgcctcggtttgggagccacatggatcggggcacagagattccgtgtgatcggggcacagagattccgtcgtaaaaaaatcgtccttcctgcagtgtcctcgccgacagggaaagccgtgttgcaagaaggggaattccgctgcgagatccgtgaacggttcagagatggcacagacggtgttcaccccctctttggaagcgatgaagcatgtcaaggcagagaacggagtcattctcaccaagcccttccttgatgtctgcaagcaaatattgcctgtcctcgataaatttggaggtgctatggcaattgtaaagagtgatatcggcggcaatatcacaagactggaaaacaagtatacttcagaaccatcaaagtatgaacacttgtacagcatggttcaggaagaagttcaaaacaagaccgcaaaaggttcctcaagctgcacaaatgggcttctgtggctgacgagggccatggacttccttgttgagttgtttcgtaacctgcttgagcatccagactggaccatgggtcaatcttgcactgattcatacaccaagactttgaagaaatttcatggatggcttgccagttctagttttacggtggcaatgaagcttgctcctaatagagagaaatttatggaggtcattagtggaaccggtgacatcaatgcagatattgagaaattttgcacgaccttctctcctttcctcaaagaaaaccacaactttctggcgagcgtcggtcttgatgatctgaaggcttcatagatcaatctccatgctgattacaacaaaataagcatgtcttacgaaactcaaagtgttgccgagggtatacctgtttcccgtagccatctcccccttgaaaaactttaggagatggtaataatttgtcagcatgattgaccatggctacttacgcagagaattgacaccactcaacaaatttagttaccgaactctcgatcctgtgttacagcaaatcctatggttatgtggaactctggtgctgtaattctcttgtatgctacccagtatgccgcaggaaatcataattcggtgttccattgcagcaggaccatcgtgtcacttgtaggctacccatattgactttgtggctcagccagctgcccacttccaacacagttgagcgagaacatctagatgac

SEQ ID NO: 40331 - DNA, 1225 bp, Zea Mays
agctgtttacacggtgtggtatatgtgttagctttcgtcttcgcctcggtttgggagccacatggatcggggcacagagattccgtgtgatcggggcacagagattccgtcgtaaaaaaatcgtgtcctcgccgacagggaaagccgtgttgcaagaaggggaattccgctgcgagatccgtgaacggttcagagatggcacagacggtgttcaccccctctttggaagcgatgaagcatgtcaaggcagagaacggagtcattctcaccaagcccttccttgatgtctgcaagcaaatattgcctgtcctcgcccctgcttttatggaccagataaatttggaggtgctatggcaattgtaaagagtgatatcggcggcaatatcacaagactggaaaacaagtatacttcagaaccatcaaagtatgaacacttgtacagcatggttcaggaagaagttcaaaacaagaccgcaaaaggttcctcaagctgcacaaatgggcttctgtggctgacgagggccatggacttccttgttgagttgtttcgtaacctgcttgagcatccagactggaccatgggtcaatcttgcactgattcatacaccaagactttgaagaaatttcatggatggcttgccagttctagttttacggtggcaatgaagcttgctcctaatagagagaaatttatggaggtcattagtggaaccggtgacatcaatgcagatattgagaaattttgcacgaccttctctcctttcctcaaagaaaaccacaactttctggcgagcgtcggtcttgatgatctgaaggcttcatagatcaatctccatgctgattacaacaaaataagcatgtcttacgaaactcaaagtgttgccgagggtatacctgtttcccgtagccatctcccccttgaaaaactttaggagatggtaataatttgtcagcatgattgaccatggctacttacgcagagaattgacaccactcaacaaatttagttaccgaactctcgatcctgtgttacagcaaatcctatggttatgtggaactctggtgctgtaattctcttgtatgctacccagtatgccgcaggaaatcataattcggtgttccattgcagcaggaccatcgtgtcacttgtaggctacccatattgactttgtggctcagccagctgcccacttccaacacagttgagcgagaacatctagatgac

SEQ ID NO: 40332 - DNA, 932 bp, Zea Mays
aagctgtagcgtcttcctcttggtcgtccgaagagcggcggtgagcgtcgaggggcccccgccggcgcctgcagcacgccctgtcgcttcatcctgcaagcgacgcacgccatcgacacctcccctacggcgatcggagccgcgatccaacaccctcaccggaatcgcggcggattccggcgccggtggccccgctctggatctgcattccgcgcaggggcttctcctgatcctgaccgcctcgcaccctcgtctctccaatctagccatggagagggtttcatcagctccagaaatggatgatgttatctcaactgatcagtcaagcagatcaacaaaaagaagggctaaagtttgggattatgttgattcagagctagtagatgggaaagagaaggcgatctgcaaatactctggtagaattcttggaaaaaataggacatcactatctcctgaaacacttgaagctttagtctgtgccaaagactggttgattggattcaatgatgaagaagaaggtgaaccaatgacaggaaagcgaatgtttgattcagatgatgaagaagatgattgggaaatttgattagcgagctccgtccgaaagtccaaatcttcagctctctccttgacgcatgcccggatcgatcggtccagctctacccaccggaggaggaggcagatcgtcaacgggcagctgactaaggtggatccacggaggaggctctaaattggacagttctgtgtatacctataaatttgacagttcattgtgaaaaccgtctctaaattgatgtttgctgtcagttccgggactgatattatgcttatgatgtgtattttgagacagatggatgtaaatagttttttggtagacttgcgttctgcaatgtgtggccatgtatgtgtgagcccatggattatactaattcaat

SEQ ID NO: 40333 - DNA, 3261 bp, Zea Mays
ggcacttataagtcgcaacggggtttactcctgctcgttaccgtgaaaaacaagcaccaccgtagctcagttacacacgacaccggcagacccgctcgccttcgtctcctcctcctccacctcccgctctcactctactggccggccctcgcctcggtgcgttcccgatgatcacgttcgcggacctgacggagccggcagcggccggcgccgaacggtgcgtggaccggcagctgtggctggcgtgcgcgggcggcatgtgcaccgtgccgcccgtgggcgccagcgtctactacttcccgcaggggcacgcggagcacgcgctcggcctcgccggtgcggccgacctctccgcggcgcgcgtcccggcgctggtcccctgccgcgtcacggcagtgcgctacatggctgacccagacaccgatgaggtcttcgccaggatccgcctcgtcccgctgcgcggcggggacgcggacgcggacgcgggtggcgtcgaggacgacgcggccgcggcggacgagcaggagaagccggcctcgttcgccaagacgctgacacagtccgacgccaacaacggcggcgggttctccgtgccgaggtactgcgcggagacgatcttcccgcggctggactacgccgccgacccgcccgtgcagaccgtcgtcgccaaggacgtgcacggggccgcctggaagttccgccacatctaccggggcacgccgcgccggcacctgctcaccacggggtggagcacgttcgtcaaccagaagaagctcgtcgcaggggactccatcgtgttcctccgcggcgacagcggggacctgcacgtcggcatccggcgtgccaagcgcgggttctgcggcgccggtggaggcggaggcgacgactcccctgcggccgggtgggaccattacgcgggcctcatgcgagggaatgtgagcccgtgcgcggccgccaaggcacggggcaaggtgcgaccagaggacgtggccgaggcggcgaggctggcggccgccgggcagtcgtttgaggtggtgtactaccctcgcgccagcacgcccgagttctgcgttcgcgccgccgcggtccgcgtggcgatgagggtgcagtggtccccagggatgcggttcaagatggcgttcgagaccgaggactcctccaggattagctggttcatgggcaccgtcgccggcgtccaggtcaccgatcccatccgctggccgcagtcgccttggcgccttcttcaggtgacctgggacgagccggacctcctgcagaacgtgaagcgggtgagcccatggctggtcgagctggtgtccagcatgccggccatccacctcgcgtccttctcgcctccgcgcaagaagccccggatcccggcgtacccggagttccccttcgaagggcagctcctgaacccggcgttcccgcccaacccactgccgcacggccagcaccaccaccatttccttcactcccactcccaccagcaccaccacccacccttcttcccgttcccggccggcagtgctcctgcagccatacagggagccaggcatgcgcaattcgttccacctttctcagaactccacctcacccacttgcagccgagcctgctgtaccccaggctccgccgtcccgaccatgtcggtccgacgaccccgatcccggcaagagtcagcacggacctgaccatcggaggcgcggcggcggcggcgcgcgacgacgacgacgacgacttcccgtgcgctcctccgtcgacgggtgccaacaggcagaagcccgacgccaagccggcggggctagtgctcttcggacgcacgatactaaccgagcagcagatgagccgcagcggcgcaacctccccagcggcgaccggcaacagctccacgtgctggaacgccgagaaggggcccaacgcctcggagggctcggggggatccggcgtcatccagaccagcccggccaaggccgcgtcgtcggagcggccgccgtggctcgggggcgacggcagccagcagcagcaggcctccggcgagctcgggctggggctggagcccgggcagtgcaaggtgttcgtggagtcggacacggtgggccgcaacctcgacctcgcggcgctgcgctcgttcgacgagctgtacggccggctgtccgggatgttcggcgtcgcgggggcggagctgcgcagccgcgtgctgtaccgcggcgccgccggcgacgagcccttcagcgatttcgtcaggtcggcgcggaggctcaccgtattgaccgatgctgggagcgacaaccttggaagctaaacgacgacgaggagcagtgagagagaaccgttccattccagccgcgagggtttatgttcttcggtactggtactgttagactgtactagtactgtacaggtgaggccgggagctaaggttttgttcaaaatccgttccaagtctgaactctgaagacatagagagagagggagagaggtttcagatcgtaaggcagcgccaccatgaccaggcacgttgccttcatctcgtgtgtgtccatccaaaaaatcgctgtaaaacttggggggtaattaaaaccctactagtactactactactcatcttgttccttgtctctctctctgtatcctcgttctgtcgttcattctcatgggcgcttgaatgccccccttctggccaaggccaatgcatctgaacggcgtgtacgggccaaagggggcaaagccgtagcgggagcagcaacactgcgcgcgcgcagacgcaggttttgaatgtgctggcgctgctactgctgccgcaggcggcagcagctgttgctgctgccgggataccatcactattcactgcttgctccgtgtccgtggccaccaggcgacttgttggctgttgcattttgcctactagtactgtagctccctagcctgccgctgcctttttctgtgtgcatgctgatggtgagtgaggtcactcaaaagatcgcggagcaagtgctgggggtgggggcgtaaatgctccggcctccagttcatccagccagccagcccagccggagaaataactgccatgtcttgtttgcctagctgaaagggggattttggcctgcctcactgccctgcaactgcaagcacgccctcatccccattcccatgtgcggttcggttcgactataggtgtacatttgtgctgtgcctaataggccggcccaaagcacataatttttggcacggcccatatctggcacggcccaacctaattg

SEQ ID NO: 40334 - DNA, 1379 bp, Zea Mays
atgcaagagtgttagctgttgtttatgccatcatgacgacaagaaatgaggatctaacttggcaaatgagggcaatacgagtgctacctatgttcattcttcctgctgtatcctctgtcatatattcaacagttgttaacttcacaaggatgtttgagcagaaagaccagaagacccttgaaaaattgagggctgagaggaaagccaagattgatgagcttaaagagagaacaaattattatctaacacagcagcttattcagaaatatgatcttgatccagccgcaaaggctgcagcagcttctgttttggcatctaagcttggggaggagactggcttaaaagttcatgttggagaagaaccaaagctggatgctgcagtggccagaagcaatgatgttgagatagtaccttcagatggtttgagaaacaggaagcaacccagtgcaagaggaagcaggactgggagccccacttctcataccccagcacagggaactgaaactaatctacctcctgctcctgctagtgctggcctggaaactgcaccagctccagtggtggtagagcatcatcaaggttcaggggctagtgatggtggtggatggattgcaaagattgctgccttacttgtgggggaggacccatcacagtcgtatgctttgatatgtggcagctgccatatgcataacggcttggcccgaaaggaagattacccacatgttacttactactgcccgcattgtcatgcattaaacacatcaaaacagtccatggggcaatactcaggctccaactcaggccggtcgacccctgttgttctggctgatggattatctacttccagttcagtacaagagactgaattgagtaacctgacgacattgcaggagctacccgaggaaggaaagacagacaagcaacaagtggaggcaagttgatggttcttatgacttgtactgttgatgtgtgtggaactagtttatctttagacttatatcgtcatgtgttcaactggtggagccacaaatttagcactgttgtaaattggaaatagtgagtgatatgatcctcggaagcatagcacgcaaaaacaagaaatgggacatggtgtacatccttgagtggatgattttttgttgtcatatagagcgcgaagtcttcttcctgcgagacaaaaagctatatgacgttcagacaagatggtggtgcaggatataacataagatcattgcttgttcagagaacagcgacatgtagaattttttgcgtttgtcttgaccttcggtcttttctttgttgtttgttacattaccaccttacagcatttcgtacacagtttccttatgatgttgaaaccgtacttttcatttggcgtt

SEQ ID NO: 40335 - DNA, 1857 bp, Zea Mays
ctatgtgtttatttgcataggtaggtgatacgtgggaagcaggcatctcaaggttgcaatagacagtgtttgtgtttagaatattgtgccagtgcctcaattttattagatgaacattgggacgtcagctatttgactggaccaatagtgtgtaaacggaaaatgaacgccgctgcttttctgtcaaacttaagtcccctttgagttcatcatgggatctgttttatttttcactatgctccttcagttatgtgaatcattgttcttttttttttctgggggggggataataaagttatggtgtttgcattatgaatgcatgttaccatgattttaggatttcatagagttttaaaacttcgctgccgttgaaatactaaaatagatgctcctccacatgatacttatcttttctgctcttacgatattctcctcctttttggttgttgattcattgtatatgatgcagcttacttttcatattgaacctgtactcttgtagtgacttatcttcactgcatatccctagcttgtagtttctactggtttgattgttcagtcctgttctcaggtgttagctgttgtttatgccatcatgacgacaagaaatgaggatctaacttggcaaatgagggcaatacgagtgctacctatgttcattcttcctgctgtatcctctgtcatatattcaacagttgttaacttcacaaggatgtttgagcagaaagaccagaagacccttgaaaaattgagggctgagaggaaagccaagattgatgagcttaaagagagaacaaattattatctaacacagcagcttattcagaaatatgatcttgatccagccgcaaaggctgcagcagcttctgttttggcatctaagcttggggaggagactggcttaaaagttcatgttggagaagaaccaaagctggatgctgcagtggccagaagcaatgatgttgagatagtaccttcagatggtttgagaaacaggaagcaacccagtgcaagaggaagcaggactgggagccccacttctcataccccagcacagggaactgaaactaatctacctcctgctcctgctagtgctggcctggaaactgcaccagctccagtggtggtagagcatcatcaaggttcaggggctagtgatggtggtggatggattgcaaagattgctgccttacttgtgggggaggacccatcacagtcgtatgctttgatatgtggcagctgccatatgcataacggcttggcccgaaaggaagattacccacatgttacttactactgcccgcattgtcatgcattaaacacatcaaaacagtccatggggcaatactcaggctccaactcaggccggagctacccgaggaaggaaagacagacaagcaacaagtggaggcaagttgatggttcttatgacttgtactgttgatgtgtgtggaactagtttatctttagacttatatcgtcatgtgttcaactggtggagccacaaatttagcactgttgtaaattggaaatagtgagtgatatgatcctcggaagcatagcacgcaaaaacaagaaatgggacatggtgtacatccttgagtggatgattttttgttgtcatatagagcgcgaagtcttcttcctgcgagacaaaaagctatatgacgttcagacaagatggtggtgcaggatataacataagatcattgcttgttcagagaacagcgacatgtagaattttttgcgtttgtcttgaccttcggtcttttctttgttgtttgttacattaccaccttacagcatttcgtacacagtttccttatgatgttgaaaccgtacttttcatttggcgtt

SEQ ID NO: 40336 - DNA, 2890 bp, Zea Mays
ctcatcaaagtaaccatggatgtcatccaaactatgatggtaatttgcaaagcttgactgaacaaatctttcttcaaacaaaagtactcagttctgagagacttccacattagacatgaaacaagaaacattggtgaatctggtcctcgggaacaataaaaaagagctagagaattttttatcaaacacgtagaagagctaaatatcattatattaagaactacagattcgacagctcacaaagtagtaaaataatcacaatgcaatccaattcaaaataaacttccagctggtgagcgagaaccaacttttcaaagagaagaaccagtaatcacttcacaagaagaagaataccatccaatgcacagtcagtttgttttttattgcagtcaaatgtcctcaataactaggtactcacatgggtcttacaagaagtggctaaccaaagctggcacaactagatggactatcattagcacttacatatacgaaaaaataattcaaccatgtcagcagcagaacactatagtacacagagcaagagtcttacattcagtacaagttaattatatcaaaagcacatcatagagacatagatgaatttacaaacacgagtgcatgtttctgtttgtaaagatagtactaacatcatggtaggacgtaggagcgagttgtgggacttctcaggggaattgaacatgagatttttcaccgcaacaaagcaccaaaactgaaacgaactatccaaagttgacgacacaaggttttaatcatgccttcagtcttgacaaatcgaagaggagattagcaaaataaccttttgaaaactagccttctctagggactgtacaataccaacagaagctaacaagaaggcagagagtccaaaccctccagcaccttcggtggacactggacacagacacctcaagatggagaccgctgcagacaatagatcgaactggtcgtacactagagaagcagcacgggaagactcgaacgaaaaggaagaaaccaaatcaagcaacgatgattacacgaaagacggtggcccccaggcgctatccgtgaggagctcgctttccacatcgaattccacggcagcccgagcgaccgccaagctcccttcgttccactaggtcacgcaaacgaacggaaaaaaaaagcactaacgcacgagcgcagcggcccggccgccggccggcaccaaatcggggtgttttccggatcacgctaccgaactccatgagcccagtaaatcaagaaacgcacctgtgccggagccgcagcgcagcagcggcagaagacgcaagggtgcaggggggcgcagcagctatagcgatcgatcctgccgtgaatggagtgtgaggtggtggtctcttcttcgccgtgccgtgtgcttggttggccttctttaaatggtggtgccgtccggctttgtgcgctccaatggaaaaggcaggcagggtgcgggggagaggaggggagagcgcaactaaaaagcggcggccccgccgaccccaaaggcgagacgttgctcgtttatatgcgcccaaaaaggaagggccgggggcgggcaaagcgcagttcagttgcacaacttgcggcacaccgcaaacgagccgagccgccgctgccgccgccgtgatggcccgaagagaggaggacgaggggcagacgagatctcttggaattcagcgctgcgggatggaaacactggcgccgggattcccaatgcctgccaaacaattattgccaccataaactaactaattaaaagagggaaagaattctccctctgtctcgtggtggtgtgcgtggtattcgctcggtggcatcaggaggtaggagtaggacatgacagctccgagctcgttttttttaagtcgagtgcggccgagcacagtggtggcgccatcgcaggtatggccatggcggattcattcacagtggttgttgatgtgtcggccggagtggtggtgggcggccggtcaactgggacggtaaaagagacaaagatctttttttgcgttctcgcttatcctctcgcctcgcgcgatccaagtgtttgttgcgcagagatgtgtctagctctgcatctgctgctatactggcctacttgtgatgaactgtggaggaaggtgcgggtttgcttggtcctattctctcctaccgcaagaagtagactagaccggagattacaggtgtcagtgttctgaactggctctgaaaccttcctcttttttcgtgaggaaatggtcatggttggatgtgcctggatagtggatactgatgaagaatggcagctcaaggttgtgtttctggggtcactgatatttggatggaagtagcatgcaaacacctgactggataagtttacagaaaacaaaaggatgagcatagttcctcatctctgtacggctcctagagtcccagtaagccgcgtaagtgatacctagaactggaactgtgtagtggcatattcttgctgaacaaatcacaagtacatttattactaagatctcgcgcagaacgtggaaaagacttcttcaggtttcagccttcttcagacatgttttttttacgtcaagttacactacttccatgtaagcggcggcggtggcactagtttagtatatgggaaatctctggatctgttgaccatgcttgcttacatttcgcaggggcgggatggatatctacgcgtgctccctctgacgcatggaaattaatttgctcagctgctggtgcaaataaataaataaataaatttactcctatgttagcaagctcgtggacctcaaggtctgattgtataattcaggagaaacgtgcaagtaattccacattgtctcttttaatttgttagttttaatcaaagtggttcacg

SEQ ID NO: 40337 - DNA, 3105 bp, Zea Mays
ctcatcaaagtaaccatggatgtcatccaaactatgatggtaatttgcaaagcttgactgaacaaatctttcttcaaacaaaagtactcagttctgagagacttccacattagacatgaaacaagaaacattggtgaatctggtcctcgggaacaataaaaaagagctagagaattttttatcaaacacgtagaagagctaaatatcattatattaagaactacagattcgacagctcacaaagtagtaaaataatcacaatgcaatccaattcaaaataaacttccagctggtgagcgagaaccaacttttcaaagagaagaaccagtaatcacttcacaagaagaagaataccatccaatgcacagtcagtttgttttttattgcagtcaaatgtcctcaataactaggtactcacatgggtcttacaagaagtggctaaccaaagctggcacaactagatggactatcattagcacttacatatacgaaaaaataattcaaccatgtcagcagcagaacactatagtacacagagcaagagtcttacattcagtacaagttaattatatcaaaagcacatcatagagacatagatgaatttacaaacacgagtgcatgtttctgtttgtaaagatagtactaacatcatggtaggacgtaggagcgagttgtgggacttctcaggggaattgaacatgagatttttcaccgcaacaaagcaccaaaactgaaacgaactatccaaagttgacgacacaaggttttaatcatgccttcagtcttgacaaatcgaagaggagattagcaaaataaccttttgaaaactagccttctctagggactgtacaataccaacagaagctaacaagaaggcagagagtccaaaccctccagcaccttcggtggacactggacacagacacctcaagatggagaccgctgcagacaatagatcgaactggtcgtacactagagaagcagcacgggaagactcgaacgaaaaggaagaaaccaaatcaagcaacgatgattacacgaaagacggtggcccccaggcgctatccgtgaggagctcgctttccacatcgaattccacggcagcccgagcgaccgccaagctcccttcgttccactaggtcacgcaaacgaacggaaaaaaaaagcactaacgcacgagcgcagcggcccggccgccggccggcaccaaatcggggtgttttccggatcacgctaccgaactccatgagcccagtaaatcaagaaacgcacctgtgccggagccgcagcgcagcagcggcagaagacgcaagggtgcaggggggcgcagcagctatagcgatcgatcctgccgtgaatggagtgtgaggtggtggtctcttcttcgccgtgccgtgtgcttggttggccttctttaaatggtggtgccgtccggctttgtgcgctccaatggaaaaggcaggcagggtgcgggggagaggaggggagagcgcaactaaaaagcggcggccccgccgaccccaaaggcgagacgttgctcgtttatatgcgcccaaaaaggaagggccgggggcgggcaaagcgcagttcagttgcacaacttgcggcacaccgcaaacgagccgagccgccgctgccgccgccgtgatggcccgaagagaggaggacgaggggcagacgagatctcttggaattcagcgctgcgggatggaaacactggcgccgggattcccaatgcctgccaaacaattattgccaccataaactaactagtactgctagtctactctctctctctctctttctctcacacagcttttctttgtttcgcttccactttttctagcgaggaaaagaatcgagcactcgtcgtctcctttctggcgtctccttcttttaaaaatcttcctcctctccccctccctcgaattgctttcctggtcaccagcttacttgttccaattgtgcgcttgcatttgtttgctagattaaaagagggaaagaattctccctctgtctcgtggtggtgtgcgtggtattcgctcggtggcatcaggaggtaggagtaggacatgacagctccgagctcgttttttttaagtcgagtgcggccgagcacagtggtggcgccatcgcaggtatggccatggcggattcattcacagtggttgttgatgtgtcggccggagtggtggtgggcggccggtcaactgggacggtaaaagagacaaagatctttttttgcgttctcgcttatcctctcgcctcgcgcgatccaagtgtttgttgcgcagagatgtgtctagctctgcatctgctgctatactggcctacttgtgatgaactgtggaggaaggtgcgggtttgcttggtcctattctctcctaccgcaagaagtagactagaccggagattacaggtgtcagtgttctgaactggctctgaaaccttcctcttttttcgtgaggaaatggtcatggttggatgtgcctggatagtggatactgatgaagaatggcagctcaaggttgtgtttctggggtcactgatatttggatggaagtagcatgcaaacacctgactggataagtttacagaaaacaaaaggatgagcatagttcctcatctctgtacggctcctagagtcccagtaagccgcgtaagtgatacctagaactggaactgtgtagtggcatattcttgctgaacaaatcacaagtacatttattactaagatctcgcgcagaacgtggaaaagacttcttcaggtttcagccttcttcagacatgttttttttacgtcaagttacactacttccatgtaagcggcggcggtggcactagtttagtatatgggaaatctctggatctgttgaccatgcttgcttacatttcgcaggggcgggatggatatctacgcgtgctccctctgacgcatggaaattaatttgctcagctgctggtgcaaataaataaataaataaatttactcctatgttagcaagctcgtggacctcaaggtctgattgtataattcaggagaaacgtgcaagtaattccacattgtctcttttaatttgttagttttaatcaaagtggttcacg

SEQ ID NO: 40338 - DNA, 716 bp, Zea Mays
ccgacactgcacagcccgcaccacgcaccaggacatcgccaccggcaccgcactacggcgtacaggaaaccggacggacagctatgcccgaccgcctcctttctggttctcctcctccctcctccctcccgcgcagatctccacaagcttccagagagcagcagcagcagcagctcgcctccacgcgacacgaggacggacatggcgaccttcaccaagctcgaggattcccccatgttccgcaaacaggtcaattctttggaacatcttactgatgaactgaaagaacggtgctcaaacctgcataaaggatgtaaaagattcatgggatcacttgatgaggcatatgcaggggatctatcatttgcagattctctgcaagcatttggtgctggtctggatgatcctattagtgttgccattggagggcccgtgatgtccaagtttactactgctttcagggagcttgggacatacaaggaactccttcgttctcagcttgagcacatgcttagtgatcgcctgtcacagttcattaacgtggatttaaatggtgtgaaggtaaactctcctctcttctctccacttgaaaccgcacaacatagcatacttgtaactataggttgtaactgaagtaaacaatatagtagttcaggtgctgattttcaatgggcaaataacctttatgcatgtgggattagacttgaacgctcttg

SEQ ID NO: 40339 - DNA, 519 bp, Zea Mays
ctgcacagcccgcaccacgcaccaggacatcgccaccggcaccgcactacggcgtacaggaaaccggacggacagctatgcccgaccgcctcctttctggttctcctcctccctcctccctcccgcgcagatctccacaagcttccagagagcagcagcagcagcagctcgcctccacgcgacacgaggacggacatggcgaccttcaccaagctcgaggattcccccatgttccgcaaacaggtcaattctttggaacatcttactgatgaactgaaagaacggtgctcaaacctgcataaaggatgtaaaagattcatgggatcacttgatgaggcatatgcaggggatctatcatttgcagattctctgcaagcatttggtgctggtctggatgatcctattagtgttgccattggagggcccgtgatgtccaagtttactactgctttcagggagcttgggacatacaaggaactccttcgttctcaggtagttcgtgtaacacaaaaggaatga

SEQ ID NO: 40340 - DNA, 410 bp, Zea Mays
ccaccggcaccgcactacggcgtacaggaaaccggacggacagctatgcccgaccgcctcctttctggttctcctcctccctcctccctcccgcgcagatctccacaagcttccagagagcagcagcagcagcagctcgcctccacgcgacacgaggacggacatggcgaccttcaccaagctcgaggattcccccatgttccgcaaacaggggatcacttgatgaggcatatgcaggggatctatcatttgcagattctctgcaagcatttggtgctggtctggatgatcctattagtgttgccattggagggcccgtgatgtccaagtttactactgctttcagggagcttgggacatacaaggaactccttcgttctcaggtagttcgtgtaacacaaaaggaatga

SEQ ID NO: 40341 - DNA, 601 bp, Zea Mays
ccaccggcaccgcactacggcgtacaggaaaccggacggacagctatgcccgaccgcctcctttctggttctcctcctccctcctccctcccgcgcagatctccacaagcttccagagagcagcagcagcagcagctcgcctccacgcgacacgaggacggacatggcgaccttcaccaagctcgaggattcccccatgttccgcaaacaggggatcacttgatgaggcatatgcaggggatctatcatttgcagattctctgcaagcatttggtgctggtctggatgatcctattagtgttgccattggagggcccgtgatgtccaagtttactactgctttcagggagcttgggacatacaaggaactccttcgttctcagcttgagcacatgcttagtgatcgcctgtcacagttcattaacgtggatttaaatggtgtgaaggtaaactctcctctcttctctccacttgaaaccgcacaacatagcatacttgtaactataggttgtaactgaagtaaacaatatagtagttcaggtgctgattttcaatgggcaaataacctttatgcatgtgggattagacttgaacgctcttg

SEQ ID NO: 40342 - DNA, 577 bp, Zea Mays
ccaccggcaccgcactacggcgtacaggaaaccggacggacagctatgcccgaccgcctcctttctggttctcctcctccctcctccctcccgcgcagatctccacaagcttccagagagcagcagcagcagcagctcgcctccacgcgacacgaggacggacatggcgaccttcaccaagctcgaggattcccccatgttccgcaaacaggtcaattctttggaacatcttactgatgaactgaaagaacggtgctcaaacctgcataaaggatgtaaaagattcatggcccgtgatgtccaagtttactactgctttcagggagcttgggacatacaaggaactccttcgttctcagcttgagcacatgcttagtgatcgcctgtcacagttcattaacgtggatttaaatggtgtgaaggtaaactctcctctcttctctccacttgaaaccgcacaacatagcatacttgtaactataggttgtaactgaagtaaacaatatagtagttcaggtgctgattttcaatgggcaaataacctttatgcatgtgggattagacttgaacgctcttg

SEQ ID NO: 40343 - DNA, 1420 bp, Zea Mays
ccaccggcaccgcactacggcgtacaggaaaccggacggacagctatgcccgaccgcctcctttctggttctcctcctccctcctccctcccgcgcagatctccacaagcttccagagagcagcagcagcagcagctcgcctccacgcgacacgaggacggacatggcgaccttcaccaagctcgaggattcccccatgttccgcaaacaggtcaattctttggaacatcttactgatgaactgaaagaacggtgctcaaacctgcataaaggatgtaaaagattcatgtacatttctttgttgtctcctgttccacatttgcaaacatttgagatgttctaactgcacataactggaggcaaatgccataaatgcatactgtcttattgcataagtttctgataaggccctttcataaaaattccttttagttcaagaaatacattcagtattttttctttactttgctgttccaggtttcttgttttagtttttgtaatgttccatgagctagtgctcttttattatgttgctaattaccttagtttcaggggatcacttgatgaggcatatgcaggggatctatcatttgcagattctctgcaagcatttggtgctggtctggatgatcctattagtgttgccattggagggcccgtgatgtccaagtttactactgctttcagggagcttgggacatacaaggaactccttcgttctcagcttgagcacatgcttagtgatcgcctgtcacagttcattaacgtggatttaaatggtgtgaaggtacttcacacagaggccgctaaggcacgaagtccgacagccgtcgttgtaagttgccaccagccatgctaagtctttcgggcgtccgtggaaagttggccccttcgcaagcgagcctgcatggttgactttgccgccgtcttcagatgttgggccctcgtgccttcggcaacacttcctggccttcgcctttctttagctcgctttaatggttcggagaccagatcgagggggtgttatgtcttcgctgcaacacctatcacgtatatcatcgttccagaatcgattccttattgtttgaccacaaatccaagaaaacatatgcatttccacaacacttatctgctgattatgatgtctttttgtaggccaatattcttcaccatacaacatagtaggtataattgccgtcctataaaacttgccttttagttggtgtggtgtcctctcgttacatagaacgtcagatgcttgacgacattttttccatactgctttgattctatagctaacaactttgtcaacatctccatctctctatagcattgatcttaaatatcgcaagatatcattcctggacactacttgaccttctaaactaacatctcatttctcatgtattccttgcttccg

SEQ ID NO: 40344 - DNA, 396 bp, Zea Mays
gattcggggatcacttgatgaggcatatgcaggggatctatcatttgcagattctctgcaagcatttggtgctggtctggatgatcctattagtgttgccattggagggcccgtgatgtccaagtttactactgctttcagggagcttgggacatacaaggaactccttcgttctcagcttgagcacatgcttagtgatcgcctgtcacagttcattaacgtggatttaaatggtgtgaaggtaaactctcctctcttctctccacttgaaaccgcacaacatagcatacttgtaactataggttgtaactgaagtaaacaatatagtagttcaggtgctgattttcaatgggcaaataacctttatgcatgtgggattagacttgaacgctcttg

SEQ ID NO: 40345 - DNA, 4154 bp, Zea Mays
cttaaactttgcccaatgcccaaggggaccacaattatgacacttatgcttttagtcaatgtggccactatccttggcgttaggcacgtggggctactttttgcactcgccatgagagaggtagcatgccactgcctggcgtggtaggctttgagcagcatttactgtgttgcctctacttcgaccgtgtgagccattgctccttggtgaagtggagtttgctgccaaagagtatcaattgatctggagttgccacatcatcgtctcaaccgccttcagattgtcggtcacctctaaaattgaggtccgctgtgccgagcaaggtgctgattgcaatcaccacatgcttgtactgcctcgggacgacacacatgagcttttcaactgcatgctgctcggtgatgcccttgccatagaggtcgagggagctcatcatcccaggcggagcacaaagtcgtggaacgagagcaactaccagtccctttggagctgctgcagcgtagacttgcgtgcgtgcttcaaaccaacattgatggacttgatcacctcctaaacctcttttgccgtcgtcttcattgccagcaagcggataatctttggggctacaatggagaggatggcattgagagccatgtgatcttccatgcgatcagcgcatcatacccgatctcgcatcctagaagccacgagcttccaactccaccttcatgaggaggctccaatcctcatgcttgctgtgtgtcaccgacttccttcaccatgctggaccaccattccacgcctccatggcttcgcgcgcgccttggctatgtggaaggggggaatgacagcggtaggttcacacccattgtgggctgcatctttgaccactacctgccggagctgagaccatggatcactctaacacaacatctataggatgagcagaggtaaatagagtagctggagttttagagcacatgttctttttttgaagctaactggcttaatcaaggccgttcctgagttttttttggggggggggggcataattataaatggaggccccaataccattttcattattatatatcaactaattaaaataattcgatgtatcatagaaaaacttgagtggtaaaaaatagaaataaaattattacctcaaatatattgtagagataaccttaaaaatgacttcttctaatgtatcaatgatggcttttatattaatatcatctaacaatttcttatcaatatctagagttgttagccatttaacctttctcgagacattgtagaccttaaataattctttaataattttagatttcagaagcttctttcaaaattactgatattataaataatatctgataagcaacatatatattaagatagcaatccattttcctgacaagctcaaacatttccatagcactagggtaggacccctaggaagtggttgcccagatcggccgccctccttgacccccctcaagcacaggcctgggcttatttctattgatcgcttatgcatacatatatatcgagatggtggactcagttcgtagtaaaccgacctgggtacaaccggccatgaacctgccaaacttaagtcggtctatacattactattgttgctgagctaactaacctgacactggccggtataggacaaaactgttgcagtctgttgactacagctgctactgacctggtcagcagcaggccaaaacaaaattggttgctactactagctgcagacatgaaacttactaaggaacgtctgcttgacaggcgtgcaagaagcttcttaatggcaatgatgtgcgaaaggtctctagctgagttggttaggtggtataagtagcattcatcaggtcttgagtttgactccctgtaggagcccacaggtcgattttttttaatggcattgatgtgtgttgttgtggtggtgggtgggttgggggttctttctcccgcagagcacaggtccaggttttttaggattgcagtacataatttgcacgtcaaaatttatgtgcagtagattattttcaagggatgtgctggattattttaaatgcagtgtgctatataatttatccaaagatgctaatttgcttatgttattttttctgtattttacatgtacctgttccttttattctcttggaagcaaggagtgtcatcacaacaaacaactgaagattgatgcagatgaaaatgatttaagattttgcttcagaataatctcacctgttaaggcatacacattacaggcagaatcaggggctgatcaaaaggactggatccagaaaattactggagttatcgcatcgctactaaattcaccattcccacagcagttgtcatatggtaatgtagcagcagagagtaacagatccacaagttctgttgattctttgtctattgaagataacaagagttcagagggacatgatgatatattcaaccttctgaggaatatccctggaaatgacagttgtgcagaatgtcgttcccctgatcctgattgggcatctctaaacttgggtattctgatttgcattgagtgctctggggctcataggaatcttggagtgcacatttcaaaggttcgatccttgagactagatgtgaaagtctgggagccagtaattatggatctcttccatgcactaggaaatgattacgctaattccatttgggaagccctgcttccaaaagaagatcaaggaatgaacgactcaaatggagctattctttttattgaaaagcctaaacctagtgatgctttctcaataaaggagaggtacatacaaacgaagtatgtggacaaactgctttttgccagagatcccgatcagaataccattaatattttggaagccataaggaaaaatgatgtgagagcagcatatcgaattcttgcaatagctgaagtcagtgctaacatgacatatgatgctttgagcaaagatgtccatcatgttcagccagtgacagacaagatgttacttgatccgatttcttgtgagataattcaggactctggaaaaccagaaggctgtctacaaggatttccatggccgaacaccattgcatcattgtgtccaaaagaaaaatgatgagctcaccaagcatctgctgaagaggggtgcgagaacgacaattaaagatggcggaggtctgactgctctggagagaagaatggaacttggagcgataactgatgaagacttattcatactatttgtgaggtgatgttgcaaacttgcaatacaggcctttggcaactagctgtttgtacctgatagcattgtattgtacccacctaatttagcttctggaaagaacatgatttctacacctgaagacaaatgccttttactgtaccacgatataacttatgggactgctgcgcttggctgtgttttaaaattccactggtcgacatgaccacatcgttggtttgtacaacaattataggcaatcacagtattcgattctttgagtatggttattgaggtatgagtttctgatgtcaagcacgtaaggaaagaacacacgataatcgtgcatgcatattaccgttgggcaattttctttttttattgcaattttacaactgtactgcatatggtcgacctgtaacaattattgaatttatgggtacgtgtatcctgcaagatatgaatcaacttgtaacagcatctaagtatcgcttcaataaaaaagtgcaaatgcagcatagttttcccgtgaatttgttattcagtatactagcgtggcaaactgattaaggatgctaattcaggctctagggtacctagagatcaagcattgacatgatcggtacgtacataaggagtttgcaagccacatggtctacctaaataagctttgagaaatttgaccaaacttaacaaatggttaaaatttattggacaagcaacacaaatctaaatcaagttagtacttcatactaatatgaggcactaacttgaaaaatcagaaaaacaaatggaagtaggaatcatttttgtagtgttgtcaccaattactaaaaaggatgggattgaaagctctatatgttgttttggtagttgagacaattaggtgattaactattttatgagtgaaatgaatgagataggtttggagtccac

SEQ ID NO: 40346 - DNA, 721 bp, Zea Mays
tacctgttccttttattctcttggaagcaaggagtgtcatcacaacaaacaactgaaggtactggtgtttttggtcgattcagattcttgaaccaaagagtttcatctcagagtgaagattcattatcatgtcatagaattgatctcagaacttcaacaattaagattgatgcagatgaaaatgatttaagattttgcttcagaataatctcacctgttaaggcatacacattacaggcagaatcaggggctgatcaaaaggactggatccagaaaattactggagttatcgcatcgctactaaattcaccattcccacagcagttgtcatatggtaatgtagcagcagagagtaacagatccacaagttctgttgattctttgtctattgaagataacaagagttcagagggacatgatgatatattcaaccttctgaggaatatccctggaaatgacagttgtgcagaatgtcgttcccctgatcctgattgggcatctctaaacttgggtattctgatttgcattgagtgctctggggctcataggaatcttggagtgcacatttcaaaggttcgatccttgagactagatgtgaaagtctgggagccagtaattatggatctcttccatgcactaggaaatgattacgctaattccatttgggaagccctgcttccaaaagaagatcaaggactacacttgaactagtctgtaagct

SEQ ID NO: 40347 - DNA, 2185 bp, Zea Mays
gttccttttattctcttggaagcaaggagtgtcatcacaacaaacaactgaaggtactggtgtttttggtcgattcagattcttgaaccaaagagtttcatctcagagtgaagattcattatcatgtcatagaattgatctcagaacttcaacaattaagattgatgcagatgaaaatgatttaagattttgcttcagaataatctcacctgttaaggcatacacattacaggcagaatcaggggctgatcaaaaggactggatccagaaaattactggagttatcgcatcgctactaaattcaccattcccacagcagttgtcatatggtaatgtagcagcagagagtaacagatccacaagttctgttgattctttgtctattgaagataacaagagttcagagggacatgatgatatattcaaccttctgaggaatatccctggaaatgacagttgtgcagaatgtcgttcccctgatcctgattgggcatctctaaacttgggtattctgatttgcattgagtgctctggggctcataggaatcttggagtgcacatttcaaaggttcgatccttgagactagatgtgaaagtctgggagccagtaattatggatctcttccatgcactaggaaatgattacgctaattccatttgggaagccctgcttccaaaagaagatcaaggaatgaacgactcaaatggagctattctttttattgaaaagcctaaacctagtgatgctttctcaataaaggagaggtacatacaaacgaagagatcccgatcagaataccattaatattttggaagccataaggaaaaatgatgtgagagcagcatatcgaattcttgcaatagctgaagtcagtgctaacatgacatatgatgctttgagcaaagatgtccatcatgttcagccagtgacagacaagatgttacttgatccgatttcttgtgagataattcaggactctggaaaaccagaaggctgtctacaaggttgttctttattgcactttgcatgcgaatacggttatcctataatggtggagcttcttctactttttggcgcggatattaatatgcaggatttccatggccgaacaccattgcatcattgtgtccaaaagaaaaatgatgagctcaccaagcatctgctgaagaggggtgcgagaacgacaattaaagatggcggaggtctgactgctctggagagaagaatggaacttggagcgataactgatgaagacttattcatactatttgtgaggtgatgttgcaaacttgcaatacaggcctttggcaactagctgtttgtacctgatagcattgtattgtacccacctaatttagcttctggaaagaacatgatttctacacctgaagacaaatgccttttactgtaccacgatataacttatgggactgctgcgcttggctgtgttttaaaattccactggtcgacatgaccacatcgttggtttgtacaacaattataggcaatcacagtattcgattctttgagtatggttattgaggtatgagtttctgatgtcaagcacgtaaggaaagaacacacgataatcgtgcatgcatattaccgttgggcaattttctttttttattgcaattttacaactgtactgcatatggtcgacctgtaacaattattgaatttatgggtacgtgtatcctgcaagatatgaatcaacttgtaacagcatctaagtatcgcttcaataaaaaagtgcaaatgcagcatagttttcccgtgaatttgttattcagtatactagcgtggcaaactgattaaggatgctaattcaggctctagggtacctagagatcaagcattgacatgatcggtacgtacataaggagtttgcaagccacatggtctacctaaataagctttgagaaatttgaccaaacttaacaaatggttaaaatttattggacaagcaacacaaatctaaatcaagttagtacttcatactaatatgaggcactaacttgaaaaatcagaaaaacaaatggaagtaggaatcatttttgtagtgttgtcaccaattactaaaaaggatgggattgaaagctctatatgttgttttggtagttgagacaattaggtgattaactattttatgagtgaaatgaatgagataggtttggagtccac

SEQ ID NO: 40348 - DNA, 2195 bp, Zea Mays
gttccttttattctcttggaagcaaggagtgtcatcacaacaaacaactgaaggtactggtgtttttggtcgattcagattcttgaaccaaagagtttcatctcagagtgaagattcattatcatgtcatagaattgatctcagaacttcaacaattaagattgatgcagatgaaaatgatttaagattttgcttcagaataatctcacctgttaaggcatacacattacaggcagaatcaggggctgatcaaaaggactggatccagaaaattactggagttatcgcatcgctactaaattcaccattcccacagcagttgtcatatggtaatgtagcagcagagagtaacagatccacaagttctgttgattctttgtctattgaagataacaagagttcagagggacatgatgatatattcaaccttctgaggaatatccctggaaatgacagttgtgcagaatgtcgttcccctgatcctgattgggcatctctaaacttgggtattctgatttgcattgagtgctctggggctcataggaatcttggagtgcacatttcaaaggttcgatccttgagactagatgtgaaagtctgggagccagtaattatggatctcttccatgcactaggaaatgattacgctaattccatttgggaagccctgcttccaaaagaagatcaaggaatgaacgactcaaatggagctattctttttattgaaaagcctaaacctagtgatgctttctcaataaaggagagtatgtggacaaactgctttttgccagagatcccgatcagaataccattaatattttggaagccataaggaaaaatgatgtgagagcagcatatcgaattcttgcaatagctgaagtcagtgctaacatgacatatgatgctttgagcaaagatgtccatcatgttcagccagtgacagacaagatgttacttgatccgatttcttgtgagataattcaggactctggaaaaccagaaggctgtctacaaggttgttctttattgcactttgcatgcgaatacggttatcctataatggtggagcttcttctactttttggcgcggatattaatatgcaggatttccatggccgaacaccattgcatcattgtgtccaaaagaaaaatgatgagctcaccaagcatctgctgaagaggggtgcgagaacgacaattaaagatggcggaggtctgactgctctggagagaagaatggaacttggagcgataactgatgaagacttattcatactatttgtgaggtgatgttgcaaacttgcaatacaggcctttggcaactagctgtttgtacctgatagcattgtattgtacccacctaatttagcttctggaaagaacatgatttctacacctgaagacaaatgccttttactgtaccacgatataacttatgggactgctgcgcttggctgtgttttaaaattccactggtcgacatgaccacatcgttggtttgtacaacaattataggcaatcacagtattcgattctttgagtatggttattgaggtatgagtttctgatgtcaagcacgtaaggaaagaacacacgataatcgtgcatgcatattaccgttgggcaattttctttttttattgcaattttacaactgtactgcatatggtcgacctgtaacaattattgaatttatgggtacgtgtatcctgcaagatatgaatcaacttgtaacagcatctaagtatcgcttcaataaaaaagtgcaaatgcagcatagttttcccgtgaatttgttattcagtatactagcgtggcaaactgattaaggatgctaattcaggctctagggtacctagagatcaagcattgacatgatcggtacgtacataaggagtttgcaagccacatggtctacctaaataagctttgagaaatttgaccaaacttaacaaatggttaaaatttattggacaagcaacacaaatctaaatcaagttagtacttcatactaatatgaggcactaacttgaaaaatcagaaaaacaaatggaagtaggaatcatttttgtagtgttgtcaccaattactaaaaaggatgggattgaaagctctatatgttgttttggtagttgagacaattaggtgattaactattttatgagtgaaatgaatgagataggtttggagtccac

SEQ ID NO: 40349 - DNA, 1489 bp, Zea Mays
gttccttttattctcttggaagcaaggagtgtcatcacaacaaacaactgaaggtactggtgtttttggtcgattcagattcttgaaccaaagagtttcatctcagagtgaagattcattatcatgtcatagaattgatctcagaacttcaacaattaagattgatgcagatgaaaatgatttaagattttgcttcagaataatctcacctgttaaggcatacacattacaggcagaatcaggggctgatcaaaaggactggatccagaaaattactggagttatcgcatcgctactaaattcaccattcccacagcagttgtcatatggtaatgtagcagcagagagtaacagatccacaagttctgttgattctttgtctattgaagataacaagagttcagagggacatgatgatatattcaaccttctgaggaatatccctggaaatgacagttgtgcagaatgtcgttcccctgatcctgattgggcatctctaaacttgggtattctgatttgcattgagtgctctggggctcataggaatcttggagtgcacatttcaaaggttcgatccttgagactagatgtgaaagtctgggagccagtaattatggatctcttccatgcactaggaaatgattacgctaattccatttgggaagccctgcttccaaaagaagatcaaggaatgaacgactcaaatggagctattctttttattgaaaagcctaaacctagtgatgctttctcaataaaggagaggtacatacaaacgaagtatgtggacaaactgctttttgccagagatcccgatcagaataccattaatattttggaagccataaggaaaaatgatgtgagagcagcatatcgaattcttgcaatagctgaagtcagtgctaacatgacatatgatgctttgagcaaagatgtccatcatgttcagccagtgacagacaagatgttacttgatccgatttcttgtgagataattcaggactctggaaaaccagaaggctgtctacaaggatttccatggccgaacaccattgcatcattgtgtccaaaagaaaaatgatgagctcaccaagcatctgctgaagaggggtgcgagaacgacaattaaagatggcggaggtctgactgctctggagagaagaatggaacttggagcgataactgatgaagacttattcatactatttgtgagataaagcttctccaaactggcttttgacgaggcagagcttaggagctacacttcagtcatctatgctaatgtgtatcagacaattaaaatgggctatattagaaaggatgtgtcttttttctcttaaattttagagatgagtatgtaggaaattttgattattgtagttgtttgctgctccaatgagtgtgtattttgcagatatttttgtctcaatgatgagataaatatgcacacaaagagattacatgaggggggctaaaaagttagccttag

SEQ ID NO: 40350 - DNA, 1562 bp, Zea Mays
gttccttttattctcttggaagcaaggagtgtcatcacaacaaacaactgaaggtactggtgtttttggtcgattcagattcttgaaccaaagagtttcatctcagagtgaagattcattatcatgtcatagaattgatctcagaacttcaacaattaagattgatgcagatgaaaatgatttaagattttgcttcagaataatctcacctgttaaggcatacacattacaggcagaatcaggggctgatcaaaaggactggatccagaaaattactggagttatcgcatcgctactaaattcaccattcccacagcagttgtcatatggtaatgtagcagcagagagtaacagatccacaagttctgttgattctttgtctattgaagataacaagagttcagagggacatgatgatatattcaaccttctgaggaatatccctggaaatgacagttgtgcagaatgtcgttcccctgatcctgattgggcatctctaaacttgggtattctgatttgcattgagtgctctggggctcataggaatcttggagtgcacatttcaaaggttcgatccttgagactagatgtgaaagtctgggagccagtaattatggatctcttccatgcactaggaaatgattacgctaattccatttgggaagccctgcttccaaaagaagatcaaggaatgaacgactcaaatggagctattctttttattgaaaagcctaaacctagtgatgctttctcaataaaggagagtatgtggacaaactgctttttgccagagatcccgatcagaataccattaatattttggaagccataaggaaaaatgatgtgagagcagcatatcgaattcttgcaatagctgaagtcagtgctaacatgacatatgatgctttgagcaaagatgtccatcatgttcagccagtgacagacaagatgttacttgatccgatttcttgtgagataattcaggactctggaaaaccagaaggctgtctacaaggttgttctttattgcactttgcatgcgaatacggttatcctataatggtggagcttcttctactttttggcgcggatattaatatgcaggatttccatggccgaacaccattgcatcattgtgtccaaaagaaaaatgatgagctcaccaagcatctgctgaagaggggtgcgagaacgacaattaaagatggcggaggtctgactgctctggagagaagaatggaacttggagcgataactgatgaagacttattcatactatttgtgagataaagcttctccaaactggcttttgacgaggcagagcttaggagctacacttcagtcatctatgctaatgtgtatcagacaattaaaatgggctatattagaaaggatgtgtcttttttctcttaaattttagagatgagtatgtaggaaattttgattattgtagttgtttgctgctccaatgagtgtgtattttgcagatatttttgtctcaatgatgagataaatatgcacacaaagagattacatgaggggggctaaaaagttagccttag

SEQ ID NO: 40351 - DNA, 3207 bp, Zea Mays
cacaacacaaatactgataaaagtaaatatctctacctctactaatattgaagggaataatatttcttctgctcatgcacaacattggcacctacttcacttccaaactaaccaatcagaaaatctaccattacacgtgcattgctacggtgtctatatataacataggtaaacctgttatagggacaaaacagaaagctatgggggtgggggcaacctgcttttccatctctttggtggtagagaatagatgaaagttggtgtcatacttctgcagaaataaggccgtaatggaaggtttcctaactgcaacaattgagataccaaaaaagaggggttacaagaattagacattaatagaacctaaaaagtaaaacttcgttgatagacatgagatataatttactccctccaatgttatttgtggtctaggacactgacacggtctccagaatatggctttgaccaaagacttttgttaaaatacaaatgaactctttatacatttatatttttatgaatgtactttttaagacaaattgatgcatgtatcaggttttggatatatagtgcattaactatcttgggaagttgggtaattgtttttgttacacaggctgttaagctaatatgaattgcacacgtgcatactatacatacacatacaacggtgttcgctgcagacctgccagtgccaggcatggtgcctttcctgtctactgtagcgagaccatctaccaactatagttattcagcaatatgcccagtctaagaaccatagatctcatgctgaataacttcagtggcacgattccggaaagcatatactcctgtagaaagctgactgcgctacggctagattcgaataagttccatggacaattatcagaagggctaggcaacctaaagttcctctcgttcctgtcgcttacaaacaacagacctgccatgcatggtgccttaacctccgaagaagcagcagggatttggtttgcaaaacggggctcaatttctggagaggtagcaggaacagggacttgatcagctggaccagacggaaaaatcacagaggacgagctaccaggatcgttgctgctgacactattgctttccttgggtggagctgcaactgctgcaatagcattctgcacctgcagttccagatcttcaagacctcctgcacacaggaaagtataacgaagtcagagacttatcctggaaagtttgctgtttgcctttgccctgggttagtccaggcagagttggctgcttcctgatggatgacttgattcctgcgtgatgtctgatgacatgggataactaaccaacctccaaatagatgcttgcctgattcgccttgcctgaacgaggatacgccgtcgccatccttcgacgaccatgcaccttgatcttgcaggtcgcccgactctaagtcgttgcaagtgaaagaacaagccggtcgtcatcaactcttggattagtttagccgctcgtcatcaactcttgcctgattcgccttgcccaaacaacagcctttcaaatataacaaacacgcttcagatactgaggagctctaagaacctgaccacgcttcttcttggcatcaatttctttgaagaaaccgtaccggataccgattgcttttcctaaaattctaaatctaagcagcaacatattcacagttctgattctcccagagattggtcagttaaaaggcctcctttcacttgatatcagctccaacagcttaaccggaccgatccccacatctatctgcaatctcacaaacctgctggatgctagatttatccagcaatgatctcacgggtaaaattccagttgcattcgagaatctgcacttcctttccacattcaacgtttctaacaatgacctagaggggcctattccaaccggtggtcaatttggtacatttcagaactccagctttctagggaatccaaagctgtgcggctttatgatcggtcgtcgatgcgattcagccgatgtgcctctggtatccacaggaggaagaaataagaaggccattcttgcaattgcatttggagtgatcatggtgccacaaggaaaagtaaatgaaaacaagctcacgttctctgacattgtaaaagccacaaataacttcaacaaggaaaacatcattggttttcctttcttgtttatataggtaatgttctcattataattttctacacttttgtatttataccttcgatttgtgatttataaaagtactatttagaaaatgattgcagtgttatagtgatggttacacaatatggtttacctgaccctggctgatcatttgtggggcaagcaattgatatagatgtgaaaagagcaaagagctgacctatatatatcagtagcaactactaatgctcttgacgatgatcagccaggatatatagccgatgatcgtattgaaccgtgaagagatgatgtgtttcgcacaaaatatttattgtcgcaaggctaaatggaagtacctacaataattaggaaaaatatatgtagcattgacacaagaatcatacctaagccaaatatggatctgagaaatacaagtctctagtataatcttgccaagccatctgtcacatgggagatcctgcacatgggagcgacgaggaccgccctcgcaatatgctacctttatttgaccgaccattgtatacatgatcaacaataaatgtggttggatgtcattgttatgactacaaactaatgcttccatggagcaaaagaaagtcgcaaaacgagatatgacagtttgaattctaattcaggagtgaaggggggctcagatacttgcctgtaaagagcgcttacggccctcgaaattgaatggataggtgacaacaccaacagtaagataaccagcttcctttgatatctgggcaacaattggagcagcaccccctcccatcccagctgttatgaaaacaagatctgaatccctcagggcagtggctatggtttctcttgattcctcagcagcctgctctcccaaatttggatttccaccggtacctgtgcatgtgttacgtagtatcatatttactgaatctagccaacctctgatacattttcaatggaaatttacagttttggtgatgcattgttatagggcacaattcattcagttgaccagaattccatgtactgtgtgtgttatcgcaaatgag

SEQ ID NO: 40352 - DNA, 394 bp, Zea Mays
gtctgccgtcacctcgctctcacggggtttcgcttggatttctctacacactccacccacgcccgcactccttccatacaggccagactcaacattggggacgcgagggagccgctgcgggcatatgcgtcaaggagacgttgggcgaggacggcggtggtggatccgcaggaggaagaggtggttgaatacgggggagggggcacagcgaggaggaatgaccggatgaggctggccgtcgaaggaaggagcgacatggaaggaaggaggaatcgaggatggaaaggagcgctttcgaaggaaggagtgcgacgaaaccgcggtcgagcggcggcggtggggaggagggtggagggatccacgtgggggaggagcgcgttgattgcggcggcgg

SEQ ID NO: 40353 - DNA, 2034 bp, Zea Mays
caacgaccttcgattgagcatgtgaggttttttttgcaaatatgtagctgggccgtgggcgtgggggagaagagcgtggaaggttcttctttgacttctctcctacatacgttggagttggcatgatctgcccatacatcgtgaatgtgtctgttctgctgggtggtatcctctcatggggtttaatgtggcctctcattgccaagaagaaggggagttggtacccagctaacctggaagactcaagtttacatgggttgcaggcttacagggttttcatttccatcgctttgatccttggggacggtttatacaacttcattaaggtgctgatccgcacaattgcgggtttcatatcaatggtgcagcaaaattcaaaaagcatgcttcctgtttcggacaatggcagttccatgtccagtatggaggctgtatcctttgacgatgaacgtcgcattgagaattttctgaaagatcagattcccaagtcagttgcatacgggggctatgttgcagttgctgctatatctattggcacccttcctcagatcttcccgcagctcaagtggtactacattttagtagcctacgtcgtggcacctgtgctggccttctgcaatgcttatggaagtggcctcactgactggtctctcgcctccacctacggcaagctcgctatcttcgtgttcggtgcatgggctggcctctcacacggtggcgtgctcgttgggctcgcagcttgtggtgtcatgatgagcatcgtgtcgaccgcctcagacctgatgcaagacttcaagaccgggtacctgacgctggcgtcaccgaggtctatgttcatcagccaggtgattggcaccggaatggggtgtgtcatcgggccctgcatcttctggctcttctacaaggcgttcggtgacattggcgagagcggcaccgagtacccggcgccctatgccatcgtgtaccgcaacatggccatcctcggcgtggatggcttcggctcgctcccgaaaaactgcctcaccctctgctacattttctttgcggcagcgatcactatcaaccttgtcagggacctgaccccctacaaggtgtcgaggttcatcccgctgccaatggcaatggcgattccgttctacatcgggtcctacttcgccattgacatgtttctgggcagcgcgatcctcttcgtgtgggagcggctgaacaaggcgaaagcggacgcattcggacctgcggtcgcgtcggggctgatctgcggagacggcatctggaccctgccgcagtccattctggccctcgccaaggtgcagccccccatttgcatgaagtttttgtccagatcgaccaatgccaaggtggacagcttcctcggcttgtcatgattttacacagaatggcaagtagacacgccctcatcctgtaattattggtgcaagatgcaatcaccaggctacagctctgtaaaagagaagaggttttgctgtggagtgaccaaagctttgtccgtgtagtctgtgtcaagaggaaaatactcaatggccctctgcctttttttgtgcaattattaactagcgtattcacagttataggtatttttgaaatgtgaaacgttcactacaaatttttttttaacgaatggagcttttgaaggtggagcggcagctataaggtgtgcgttggaaaagggtccatgaaagcctaagggttatggtgtgatcctatttatggtccgctgtgaaagaccaaactccttgtagttctttactttagggagtagcatataagccgtgttaatgctacgatcctgaaaaggaaaatgaaggggttgatgacagtggcggcgacacgaggggaggcgttgatgctacgatcctgaaaaggaaaatgaaggggttgatgacagtggcggcgacacgaggggaggcgttgatgaggcgaaagggtcaagggaaagggatgatggatgatcaaataatattatacattggatttgagtgaatatatatgtgagggttatggagcgatatgaac

SEQ ID NO: 40354 - DNA, 1649 bp, Zea Mays
attctctcgaaaattcacaccgcttaccaggttctcagccttatctccatgtcgttcgtcaggcttctagccatttcctggtcccatacatctcttctatgtatcctcctcgtctctttctgctcgccatcggctggtcgtccaggcggccagggacgataccctgctactgctcctccacgacagcaaaatcacgcccacttcgtgtccagcagcgggagcctgctcggtcttctgctcgcctgcccctgttcatcagcgcgcgccacctggtgctacaggatcatcatccagcaccatgctggcgtcctccctcaagctgcgcccaagacttagccacatagacggtgttttaaccgcgtccccatcacgtcgcacgactctgcaagaccttgacccgtcatgggcacttctctatgtcgtgcgagctcgcctaggtctcgacatcggtctctttagtgaccagctctctcgccagtcgtcgtgccctactcgctgtcaaacctgcttggatccgtccttagctaaacctctccgtcgttgtagcatgctgctggtttggattgtcgccatgaggcttggcctcatcgcactcattgtgtccacgacatcgttggtccaacagcgttgtcgcttcttgtgttcgcgctggaagaccgaagagaaaccctagagccggataatgtcgtcgatttcgtggtttcaagttgaatttagtttaggtacgctagttgatcacgtgatgtgaaggacaagaattgcattaatctcaaggtgatgctgataatgaacctgaagatggatgatctgatcaagtgccaagatggaggatgatcgccaagcaagcatcatctaacaacactgacttagcgttatcctaagcaagccccggtgcatatgccacccccttgttgttataaaacttttatcacttatatgttgcattaggtgataggagttgtgtgaataaacaattgatgtattactattccttggaatttgattactattccttgattcctctttataaaagagaataaagatgattagccctgcttagataattaaaagttttttttaaaaaaaagatgatgtgttacacgggatatggaaaatttttgtgaaaaagaaattgggatggtgaatccatatggccatgatggattcaacatccagaaaaagtacctctatcaggtaccaaagattgggaaatggtttaaataaaatgagaccagatgttgagcaggaaaggtcgcccgtctgtgtcgattaaggaccgttccgattgttggcctactgatctaggaccttttaactgctcatatgcctcatcatgggtaagcttagcctcggtcggaccaataccagaacagctcgcacgcactaggagtggagagatggcgagagtaacgtgtgcccaccaagcaagtggctggatggtggggtgctgtgctcttgggtcgcgtaaacccgttctggtcttgagaaacccggtggcgagttgacatatgcaagggttaagtgctatatatgtcgtgtggttggagatccccagctgggtattaatcgattcggatcgccgaacttctcggatatgaagactggatcttcgacctttagcgtagataacaaataaaatttaacttgat

SEQ ID NO: 40355 - DNA, 1578 bp, Zea Mays
attctctcgaaaattcacaccgcttaccaggttctcagccttatctccatgtcgttcgtcaggcttctagccatttcctggtcccatacatctcttctatgtatcctcctcgtctctttctgctcgccatcggctggtcgtccaggcggccagggacgataccctgctactgctcctccacgacagcaaaatcacgcccacttcgtgtccagcagcgggagcctgctcggtcttctgctcgcctgcccctgttcatcagcgcgcgccacctggtgctacaggatcatcatccagcaccatgctggcgtcctccctcaagctgcgcccaagacttagccacatagacggtgttttaaccgcgtccccatcacgtcgcacgactctgcaagaccttgacccgtcatgggcacttctctatgtcgtgcgagctcgcctaggtctcgacatcggtctctttagtgaccagctctctcgccagtcgtcgtgccctactcgctgtcaaacctgcttggatccgtccttagctaaacctctccgtcgttgtagcatgctgctggtttggattgtcgccatgaggcttggcctcatcgcactcattgtgtccacgacatcgttggtccaacagcgttgtcgcttcttgtgttcgcgctggtacgctagttgatcacgtgatgtgaaggacaagaattgcattaatctcaaggtgatgctgataatgaacctgaagatggatgatctgatcaagtgccaagatggaggatgatcgccaagcaagcatcatctaacaacactgacttagcgttatcctaagcaagccccggtgcatatgccacccccttgttgttataaaacttttatcacttatatgttgcattaggtgataggagttgtgtgaataaacaattgatgtattactattccttggaatttgattactattccttgattcctctttataaaagagaataaagatgattagccctgcttagataattaaaagttttttttaaaaaaaagatgatgtgttacacgggatatggaaaatttttgtgaaaaagaaattgggatggtgaatccatatggccatgatggattcaacatccagaaaaagtacctctatcaggtaccaaagattgggaaatggtttaaataaaatgagaccagatgttgagcaggaaaggtcgcccgtctgtgtcgattaaggaccgttccgattgttggcctactgatctaggaccttttaactgctcatatgcctcatcatgggtaagcttagcctcggtcggaccaataccagaacagctcgcacgcactaggagtggagagatggcgagagtaacgtgtgcccaccaagcaagtggctggatggtggggtgctgtgctcttgggtcgcgtaaacccgttctggtcttgagaaacccggtggcgagttgacatatgcaagggttaagtgctatatatgtcgtgtggttggagatccccagctgggtattaatcgattcggatcgccgaacttctcggatatgaagactggatcttcgacctttagcgtagataacaaataaaatttaacttgat

SEQ ID NO: 40356 - DNA, 1576 bp, Zea Mays
ccgcgaactcccctgcctcccatggccagcatatggcttcgtgttcgccggagctccgtgcgtgttcagcctcaagtttatgtgcgcgcgcaccactgttccgtgcgccgagttcctcgctgccacagttatccggtgtttggcccgcgccgattcgcgtttgctcatatcgccatcgtcgtgttgtcgctggtgatagcttccgtgcgcgtcaaactcccgcgtcgagtcttttatctgctcactgcgcgccctctcggctcgcttggccttaattctcatcacatcatcgattctgccggttagcgtcgttcgttgtcgcgtcgcgtgtctagctctatatatgtcaccctcctgtgtcatcgtcgttctgcgcgtcagcaagaaatctcaagagtcgggtgaagacggagccagcagcgtggtattcaccaagtgcgtgacaaaagctcggacatcctgcacgactcaagttcggttcgtcaaaagtattcagtcgaggaaaagatcttcaacaattgattaccgaagaaaagaaggcccctggatgacgtcaaccggaacccgtagtcgtgcttccgactatctcgtcgaattagtcatggtaagttgattcgtattcccgttaactaggtctataaatagagtaaatagaattattggtctcaatgaatgttattaatttagcaagcgtatattgtgatgattgatttagataaatcggtaaatcaagtaattaagatacatagtttaaagagttaataaaaagctaggaataaaaatgtaatttctagtataatatgtccatttgattaatggaggtagtcgatgccctgcggtgatatccatggtgcttaatgcttggttttaaagtgtttcattcttctagtgtagattatttatattatactcgttacactcgtgctcatacatgtgcatcgtgcatctcatgaggtacgataaataatcgcgtgatgtggaagacaagccaagtcgaccccaagcgcgggctaacccgcaggatgatgcagatggataacccgatcaagtaccaagacaaaggctgctcgtcaagcgaacgtcgtctaacaacactaacctagtgttactcaggcaagccccggtgcatgcagccccttccttgtgtttttaaataatttttgcacactttaagtctagtgaaatgtgcattaggtttatagaagttgcttggaaccctttgatgcattgccttccttgatatacatacctttatagatacttctaatgaagtatcaaaatatgatttacaaaattgcttagccttgctagaggtaaatcttgtggatagagcttgtcctttgcattgatgcctagctcaggggttatcctgaggaaggatggcttctacctgcaagaatattttcatttggagcaatggtgggatcttactacaaagttccctgtgatgctcttttcatcctaaggaacagaaacaatcctaaggatggaagtacgtaaattgagacttggggtaggaacaggtgatgttctacccaggttgattaaggattgatgcgtatgtaggtgtgctgac

SEQ ID NO: 40357 - DNA, 2188 bp, Zea Mays
ccaatgatgcttactgcatataatatgtgtccaatctttataagtacatatgatcggtaggtatgtgtatgaagataaatttatatacaacagtgaatatgtgtgtcccgacgagctttttatttttttttatcgtgcgtatgtgtatggcgtatttacccacccattgctacctacgtcccgtcttaccgcagcctcgtcctatccgtttgacgctcatccctggtatcccactcccctccctccccagccaacgacctccgccgccggccaccgcctgcctcagatcccccgccccgcccttccgttactcccagcgcgacgcggctgcgtccatgacgccctcctccgctctagccctcgcgctccaggccgcggcgtccccgctcccggcctccacgccgcggtcctcgcccaggtccagctcgctgagcctgggccgggggaccgccgggaacggcccgcgccgtcttgccgcagcagcgcccccacgggcgttcttctcatcgtccccctaccagccgccccaaccggaggggttctcgccacaccgggagtacggcctggtccccatggtgatcgaaaccacctcccgcggggagcgcgcctacgacatcttctcgcgcctgctgaaggagcgcatcgtctgcatcaacgggcccatcgccgacgacacggcctcgcttgtcgtcgcacagctgctcttcctcgagtccgagaacccactcaagcccgtccacctctatatcaactcccccgggggtgtcgtcaccgcggggctcgccatctacgacaccatgcagtacatccgctgccccgtcaccacgctctgcatcggccaggcggcctccatgggctcgctcctcctcgcggctggggcgccgggtgagaggcgcgcgctgcccaacgccagggtcatgatccaccagccctcgggcggcgcgcaggggcaggccactgacatcgccatccaggccaaggagatcctcaagctgcgcgaccgcctcaacaagatctaccagaagcacacgcgccagcccatcgacaagatcgagcagtgcatggagagggacctcttcatggatcccgacgaggcgcgcgactggggcctcatcgacgaggtcatcgagaaccgacctgcctcgctcatgcccgacggaatcgttggaggcctcgatgtgcccagcctcggtggcggtgggggcgggggcggacggggaagcgacgtcgaggagccttcggcggtgtgagaattggcctcaaaggtgaaatcccgttcgcatccggtggctttgttgtttgttgttagatctgaaggttcgattcttaccgtacaaggttaaccttgttattctggttacggaggcatccggctccccattctccttgttgcttcaattgcctgaattgagctattggtgatataattattacaactccaaggaaattctgttctgctggtactgataaattgacaaagtattgtgtatgttgtactatactactatattagtatcaattccatgccagggcattgaaatttttctctcttttgtttatttctcacagtaattgctcttgcctttctgtttctatcagtgactagttcttaatatgttgttggttccatgttcattcatgtgtattggtgttcttcaaacagtctagttgctgatctaggtttgatctgtatgttaaatatgaaagggtctcattctgatccgctacgtaagcgtttcacgtttataggcttatctgagaagctttagaacaagtgtacctgcttgattagttttgtgggttggttaaattccatggcaatgttccgctacgtaagcgtttcacgtttataggcttatctgagaagctttagaacaagtgtacctgcttgattagttttgtgggttggttaaattccatggcaatgtttaccatttttaaaagtgctgtttttgtttgggcattaaaacatacaatttgcaaaataaataattaagcgctgtagtccagattacccaaagagcatcttcgaaggtaaaatggactttctacgcaattgatggcttgtttatatttttgtttacaattttgtgggttgattaaattacaagacaatgttaatgtttagcatttctaaaagtgctgttgtttagttgaacatttttaaacatacaatttgcaaattgac

SEQ ID NO: 40358 - DNA, 1743 bp, Zea Mays
ccaatgatgcttactgcatataatatgtgtccaatctttataagtacatatgatcggtaggtatgtgtatgaagataaatttatatacaacagtgaatatgtgtgtcccgacgagctttttatttttttttatcgtgcgtatgtgtatggcgtatttacccacccattgctacctacgtcccgtcttaccgcagcctcgtcctatccgtttgacgctcatccctggtatcccactcccctccctccccagccaacgacctccgccgccggccaccgcctgcctcagatcccccgccccgcccttccgttactcccagcgcgacgcggctgcgtccatgacgccctcctccgctctagccctcgcgctccaggccgcggcgtccccgctcccggcctccacgccgcggtcctcgcccaggtccagctcgctgagcctgggccgggggaccgccgggaacggcccgcgccgtcttgccgcagcagcgcccccacgggcgttcttctcatcgtccccctaccagccgccccaaccggaggggttctcgccacaccgggagtacggcctggtccccatggtgatcgaaaccacctcccgcggggagcgcgcctacgacatcttctcgcgcctgctgaaggagcgcatcgtctgcatcaacgggcccatcgccgacgacacggcctcgcttgtcgtcgcacagctgctcttcctcgagtccgagaacccactcaagcccgtccacctctatatcaactcccccgggggtgtcgtcaccgcggggctcgccatctacgacaccatgcagtacatccgctgccccgtcaccacgctctgcatcggccaggcggcctccatgggctcgctcctcctcgcggctggggcgccgggtgagaggcgcgcgctgcccaacgccagggtcatgatccaccagccctcgggcggcgcgcaggggcaggccactgacatcgccatccaggccaaggagatcctcaagctgcgcgaccgcctcaacaagatctaccagaagcacacgcgccagcccatcgacaagatcgagcagtgcatggagagggacctcttcatggatcccgacgaggcgcgcgactggggcctcatcgacgaggtcatcgagaaccgacctgcctcgctcatgcccgacggaatcgttggaggcctcgatgtgcccagcctcggtggcggtgggggcgggggcggacggggaagcgacgtcgaggagccttcggcggtgtgagaattggcctcaaagggcggataaatgtggtgtatgataatctcaaggaatatttaccgtctcttcacagttaacatatctattctttagattttcatacagcctgcttggcacgtgccaaaataaagtcgtttgtaagttgaatggataatgaatgaagcggatttaataatttgggcaagattcttggtcctgctgccacgctgtattctggacaggtgttatataatcaatttgtagtagcctgtattgcagtgggatgacaccagtgttcagtagaactgtaggatttttgaaaattttttgtggtctatctagcaaacaccagttggtcatttttgagggtaccagcttgggtctggtattgttgtttttagggtttaggagttttaagtgagaagtgcttgtctcaggtttcagtactacaattatggatgtaccactgaagttccagtttagggaagacttgaattcatatttcgttgttcaatat

SEQ ID NO: 40359 - DNA, 1211 bp, Zea Mays
ctcgcgtgctcgattcccatctccccctccctgcgcacacccgcacaccaccaacaccagacgccgccgcccctcatcgctgtcccgtcccgcgcgcggccgccgcatccgtccgggcctcctcgtctccccagccccgctgccgccgcagcaaaaacctccacgaatcgccgacactccaacccggaagagccaacgaggtgactccgcgccccggtcatgggtgacagccaatactccttctctcttaccactttcagcccgtcgggaaagcttgtgcagatagagcacgcgctcacggctgtcggatccgggcagacctccctagggatcaaagctgccaacggtgtagtgattgccaccgagaagaaactgccttctattttagtggatgaaacatctgtgcaaaagattcaggcactaacaccaaatattggagttgtctatagtgggatgggtccagattttcgtgttctggtgagaaaaagtcgaaagcaggcacagcagtattatcggttgtacaaggagcatatacctgtaacacagcttgtgcgagagactgctgctgtgatgcaggagttcacacagtcaggtggtgtaagaccatttggagtatcgctgttgattgctgggtatgatgacaatggcccacagttgtatcaggttgatccctcaggatcatacttctcctggaaggcatcagccatgggaaaaaatgtgtcaaatgcaaagacatttcttgaaaagagatacacagaggatatggagcttgatgatgccatccacactgcaattttgactttgaaagaaggatatgaggggcaaatttcctccaacaacattgaaatcggaattattcgagctgaccgtgagttcaaagttctaagcccatcagagatcaaggatttcttggaagaggtggagtaagttgtctgttgatgatttactgtttcaaacaagaatagcagcatcacttatgagcagccagcctgaagcttgtcttggttttatcactctgtaaactgatttgctccagcgacatgtcttggttttatcactctgtaaactgatttgctccagcgacatgtggttcttacatttgaaaccctcctgagcgcatactgtagacaaatgagatacgtaagatggatgttgtatttgacagtctctgcagtttgtttatgtgattcacgttcttgtgtgctgtatcg

SEQ ID NO: 40360 - DNA, 458 bp, Zea Mays
tacacagaggatatggaacttgatgatgccatccacactgcaattttgactttgaaagaaggatatgaggggcaaatttcctccaacaacattgaaatcggaattattcgagctgaccgtgagttcaaagttctaagcccatcagagatcaaggatttcttggaagaggtggagtaagttgtctgttgatgatttactgtttcaaacaagaatagcagcatcacttatgagcagccagcctgaagcttgtcttggttttatcactctgtaaactgatttgctccagcgacatgtcttggttttatcactctgtaaactgatttgctccagcgacatgtggttcttacatttgaaaccctcctgaacgcatactgtagacaaatgagatacgtaagatggattttgtatttgacagtctctacagtttgtttatgtgattcacgttcttgtgtgctgta

SEQ ID NO: 40361 - DNA, 1106 bp, Zea Mays
ccacaacggcgttcccctagtttcaaaagaattaaaaaaaagagcaaaaaccttgccacgaatcgccgacactccaacccggaagaggcaacgaggtgactccgcgcctcggtcatgggtgacagccaatactccttctcgcttaccactttcagcccgtcgggaaagcttgtgcagatagagcacgcgctcacggctgtcggatccgggcagacctccctagggatcaaagctgccaacggtgtagtgattgccactgagaagaaactgccttctattttggtggatgaaacatctgtgcaaaagattcaggcactaacaccaaatattggagttgtctatagtgggatgggtccagattttcgtgttctggtgagaaaaagtcgaaagcaggcacagcagtattatcggttgtacaaggagcatatacctgtaacacagcttgtgcgagagactgctgctgtgatgcaggagttcacacagtcaggtggtgtaagaccatttggagtatcgctgttgattgctgggtatgatgacaatggcccacagttgtatcaggttgatccctcaggatcatacttctcctggaaggcatcagccatgggaaaaaatgtgtcaaatgcaaagacatttcttgaaaagagatacacagaggatatggagcttgatgatgccatccacactgcaattttgactttgaaagaaggatatgaggggcaaatttcctccaacaacattgaaatcggaattattcgagctgaccgtgagttcaaagttctaagcccatcagagatcaaggatttcttggaagaggtggagtaagttgtctgttgatgatttactgtttcaaacaagaatagcagcatcacttatgagcagccagcctgaagcttgtcttggttttatcactctgtaaactgatttgctccagcgacatgtcttggttttatcactctgtaaactgatttgctccagcgacatgtggttcttacatttgaaaccctcctgagcgcatactgtagacaaatgagatacgtaagatggatgttgtatttgacagtctctgcagtttgtttatgtgattcacgttcttgtgtgctgtatcg

SEQ ID NO: 40362 - DNA, 1277 bp, Zea Mays
cgatggagaaggggcatcggtgctggagaagggtgcatgctcgaatgtgcgctgcgtaatataaagcagagagattgatagcagaggctgctgggtatggttcacagttagttgtctttccagaagcttttattggaggctatcctcgtggatccacatttggtttcgggatcagtattagtattattaatccaaaagacaagggaaaggaagcattccggaggtatcatgcatctgctatagatgtgcctggtccagaagttacacgcttggctgctatggctgcaaaatataaggttttcttggtcatgggggtgattgaaagggaaggttacaccctttattgttccgtgcttttctttgaccctcttggccgttacctgggtaagcaccggaagctcatgcctacagcattagagagaattatatggggatttggggatggatcgactattccagtttatgatactccacttggaaagattggggcgctcatttgctgggaaaataaaatgccacttttgaggacagcgctgtatggtaaaggtattgagatatactgtgcccccactgctgactccaggcctgtttggcaagcctccatgacacacattgctttggaggggggatgctttgtcttgtcagcaaaccaattctgccgcagaaaggactatcctcccccaccggagtatgagtttgctggtttaggtgaagagccatccgcggacactgttgtttgccctggaggcagcgttatcatttctccatctggagaagtcttggcaggtcccaactatgaaggagaggcactgattacagccgaccttgacctgggagagattgttcgagccaagtttgatttcgacgtggtgggccactattctcgacctgaagtccttagattggtagtgaacgaccaaccgcagctccctgtgtctttcacgtctgccgctgagaggactccagctgccaagagtgatatcgatactaagtcttactgattgactggtcatgaaactgtgttgcgccgaacacttggtgatggtcgctcagctcctctagtttgctgttgtgtctcgtggatgggagttgggagttgtagctttgaactaaaaaaaaaactcttgccttcccaacgtaaaaaaatggtggccgcagttatgttccttgtgaaagctttttaatccaaaacgaacaagcttaaggagataaaccctattacttccatttcaatttcgaatagtaccaaatgataatcgcccattttaggctgcctc

SEQ ID NO: 40363 - DNA, 1958 bp, Zea Mays
attttgagaatgaagatagcatttcttttgcataaagctattttatattttgctagtttttgtataaagtagaaagagaaagagtgaccatgataaccgtagaaccatagaaacaaatgatttattatatggtacagatagtagagagatgagaaaggccatgagccccatgactgtgtctgtgtgaattgcctttggatcgtcctagcagccttgtcgtcgttagaggatttggaacccgttccattcgccgcctttctttttcttcgcccgtccaccctacgagcgcgcacgctctcctggctatagcaaccgccgtcgccgccccacgctacgtgctcgagtctagcctcgtcggttccttcgtcagttcttcgtcggatcctttgctggcgaccaacacccaccagcttgctgtttcccccttctttttgcttgcttcatcgaagtcctttccaggatgaattctaagcgtaggaggagtcatagcccagttgaatacaaagaaggtcgtgaaaaagattatgaggcttctggaaggaaggataaatcaagagatctagatgatacatttgatgctaaaagaggtcatgaatcgggcaggcactctgataggcattcctatggaacatcacgtgaatccaggaggcatgatgactataggaggtaccatgataagtccggtgatgattatggtaggagctatccaagagcctcttggtcagaccgggaatcaagggctgatacttattatgatcgctcaaagcatgatagcacatctggtagatcacgtggtgaccagcaagatgttggcagtaggtacggagaaaaatctgtcaatcgagatcagaggagtataaatgaagaaaagcaggagccccctcgtggctatcaaaagagtgatgttggagaatacaataaatgtactgatgcaagaaagcaagagtacagaggttatggagatgatagagatcattacagggttgttcataagaacaaggaaaccatcaaagaggaggtcctgaagaggagaaatggaaaagaagttgagaaagaagctttagtggaaactagggagaagaaaagaagtttattcagctctactggaccaaatgttgataatccaggggatgccaaaccatcagccacaactgaagccttcgataactcagcaggaaccgtagatggtgtgaatgcagctaaagttgcagctatgaaagctgctgaattagtgaataggaacattgcagcatttggtgctggaactgggcgcctatccactgatcagaagaaaaagcttctttggggtaacaaaaagggtaatccttcggaggagacaagtaaacgttgggacttgttttctgatcgtgagcgccaagagaaatttaacaaactcatgggtgtgaagagcagtgccccggttcaggaaaacatggtcgcgagcaaggccgcgagctcagcggaagaagccaagaaactggaggagctcgacaccaacctggagaagcattacatagcaggcctccgcaggaaagatggcaggacagtcggccttggcctctagaaactctgcttgcagatgatgcagcgttaaaaagttcagatagcttgctctgtacaatctacagtatcgtttttattcttgcacttacaaattttcctggctggtttatgttaactgtgttgccgggttatcttgaagctgtaaaacatctatgcctgattgactcctgtattgcgttggcataacccgtcatctggggtagtaatttgcaggctatttgctctttgcgcccaaagttgtttggtttgaagctgaattatgcctaccaagaaaattggttacgactaacgcaacggcacgatcaaaattttggacattaatgcttcgtctacttacagaattcttagctggatttggataaaagaatactacatctgttatgaccggcatgcag

SEQ ID NO: 40364 - DNA, 1149 bp, Zea Mays
ccatgagccccatgactgtgtctgtgtgaattgcctttggatcgtcctagcagccttgtcgtcgttagaggatttggaacccgttccattcgccgcctttctttttcttcgcccgtccaccctacgagcgcgcacgctctcctggctatagcaaccgccgtcgccgccccacgctacgtgctcgagtctagcctcgtcggttccttcgtcagttcttcgtcggatcctttgctggcgaccaacacccaccagcttgctgtttcccccttctttttgcttgcttcatcgaagtcctttccaggatgaattctaagcgtaggaggagtcatagcccagttgaatacaaagaaggtcgtgaaaaagattatgaggcttctggaaggaaggataaatcaagagatctagatgatacatttgatgctaaaagaggtcatgaatcgggcaggcactctgataggcattcctatggaacatcacgtgaatccaggaggcatgatgactataggaggtaccatgataagtccggtgatgattatggtaggagctatccaagagcctcttggtcagaccgggaatcaagggctgatacttattatgatcgctcaaagcatgatagcacatctggtagatcacgtggtgaccagcaagatgttggcagtaggtacggagaaaaatctgtcaatcgagatcagaggagtataaatgaagaaaagcaggagccccctcgtggctatcaaaagagtgatgttggagaatacaataaatgtactgatgcaagaaagcaagagtacagaggttatggagatgatagagatcattacagggttgttcataagaacaaggaaaccatcaaagaggaggtcctgaagaggagaaatggaaaagaagttgagaaagaagctttagtggaaactagggagaagaaaagaagtttattcagctctactggaccaaatgttgataatccaggggatgccaaaccatcagccacaactgaagccttcgataactcagcaggaaccgtagatggtgtgaatgcagctaaagttgcagctatgaaagctgctgaattagcgtgttcacctatcagcaatgctgcatggtttgaagaaaatggaaattgtatttgatgatcttgatgttctgaac

SEQ ID NO: 40365 - DNA, 1100 bp, Zea Mays
ccatgagccccatgactgtgtctgtgtgaattgcctttggatcgtcctagcagccttgtcgtcgttagaggatttggaacccgttccattcgccgcctttctttttcttcgcccgtccaccctacgagcgcgcacgctctcctggctatagcaaccgccgtcgccgccccacgctacgtgctcgagtctagcctcgtcggttccttcgtcagttcttcgtcggatcctttgctggcgaccaacacccaccaggatgaattctaagcgtaggaggagtcatagcccagttgaatacaaagaaggtcgtgaaaaagattatgaggcttctggaaggaaggataaatcaagagatctagatgatacatttgatgctaaaagaggtcatgaatcgggcaggcactctgataggcattcctatggaacatcacgtgaatccaggaggcatgatgactataggaggtaccatgataagtccggtgatgattatggtaggagctatccaagagcctcttggtcagaccgggaatcaagggctgatacttattatgatcgctcaaagcatgatagcacatctggtagatcacgtggtgaccagcaagatgttggcagtaggtacggagaaaaatctgtcaatcgagatcagaggagtataaatgaagaaaagcaggagccccctcgtggctatcaaaagagtgatgttggagaatacaataaatgtactgatgcaagaaagcaagagtacagaggttatggagatgatagagatcattacagggttgttcataagaacaaggaaaccatcaaagaggaggtcctgaagaggagaaatggaaaagaagttgagaaagaagctttagtggaaactagggagaagaaaagaagtttattcagctctactggaccaaatgttgataatccaggggatgccaaaccatcagccacaactgaagccttcgataactcagcaggaaccgtagatggtgtgaatgcagctaaagttgcagctatgaaagctgctgaattagcgtgttcacctatcagcaatgctgcatggtttgaagaaaatggaaattgtatttgatgatcttgatgttctgaac

SEQ ID NO: 40366 - DNA, 1556 bp, Zea Mays
atttcattcccttgatagtattacatgtttatggtttatttcttctataggactcaggatgaattctaagcgtaggaggagtcatagcccagttgaatacaaagaaggtcgtgaaaaagattatgaggcttctggaaggaaggataaatcaagagatctagatgatacatttgatgctaaaagaggtcatgaatcgggcaggcactctgataggcattcctatggaacatcacgtgaatccaggaggcatgatgactataggaggtaccatgataagtccggtgatgattatggtaggagctatccaagagcctcttggtcagaccgggaatcaagggctgatacttattatgatcgctcaaagcatgatagcacatctggtagatcacgtggtgaccagcaagatgttggcagtaggtacggagaaaaatctgtcaatcgagatcagaggagtataaatgaagaaaagcaggagccccctcgtggctatcaaaagagtgatgttggagaatacaataaatgtactgatgcaagaaagcaagagtacagaggttatggagatgatagagatcattacagggttgttcataagaacaaggaaaccatcaaagaggaggtcctgaagaggagaaatggaaaagaagttgagaaagaagctttagtggaaactagggagaagaaaagaagtttattcagctctactggaccaaatgttgataatccaggggatgccaaaccatcagccacaactgaagccttcgataactcagcaggaaccgtagatggtgtgaatgcagctaaagttgcagctatgaaagctgctgaattagtgaataggaacattgcagcatttggtgctggaactgggcgcctatccactgatcagaagaaaaagcttctttggggtaacaaaaagggtaatccttcggaggagacaagtaaacgttgggacttgttttctgatcgtgagcgccaagagaaatttaacaaactcatgggtgtgaagagcagtgccccggttcaggaaaacatggtcgcgagcaaggccgcgagctcagcggaagaagccaagaaactggaggagctcgacaccaacctggagaagcattacatagcaggcctccgcaggaaagatggcaggacagtcggccttggcctctagaaactctgcttgcagatgatgcagcgttaaaaagttcagatagcttgctctgtacaatctacagtatcgtttttattcttgcacttacaaattttcctggctggtttatgttaactgtgttgccgggttatcttgaagctgtaaaacatctatgcctgattgactcctgtattgcgttggcataacccgtcatctggggtagtaatttgcaggctatttgctctttgcgcccaaagttgtttggtttgaagctgaattatgcctaccaagaaaattggttacgactaacgcaacggcacgatcaaaattttggacattaatgcttcgtctacttacagaattcttagctggatttggataaaagaatactacatctgttatgaccggcatgcag

SEQ ID NO: 40367 - DNA, 1188 bp, Zea Mays
gcgaattgagattccgcttctccaatcgtccaatctgacaatctccatcctcagatagaacagcctcccaagcgacagaacagcctcaggaggcacccccgcggttagtctcgaagcttccgttcggaaccagggttagggtttcgcgtcctcccgtcgtcatcctcagccatgtccgggcgcgaggtccgcgagtacaccaatctcagcgaccccaaagacaggaagtttggtaaagggaaggataagatcgacgatgaggacatcaccttccagcgcatggttgcaaagatgcaagaggttgctggtgataggggaggctaccttcacggacgaggagcgatgatttgctttacctgaaagagcaaatggaagctgaagaagatgcagagcgccttcttcgtcatactgagaagcgggcatttgctgcttttaagaaagcagcaattttagctgattctacacctgctgtccctgtggctcttcgtgttgaacctaaacctaaaagtgatataaggcaacaagatcttttgaagaacattgttgggatcaaaccaaagcgaccaaaagttagcagcccttcacagccaccagatagcaataagcctaaacatacggaagaagaccctgtcggcgagttgtcgccatcacggaatccgttgggaccatctcatgggactgtgaatcctgaccacacagcgccaaggttagatgaaccaacagaggtgaagcaacagaacagagctggaagtttgcttggtttagcttatgagagttcggatgaagaatagttgatcatgcgattccaatgggaactggactatttcttgtcagatgtctgcattccaaacgacaggcctggtgtattgatgagagctctcactgagtcatcctcaggttacgggtttgaaacagcgtgggtttggaacagtcagtcaccaggtcatgccaggagtttgaaacattgtgggtttaaaacggccttccttcatatttgcagaggaaggctgcctcattttatcctctttagtatttagctgtgtaattggttttataattagattatatttaatattcataataaacattcaaacatccgatatatatagactaaattttagtgctggaaccaaacatcccctatattacagtacatcagtttgagggtttgaagaaatctctctaaat

SEQ ID NO: 40368 - DNA, 1219 bp, Zea Mays
tgagattccgcttctccaatcgtccaatctgacaatctccatcctcagatagaacagcctcccaagcgacagaacagcctcaggaggcacccccgcggttagtctcgaagcttccgttcggaaccagggttagggtttcgcgtcctcccgtcgtcatcctcagccatgtccgggcgcgaggtccgcgagtacaccaatctcagcgaccccaaagacaggaagtttggtaaagggaaggataagatcgacgatgaggacatcaccttccagcgcatggttgcaaagggattttggttctctactcggtggttgataccaacagatgcaagaggttgctggtgataggggaggctaccttcacggacgaggagcgatgatttgctttacctgaaagagcaaatggaagctgaagaagatgcagagcgccttcttcgtcatactgagaagcgggcatttgctgcttttaagaaagcagcaattttagctgattctacacctgctgtccctgtggctcttcgtgttgaacctaaacctaaaagtgatataaggcaacaagatcttttgaagaacattgttgggatcaaaccaaagcgaccaaaagttagcagcccttcacagccaccagatagcaataagcctaaacatacggaagaagaccctgtcggcgagttgtcgccatcacggaatccgttgggaccatctcatgggactgtgaatcctgaccacacagcgccaaggttagatgaaccaacagaggtgaagcaacagaacagagctggaagtttgcttggtttagcttatgagagttcggatgaagaatagttgatcatgcgattccaatgggaactggactatttcttgtcagatgtctgcattccaaacgacaggcctggtgtattgatgagagctctcactgagtcatcctcaggttacgggtttgaaacagcgtgggtttggaacagtcagtcaccaggtcatgccaggagtttgaaacattgtgggtttaaaacggccttccttcatatttgcagaggaaggctgcctcattttatcctctttagtatttagctgtgtaattggttttataattagattatatttaatattcataataaacattcaaacatccgatatatatagactaaattttagtgctggaaccaaacatcccctatattacagtacatcagtttgagggtttgaagaaatctctctaaat

SEQ ID NO: 40369 - DNA, 1053 bp, Zea Mays
aatctgacaatctccatcctcagatagaacagcctcccaagcgacagaacagcctcaggaggcacccccgcggttagtctcgaagcttccgttcggaaccagggttagggtttcgcgtcctcccgtcgtcatcctcagccatgtccgggcgcgaggtccgcgagtacaccaatctcagcgaccccaaagacaggaagtttggtaaagggaaggataagatcgacgatgaggacatcaccttccagcgcatggttgcaaagatgcaagaggttgctggtgataggggaggctaccttcacggacgaggagcaattttagctgattctacacctgctgtccctgtggctcttcgtgttgaacctaaacctaaaagtgatataaggcaacaagatcttttgaagaacattgttgggatcaaaccaaagcgaccaaaagttagcagcccttcacagccaccagatagcaataagcctaaacatacggaagaagaccctgtcggcgagttgtcgccatcacggaatccgttgggaccatctcatgggactgtgaatcctgaccacacagcgccaaggttagatgaaccaacagaggtgaagcaacagaacagagctggaagtttgcttggtttagcttatgagagttcggatgaagaatagttgatcatgcgattccaatgggaactggactatttcttgtcagatgtctgcattccaaacgacaggcctggtgtattgatgagagctctcactgagtcatcctcaggttacgggtttgaaacagcgtgggtttggaacagtcagtcaccaggtcatgccaggagtttgaaacattgtgggtttaaaacggccttccttcatatttgcagaggaaggctgcctcattttatcctctttagtatttagctgtgtaattggttttataattagattatatttaatattcataataaacattcaaacatccgatatatatagactaaattttagtgctggaaccaaacatcccctatattacagtacatcagtttgagggtttgaagaaatctctctaaat

SEQ ID NO: 40370 - DNA, 3329 bp, Zea Mays
cccagcaccagctgtgtattagcggccgggcggacaagaagcagttaccgcgacaacggacgacggcgacgcgagcagtcgagtaaagacgcggtggggcggcgctgcgctgggcgggtggtgagatcagaggaaggaacgggatcgctcccggttaggttgtcgtcgtgcgcgggtgctggggcgagggcgtggcggatctcatctaacgccgccacttgctgctaccacttccccttcccccgcacctctgagctctgacctcccgcccttctcccacccatcaccatctttgtccctcgcgcaattcgccgaacacaccgcgcgcgccgcgcctccctgcgacggctgcctccacggccaatgctggcggcgcgatgaacgtggatgaggaggtggagagcggggaggaagaggaggaggacctgttctacgagtcgctcgatcgcatcctctcctcctcgggctcctccacatctgcctcggacgacgacggcgccgacagcccgcgccgccgccgcggttgcgatgcgccggtcgcggccgccgcagcggccctcgacctgtggacctctcagccgtcgcccgtccaggagcggcgccgccggctgctccagctgatggggctcataggggatccttccctcgccgggtttgagactggccggtccgcctccgaagatgccgcgggcccgcccccagcctctcccgtctctcggtccagatcaggcggggccgccctcggctccgccgggaagccaccactcgggggcgtccgtctgcggtcatccttgtccgacgggcccgatcctgccgacgaggaccccaggtgcttgatcaggaaccttgacgacggcagagagtacgtggtgaaggaagaattcggtctccgcgaggtcggcacggggcgccaccttaccgttgaggagttggcccgctcacctattgttcaggagcttatgcggcgccaagcttttagtactcccaactccaactgcaactcaaattcccaaagtggcgcctccacaccgatcgaaaggtcgagctcaggttccagcaatggtgggtcgcgctccaagcggcgaagcagctggctccgcagcatccgctgcgcagctgggtccttggtcacccactcccgtgaccgcagcagcagcgacgagaaggacacgtcttcagagaaaggcgggcaccactccagctccgctacggatgacagccaggacagtgttccacgccatggcccggcccgtgtcaaggtgcggcagtatgggaagtcatataaggaactcagtggcctgtttatgacacaggagatacatgcacacaatggttccatctggagcatcaaatttagtcctgatggtcgttaccttgccagtgccggggaggattgcataattcatgtttgggaggtgttggagttcaagagggcagggaaggagagggaggtgaaggagaatggggtatgcaatccgcttgttgctatggtatacagtgagtcatcagagacgatggtggcatctggtgctccaagcgggagccattgggagaagaagctgcgatcaaaggtactgcaaggtgggggatcagtgagctcagacaggttgatggtgcctgagtatgtgtttgcactgtccgagaagcctgtgataacctttgcagggcattcagaggatgtgctggatctcagctggtccaaatctcagagccccttaaacttgcacgtgtctcacaaaaaccgctgaacagaagcaaagtttagggagtaactgtgcaagtttaggggctaggtgtgacaactgtgcgaattgaatgagacgggaaagcaattttcaagttcaggcagctagcccactagtatttgctttcatcatcaatggataaaacagtacggttgtggcacatgtcaagcacttattgtttgaaaaccttctcacacactgactatgtgacttgcatacagttcaatcctgttgatgatagatacttcattagtggttccctggatgaaaaggttcgtatctggagtattccaaagcgtgaaattgttgattgggttgatcttcatgaaatggttactgctgcctgctatactccagatggaaagggcgcgctgatcgggtcccacaagggcagttgccatttgtatgatacatctgatgacatgctttgctacaaaacacagattgacctgcaaaacaagagaagaaaatctagccagaagaaaataacaggatttcagtttgtcccaggggattcttcaatggtcataatcacatctgcagattcacgaatcagagttcttgatgattttgagctagttcataggtttaaaggattccggaacaccagcagccaaatctcagcttgtttagctggaaacggacggtatattatctcggcaagcgaggattcccgtgtatatatctggaggaacgatgatggttcgaaaccaagtaaaaagaagggcattgtttctgtcacaaatacccatgaacacttccactgcgagagtgtcacggttgctgttacctggccttttaccagcaccacaatgacttctttaatgaaccccaggaaacaagagcttgagcttgggtctgagaatggctattcaccgcaagatctgcaaaccaaacttgctaaggcacaggagatgacagatgttgagtaccggagcacaaatatcacaagttacaactcgaagcataacagtgaccggacatctccggcttggcctgaagaacttgtcacaccaccaaatcaaagtctcagcgctactacctgccatgccaacgagggagaccaagctctgaatcggtcggcctggggcctagtaattgttacagcaggccgtggaggtcaaatcagaacatttcaaaacttcggttttcctgtaagagtatagcatgagtccgaatacataagatagtcactgccattcaggagtgcagtttgtgtatagataggagatagtgggtgagtttcacactattcagggattgggtttgactgttccttggtgcacctgctagagatcagaatcttcatctaacatacactgtcagtagtccaaaacttgtgtatgccaaatttattttaccctgaaggcccaagttgtacatgaaagagaaagccctacagagagcaacactatcagctgactggagataattcatctgtcagcttcaaccctacctttcggttttagacttctattccgaaccatgacatgttcttgtaagaaaagaaaaggaaaaagatagacgtggtgaaattgtcattttggctttatgatctcatggtattggtatcctgaatctttt

SEQ ID NO: 40371 - DNA, 3189 bp, Zea Mays
cccagcaccagctgtgtattagcggccgggcggacaagaagcagttaccgcgacaacggacgacggcgacgcgagcagtcgagtaaagacgcggtggggcggcgctgcgctgggcgggtggtgagatcagaggaaggaacgggatcgctcccggttaggttgtcgtcgtgcgcgggtgctggggcgagggcgtggcggatctcatctaacgccgccacttgctgctaccacttccccttcccccgcacctctgagctctgacctcccgcccttctcccacccatcaccatctttgtccctcgcgcaattcgccgaacacaccgcgcgcgccgcgcctccctgcgacggctgcctccacggccaatgctggcggcgcgatgaacgtggatgaggaggtggagagcggggaggaagaggaggaggacctgttctacgagtcgctcgatcgcatcctctcctcctcgggctcctccacatctgcctcggacgacgacggcgccgacagcccgcgccgccgccgcggttgcgatgcgccggtcgcggccgccgcagcggccctcgacctgtggacctctcagccgtcgcccgtccaggagcggcgccgccggctgctccagctgatggggctcataggggatccttccctcgccgggtttgagactggccggtccgcctccgaagatgccgcgggcccgcccccagcctctcccgtctctcggtccagatcaggcggggccgccctcggctccgccgggaagccaccactcgggggcgtccgtctgcggtcatccttgtccgacgggcccgatcctgccgacgaggaccccaggtgcttgatcaggaaccttgacgacggcagagagtacgtggtgaaggaagaattcggtctccgcgaggtcggcacggggcgccaccttaccgttgaggagttggcccgctcacctattgttcaggagcttatgcggcgccaagcttttagtactcccaactccaactgcaactcaaattcccaaagtggcgcctccacaccgatcgaaaggtcgagctcaggttccagcaatggtgggtcgcgctccaagcggcgaagcagctggctccgcagcatccgctgcgcagctgggtccttggtcacccactcccgtgaccgcagcagcagcgacgagaaggacacgtcttcagagaaaggcgggcaccactccagctccgctacggatgacagccaggacagtgttccacgccatggcccggcccgtgtcaaggtgcggcagtatgggaagtcatataaggaactcagtggcctgtttatgacacaggagatacatgcacacaatggttccatctggagcatcaaatttagtcctgatggtcgttaccttgccagtgccggggaggattgcataattcatgtttgggaggtgttggagttcaagagggcagggaaggagagggaggtgaaggagaatggggtatgcaatccgcttgttgctatggtatacagtgagtcatcagagacgatggtggcatctggtgctccaagcgggagccattgggagaagaagctgcgatcaaaggtactgcaaggtgggggatcagtgagctcagacaggttgatggtgcctgagtatgtgtttgcactgtccgagaagcctgtgataacctttgcagggcattcagaggatgtgctggatctcagctggtccaaatctcagtatttgctttcatcatcaatggataaaacagtacggttgtggcacatgtcaagcacttattgtttgaaaaccttctcacacactgactatgtgacttgcatacagttcaatcctgttgatgatagatacttcattagtggttccctggatgaaaaggttcgtatctggagtattccaaagcgtgaaattgttgattgggttgatcttcatgaaatggttactgctgcctgctatactccagatggaaaggtgttgtctcagggcgcgctgatcgggtcccacaagggcagttgccatttgtatgatacatctgatgacatgctttgctacaaaacacagattgacctgcaaaacaagagaagaaaatctagccagaagaaaataacaggatttcagtttgtcccaggggattcttcaatggtcataatcacatctgcagattcacgaatcagagttcttgatgattttgagctagttcataggtttaaaggattccggaacaccagcagccaaatctcagcttgtttagctggaaacggacggtatattatctcggcaagcgaggattcccgtgtatatatctggaggaacgatgatggttcgaaaccaagtaaaaagaagggcattgtttctgtcacaaatacccatgaacacttccactgcgagagtgtcacggttgctgttacctggccttttaccagcaccacaatgacttctttaatgaaccccaggaaacaagagcttgagcttgggtctgagaatggctattcaccgcaagatctgcaaaccaaacttgctaaggcacaggagatgacagatgttgagtaccggagcacaaatatcacaagttacaactcgaagcataacagtgaccggacatctccggcttggcctgaagaacttgtcacaccaccaaatcaaagtctcagcgctactacctgccatgccaacgagggagaccaagctctgaatcggtcggcctggggcctagtaattgttacagcaggccgtggaggtcaaatcagaacatttcaaaacttcggttttcctgtaagagtatagcatgagtccgaatacataagatagtcactgccattcaggagtgcagtttgtgtatagataggagatagtgggtgagtttcacactattcagggattgggtttgactgttccttggtgcacctgctagagatcagaatcttcatctaacatacactgtcagtagtccaaaacttgtgtatgccaaatttattttaccctgaaggcccaagttgtacatgaaagagaaagccctacagagagcaacactatcagctgactggagataattcatctgtcagcttcaaccctacctttcggttttagacttctattccgaaccatgacatgttcttgtaagaaaagaaaaggaaaaagatagacgtggtgaaattgtcattttggctttatgatctcatggtattggtatcctgaatctttt

SEQ ID NO: 40372 - DNA, 3055 bp, Zea Mays
cccagcaccagctgtgtattagcggccgggcggacaagaagcagttaccgcgacaacggacgacggcgacgcgagcagtcgagtaaagacgcggtggggcggcgctgcgctgggcgggtggtgagatcagaggaaggaacgggatcgctcccggttaggttgtcgtcgtgcgcgggtgctggggcgagggcgtggcggatctcatctaacgccgccacttgctgctaccacttccccttcccccgcacctctgagctctgacctcccgcccttctcccacccatcaccatctttgtccctcgcgcaattcgccgaacacaccgcgcgcgccgcgcctccctgcgacggctgcctccacggccaatgctggcggcgcgatgaacgtggatgaggaggtggagagcggggaggaagaggaggaggacctgttctacgagtcgctcgatcgcatcctctcctcctcgggctcctccacatctgcctcggacgacgacggcgccgacagcccgcgccgccgccgcggttgcgatgcgccggtcgcggccgccgcagcggccctcgacctgtggacctctcagccgtcgcccgtccaggagcggcgccgccggctgctccagctgatggggctcataggggatccttccctcgccgggtttgagactggccggtccgcctccgaagatgccgcgggcccgcccccagcctctcccgtctctcggtccagatcaggcggggccgccctcggctccgccgggaagccaccactcgggggcgtccgtctgcggtcatccttgtccgacgggcccgatcctgccgacgaggaccccaggtgcttgatcaggaaccttgacgacggcagagagtacgtggtgaaggaagaattcggtctccgcgaggtcggcacggggcgccaccttaccgttgaggagttggcccgctcacctattgttcaggagcttatgcggcgccaagcttttagtactcccaactccaactgcaactcaaattcccaaagtggcgcctccacaccgatcgaaaggtcgagctcaggttccagcaatggtgggtcgcgctccaagcggcgaagcagctggctccgcagcatccgctgcgcagctgggtccttggtcacccactcccgtgaccgcagcagcagcgacgagaaggacacgtcttcagagaaaggcgggcaccactccagctccgctacggatgacagccaggacagtgttccacgccatggcccggcccgtgtcaagtgccggggaggattgcataattcatgtttgggaggtgttggagttcaagagggcagggaaggagagggaggtgaaggagaatggggtatgcaatccgcttgttgctatggtatacagtgagtcatcagagacgatggtggcatctggtgctccaagcgggagccattgggagaagaagctgcgatcaaaggtactgcaaggtgggggatcagtgagctcagacaggttgatggtgcctgagtatgtgtttgcactgtccgagaagcctgtgataacctttgcagggcattcagaggatgtgctggatctcagctggtccaaatctcagtatttgctttcatcatcaatggataaaacagtacggttgtggcacatgtcaagcacttattgtttgaaaaccttctcacacactgactatgtgacttgcatacagttcaatcctgttgatgatagatacttcattagtggttccctggatgaaaaggttcgtatctggagtattccaaagcgtgaaattgttgattgggttgatcttcatgaaatggttactgctgcctgctatactccagatggaaagggcgcgctgatcgggtcccacaagggcagttgccatttgtatgatacatctgatgacatgctttgctacaaaacacagattgacctgcaaaacaagagaagaaaatctagccagaagaaaataacaggatttcagtttgtcccaggggattcttcaatggtcataatcacatctgcagattcacgaatcagagttcttgatgattttgagctagttcataggtttaaaggattccggaacaccagcagccaaatctcagcttgtttagctggaaacggacggtatattatctcggcaagcgaggattcccgtgtatatatctggaggaacgatgatggttcgaaaccaagtaaaaagaagggcattgtttctgtcacaaatacccatgaacacttccactgcgagagtgtcacggttgctgttacctggccttttaccagcaccacaatgacttctttaatgaaccccaggaaacaagagcttgagcttgggtctgagaatggctattcaccgcaagatctgcaaaccaaacttgctaaggcacaggagatgacagatgttgagtaccggagcacaaatatcacaagttacaactcgaagcataacagtgaccggacatctccggcttggcctgaagaacttgtcacaccaccaaatcaaagtctcagcgctactacctgccatgccaacgagggagaccaagctctgaatcggtcggcctggggcctagtaattgttacagcaggccgtggaggtcaaatcagaacatttcaaaacttcggttttcctgtaagagtatagcatgagtccgaatacataagatagtcactgccattcaggagtgcagtttgtgtatagataggagatagtgggtgagtttcacactattcagggattgggtttgactgttccttggtgcacctgctagagatcagaatcttcatctaacatacactgtcagtagtccaaaacttgtgtatgccaaatttattttaccctgaaggcccaagttgtacatgaaagagaaagccctacagagagcaacactatcagctgactggagataattcatctgtcagcttcaaccctacctttcggttttagacttctattccgaaccatgacatgttcttgtaagaaaagaaaaggaaaaagatagacgtggtgaaattgtcattttggctttatgatctcatggtattggtatcctgaatctttt

SEQ ID NO: 40373 - DNA, 3252 bp, Zea Mays
cccagcaccagctgtgtattagcggccgggcggacaagaagcagttaccgcgacaacggacgacggcgacgcgagcagtcgagtaaagacgcggtggggcggcgctgcgctgggcgggtggtgagatcagaggaaggaacgggatcgctcccggttaggttgtcgtcgtgcgcgggtgctggggcgagggcgtggcggatctcatctaacgccgccacttgctgctaccacttccccttcccccgcacctctgagctctgacctcccgcccttctcccacccatcaccatctttgtccctcgcgcaattcgccgaacacaccgcgcgcgccgcgcctccctgcgacggctgcctccacggccaatgctggcggcgcgatgaacgtggatgaggaggtggagagcggggaggaagaggaggaggacctgttctacgagtcgctcgatcgcatcctctcctcctcgggctcctccacatctgcctcggacgacgacggcgccgacagcccgcgccgccgccgcggttgcgatgcgccggtcgcggccgccgcagcggccctcgacctgtggacctctcagccgtcgcccgtccaggagcggcgccgccggctgctccagctgatggggctcataggggatccttccctcgccgggtttgagactggccggtccgcctccgaagatgccgcgggcccgcccccagcctctcccgtctctcggtccagatcaggcggggccgccctcggctccgccgggaagccaccactcgggggcgtccgtctgcggtcatccttgtccgacgggcccgatcctgccgacgaggaccccaggtgcttgatcaggaaccttgacgacggcagagagtacgtggtgaaggaagaattcggtctccgcgaggtcggcacggggcgccaccttaccgttgaggagttggcccgctcacctattgttcaggagcttatgcggcgccaagcttttagtactcccaactccaactgcaactcaaattcccaaagtggcgcctccacaccgatcgaaaggtcgagctcaggttccagcaatggtgggtcgcgctccaagcggcgaagcagctggctccgcagcatccgctgcgcagctgggtccttggtcacccactcccgtgaccgcagcagcagcgacgagaaggacacgtcttcagagaaaggcgggcaccactccagctccgctacggatgacagccaggacagtgttccacgccatggcccggcccgtgtcaaggtgcggcagtatgggaagtcatataaggaactcagtggcctgtttatgacacaggagatacatgcacacaatggttccatctggagcatcaaatttagtcctgatggtcgttaccttgccagtgccggggaggattgcataattcatgtttgggaggtgttggagttcaagagggcagggaaggagagggaggtgaaggagaatggggtatgcaatccgcttgttgctatggtatacagtgagtcatcagagacgatggtggcatctggtgctccaagcgggagccattgggagaagaagctgcgatcaaaggtactgcaaggtgggggatcagtgagctcagacaggttgatggtgcctgagtatgtgtttgcactgtccgagaagcctgtgataacctttgcagggcattcagaggatgtgctggatctcagctggtccaaatctcaggggctaggtgtgacaactgtgcgaattgaatgagacgggaaagcaattttcaagttcaggcagctagcccactagtatttgctttcatcatcaatggataaaacagtacggttgtggcacatgtcaagcacttattgtttgaaaaccttctcacacactgactatgtgacttgcatacagttcaatcctgttgatgatagatacttcattagtggttccctggatgaaaaggttcgtatctggagtattccaaagcgtgaaattgttgattgggttgatcttcatgaaatggttactgctgcctgctatactccagatggaaagggcgcgctgatcgggtcccacaagggcagttgccatttgtatgatacatctgatgacatgctttgctacaaaacacagattgacctgcaaaacaagagaagaaaatctagccagaagaaaataacaggatttcagtttgtcccaggggattcttcaatggtcataatcacatctgcagattcacgaatcagagttcttgatgattttgagctagttcataggtttaaaggattccggaacaccagcagccaaatctcagcttgtttagctggaaacggacggtatattatctcggcaagcgaggattcccgtgtatatatctggaggaacgatgatggttcgaaaccaagtaaaaagaagggcattgtttctgtcacaaatacccatgaacacttccactgcgagagtgtcacggttgctgttacctggccttttaccagcaccacaatgacttctttaatgaaccccaggaaacaagagcttgagcttgggtctgagaatggctattcaccgcaagatctgcaaaccaaacttgctaaggcacaggagatgacagatgttgagtaccggagcacaaatatcacaagttacaactcgaagcataacagtgaccggacatctccggcttggcctgaagaacttgtcacaccaccaaatcaaagtctcagcgctactacctgccatgccaacgagggagaccaagctctgaatcggtcggcctggggcctagtaattgttacagcaggccgtggaggtcaaatcagaacatttcaaaacttcggttttcctgtaagagtatagcatgagtccgaatacataagatagtcactgccattcaggagtgcagtttgtgtatagataggagatagtgggtgagtttcacactattcagggattgggtttgactgttccttggtgcacctgctagagatcagaatcttcatctaacatacactgtcagtagtccaaaacttgtgtatgccaaatttattttaccctgaaggcccaagttgtacatgaaagagaaagccctacagagagcaacactatcagctgactggagataattcatctgtcagcttcaaccctacctttcggttttagacttctattccgaaccatgacatgttcttgtaagaaaagaaaaggaaaaagatagacgtggtgaaattgtcattttggctttatgatctcatggtattggtatcctgaatctttt

SEQ ID NO: 40374 - DNA, 2163 bp, Zea Mays
cagatttctaatttatcttcaattctaatgtgtagatattatttttcagtgtaagtgcaaagttcaggctataataggatgtagaataccggaaagtagggtattggtagcagaaatcagatccacaaataactcatgttattaagaacacaaaaagctatgcaattacaatcatcatattagaaacatcatgatcacacaccagctaaacttatttattgttgggtttgggcgtacataacttgtatccagatctggcatagtgcaactggtgcactgtctggaaacgaaacttgaccagatgccctttatgcattttcgtttttgtgatagataaatttgattttactgctcccaagtgtacccaagcttttaccatgtgcataagaccgaggtgctctctacctgtaattaagacatggtctctacatgcttatagacttccattttactatggtttaaattttcgtctcagtgcatctagaaattttagcaggaattgcactgcacgctcctaaacttgcccgatcgtctaaactaacccctcaaacttttagagccccttaaacttgcacgtgtctcacaaaaaccgctgaacagaagcaaagtttagggagtaactgtgcaagtttaggggctaggtgtgacaactgtgcgaattgaatgagacgggaaagcaattttcaagttcaggcagctagcccactagtatttgctttcatcatcaatggataaaacagtacggttgtggcacatgtcaagcacttattgtttgaaaaccttctcacacactgactatgttcaatcctgttgatgatagatacttcattagtggttccctggatgaaaaggttcgtatctggagtattccaaagcgtgaaattgttgattgggttgatcttcatgaaatggttactgctgcctgctatactccagatggaaagggcgcgctgatcgggtcccacaagggcagttgccatttgtatgatacatctgatgacatgctttgctacaaaacacagattgacctgcaaaacaagagaagaaaatctagccagaagaaaataacaggatttcagtttgtcccaggggattcttcaatggtcataatcacatctgcagattcacgaatcagagttcttgatgattttgagctagttcataggtttaaaggattccggaacaccagcagccaaatctcagcttgtttagctggaaacggacggtatattatctcggcaagcgaggattcccgtgtatatatctggaggaacgatgatggttcgaaaccaagtaaaaagaagggcattgtttctgtcacaaatacccatgaacacttccactgcgagagtgtcacggttgctgttacctggccttttaccagcaccacaatgacttctttaatgaaccccaggaaacaagagcttgagcttgggtctgagaatggctattcaccgcaagatctgcaaaccaaacttgctaaggcacaggagatgacagatgttgagtaccggagcacaaatatcacaagttacaactcgaagcataacagtgaccggacatctccggcttggcctgaagaacttgtcacaccaccaaatcaaagtctcagcgctactacctgccatgccaacgagggagaccaagctctgaatcggtcggcctggggcctagtaattgttacagcaggccgtggaggtcaaatcagaacatttcaaaacttcggttttcctgtaagagtatagcatgagtccgaatacataagatagtcactgccattcaggagtgcagtttgtgtatagataggagatagtgggtgagtttcacactattcagggattgggtttgactgttccttggtgcacctgctagagatcagaatcttcatctaacatacactgtcagtagtccaaaacttgtgtatgccaaatttattttaccctgaaggcccaagttgtacatgaaagagaaagccctacagagagcaacactatcagctgactggagataattcatctgtcagcttcaaccctacctttcggttttagacttctattccgaaccatgacatgttcttgtaagaaaagaaaaggaaaaagatagacgtggtgaaattgtcattttggctttatgatctcatggtattggtatcctgaatctttt

SEQ ID NO: 40375 - DNA, 2099 bp, Zea Mays
cagatttctaatttatcttcaattctaatgtgtagatattatttttcagtgtaagtgcaaagttcaggctataataggatgtagaataccggaaagtagggtattggtagcagaaatcagatccacaaataactcatgttattaagaacacaaaaagctatgcaattacaatcatcatattagaaacatcatgatcacacaccagctaaacttatttattgttgggtttgggcgtacataacttgtatccagatctggcatagtgcaactggtgcactgtctggaaacgaaacttgaccagatgccctttatgcattttcgtttttgtgatagataaatttgattttactgctcccaagtgtacccaagcttttaccatgtgcataagaccgaggtgctctctacctgtaattaagacatggtctctacatgcttatagacttccattttactatggtttaaattttcgtctcagtgcatctagaaattttagcaggaattgcactgcacgctcctaaacttgcccgatcgtctaaactaacccctcaaacttttagagccccttaaacttgcacgtgtctcacaaaaaccgctgaacagaagcaaagtttagggagtaactgtgcaagtttaggggctaggtgtgacaactgtgcgaattgaatgagacgggaaagcaattttcaagttcaggcagctagcccactagtatttgctttcatcatcaatggataaaacagtacggttgtggcacatgtcaagcacttattgtttgaaaaccttctcacacactgactatgtgacttgcatacagttcaatcctgttgatgatagatacttcattagtggttccctggatgaaaaggttcgtatctggagtattccaaagcgtgaaattgttgattgggttgatcttcatgaaatggttactgctgcctgctatactccagatggaaagattgacctgcaaaacaagagaagaaaatctagccagaagaaaataacaggatttcagtttgtcccaggggattcttcaatggtcataatcacatctgcagattcacgaatcagagttcttgatgattttgagctagttcataggtttaaaggattccggaacaccagcagccaaatctcagcttgtttagctggaaacggacggtatattatctcggcaagcgaggattcccgtgtatatatctggaggaacgatgatggttcgaaaccaagtaaaaagaagggcattgtttctgtcacaaatacccatgaacacttccactgcgagagtgtcacggttgctgttacctggccttttaccagcaccacaatgacttctttaatgaaccccaggaaacaagagcttgagcttgggtctgagaatggctattcaccgcaagatctgcaaaccaaacttgctaaggcacaggagatgacagatgttgagtaccggagcacaaatatcacaagttacaactcgaagcataacagtgaccggacatctccggcttggcctgaagaacttgtcacaccaccaaatcaaagtctcagcgctactacctgccatgccaacgagggagaccaagctctgaatcggtcggcctggggcctagtaattgttacagcaggccgtggaggtcaaatcagaacatttcaaaacttcggttttcctgtaagagtatagcatgagtccgaatacataagatagtcactgccattcaggagtgcagtttgtgtatagataggagatagtgggtgagtttcacactattcagggattgggtttgactgttccttggtgcacctgctagagatcagaatcttcatctaacatacactgtcagtagtccaaaacttgtgtatgccaaatttattttaccctgaaggcccaagttgtacatgaaagagaaagccctacagagagcaacactatcagctgactggagataattcatctgtcagcttcaaccctacctttcggttttagacttctattccgaaccatgacatgttcttgtaagaaaagaaaaggaaaaagatagacgtggtgaaattgtcattttggctttatgatctcatggtattggtatcctgaatctttt

SEQ ID NO: 40376 - DNA, 2177 bp, Zea Mays
cagatttctaatttatcttcaattctaatgtgtagatattatttttcagtgtaagtgcaaagttcaggctataataggatgtagaataccggaaagtagggtattggtagcagaaatcagatccacaaataactcatgttattaagaacacaaaaagctatgcaattacaatcatcatattagaaacatcatgatcacacaccagctaaacttatttattgttgggtttgggcgtacataacttgtatccagatctggcatagtgcaactggtgcactgtctggaaacgaaacttgaccagatgccctttatgcattttcgtttttgtgatagataaatttgattttactgctcccaagtgtacccaagcttttaccatgtgcataagaccgaggtgctctctacctgtaattaagacatggtctctacatgcttatagacttccattttactatggtttaaattttcgtctcagtgcatctagaaattttagcaggaattgcactgcacgctcctaaacttgcccgatcgtctaaactaacccctcaaacttttagagccccttaaacttgcacgtgtctcacaaaaaccgctgaacagaagcaaagtttagggagtaactgtgcaagtttaggggctaggtgtgacaactgtgcgaattgaatgagacgggaaagcaattttcaagttcaggcagctagcccactagtatttgctttcatcatcaatggataaaacagtacggttgtggcacatgtcaagcacttattgtttgaaaaccttctcacacactgactatgtgacttgcatacagttcaatcctgttgatgatagatacttcattagtggttccctggatgaaaaggttcgtatctggagtattccaaagcgtgaaattgttgattgggttgatcttcatgaaatggttactgctgcctgctatactccagatggaaagggcgcgctgatcgggtcccacaagggcagttgccatttgtatgatacatctgatgacatgctttgctacaaaacacagattgacctgcaaaacaagagaagaaaatctagccagaagaaaataacaggatttcagtttgtcccaggggattcttcaatggtcataatcacatctgcagattcacgaatcagagttcttgatgattttgagctagttcataggtttaaaggattccggaacaccagcagccaaatctcagcttgtttagctggaaacggacggtatattatctcggcaagcgaggattcccgtgtatatatctggaggaacgatgatggttcgaaaccaagtaaaaagaagggcattgtttctgtcacaaatacccatgaacacttccactgcgagagtgtcacggttgctgttacctggccttttaccagcaccacaatgacttctttaatgaaccccaggaaacaagagcttgagcttgggtctgagaatggctattcaccgcaagatctgcaaaccaaacttgctaaggcacaggagatgacagatgttgagtaccggagcacaaatatcacaagttacaactcgaagcataacagtgaccggacatctccggcttggcctgaagaacttgtcacaccaccaaatcaaagtctcagcgctactacctgccatgccaacgagggagaccaagctctgaatcggtcggcctggggcctagtaattgttacagcaggccgtggaggtcaaatcagaacatttcaaaacttcggttttcctgtaagagtatagcatgagtccgaatacataagatagtcactgccattcaggagtgcagtttgtgtatagataggagatagtgggtgagtttcacactattcagggattgggtttgactgttccttggtgcacctgctagagatcagaatcttcatctaacatacactgtcagtagtccaaaacttgtgtatgccaaatttattttaccctgaaggcccaagttgtacatgaaagagaaagccctacagagagcaacactatcagctgactggagataattcatctgtcagcttcaaccctacctttcggttttagacttctattccgaaccatgacatgttcttgtaagaaaagaaaaggaaaaagatagacgtggtgaaattgtcattttggctttatgatctcatggtattggtatcctgaatctttt

SEQ ID NO: 40377 - DNA, 1507 bp, Zea Mays
attccatattcagtctttctctgcatcagatcaaagaagtatttgctttcatcatcaatggataaaacagtacggttgtggcacatgtcaagcacttattgtttgaaaaccttctcacacactgactatgtgacttgcatacagttcaatcctgttgatgatagatacttcattagtggttccctggatgaaaaggttcgtatctggagtattccaaagcgtgaaattgttgattgggttgatcttcatgaaatggttactgctgcctgctatactccagatggaaagggcgcgctgatcgggtcccacaagggcagttgccatttgtatgatacatctgatgacatgctttgctacaaaacacagattgacctgcaaaacaagagaagaaaatctagccagaagaaaataacaggatttcagtttgtcccaggggattcttcaatggtcataatcacatctgcagattcacgaatcagagttcttgatgattttgagctagttcataggtttaaaggattccggaacaccagcagccaaatctcagcttgtttagctggaaacggacggtatattatctcggcaagcgaggattcccgtgtatatatctggaggaacgatgatggttcgaaaccaagtaaaaagaagggcattgtttctgtcacaaatacccatgaacacttccactgcgagagtgtcacggttgctgttacctggccttttaccagcaccacaatgacttctttaatgaaccccaggaaacaagagcttgagcttgggtctgagaatggctattcaccgcaagatctgcaaaccaaacttgctaaggcacaggagatgacagatgttgagtaccggagcacaaatatcacaagttacaactcgaagcataacagtgaccggacatctccggcttggcctgaagaacttgtcacaccaccaaatcaaagtctcagcgctactacctgccatgccaacgagggagaccaagctctgaatcggtcggcctggggcctagtaattgttacagcaggccgtggaggtcaaatcagaacatttcaaaacttcggttttcctgtaagagtatagcatgagtccgaatacataagatagtcactgccattcaggagtgcagtttgtgtatagataggagatagtgggtgagtttcacactattcagggattgggtttgactgttccttggtgcacctgctagagatcagaatcttcatctaacatacactgtcagtagtccaaaacttgtgtatgccaaatttattttaccctgaaggcccaagttgtacatgaaagagaaagccctacagagagcaacactatcagctgactggagataattcatctgtcagcttcaaccctacctttcggttttagacttctattccgaaccatgacatgttcttgtaagaaaagaaaaggaaaaagatagacgtggtgaaattgtcattttggctttatgatctcatggtattggtatcctgaatctttt

SEQ ID NO: 40378 - DNA, 1492 bp, Zea Mays
ctctcggtatacttgcttctattgtatttgctttcatcatcaatggataaaacagtacggttgtggcacatgtcaagcacttattgtttgaaaaccttctcacacactgactatgtgacttgcatacagttcaatcctgttgatgatagatacttcattagtggttccctggatgaaaaggttcgtatctggagtattccaaagcgtgaaattgttgattgggttgatcttcatgaaatggttactgctgcctgctatactccagatggaaagggcgcgctgatcgggtcccacaagggcagttgccatttgtatgatacatctgatgacatgctttgctacaaaacacagattgacctgcaaaacaagagaagaaaatctagccagaagaaaataacaggatttcagtttgtcccaggggattcttcaatggtcataatcacatctgcagattcacgaatcagagttcttgatgattttgagctagttcataggtttaaaggattccggaacaccagcagccaaatctcagcttgtttagctggaaacggacggtatattatctcggcaagcgaggattcccgtgtatatatctggaggaacgatgatggttcgaaaccaagtaaaaagaagggcattgtttctgtcacaaatacccatgaacacttccactgcgagagtgtcacggttgctgttacctggccttttaccagcaccacaatgacttctttaatgaaccccaggaaacaagagcttgagcttgggtctgagaatggctattcaccgcaagatctgcaaaccaaacttgctaaggcacaggagatgacagatgttgagtaccggagcacaaatatcacaagttacaactcgaagcataacagtgaccggacatctccggcttggcctgaagaacttgtcacaccaccaaatcaaagtctcagcgctactacctgccatgccaacgagggagaccaagctctgaatcggtcggcctggggcctagtaattgttacagcaggccgtggaggtcaaatcagaacatttcaaaacttcggttttcctgtaagagtatagcatgagtccgaatacataagatagtcactgccattcaggagtgcagtttgtgtatagataggagatagtgggtgagtttcacactattcagggattgggtttgactgttccttggtgcacctgctagagatcagaatcttcatctaacatacactgtcagtagtccaaaacttgtgtatgccaaatttattttaccctgaaggcccaagttgtacatgaaagagaaagccctacagagagcaacactatcagctgactggagataattcatctgtcagcttcaaccctacctttcggttttagacttctattccgaaccatgacatgttcttgtaagaaaagaaaaggaaaaagatagacgtggtgaaattgtcattttggctttatgatctcatggtattggtatcctgaatctttt

SEQ ID NO: 40379 - DNA, 1180 bp, Zea Mays
ggcttgcattttaatgacatgctttgctacaaaacacagattgacctgcaaaacaagagaagaaaatctagccagaagaaaataacaggatttcagtttgtcccaggggattcttcaatggtcataatcacatctgcagattcacgaatcagagttcttgatgattttgagctagttcataggtttaaaggattccggaacaccagcagccaaatctcagcttgtttagctggaaacggacggtatattatctcggcaagcgaggattcccgtgtatatatctggaggaacgatgatggttcgaaaccaagtaaaaagaagggcattgtttctgtcacaaatacccatgaacacttccactgcgagagtgtcacggttgctgttacctggccttttaccagcaccacaatgacttctttaatgaaccccaggaaacaagagcttgagcttgggtctgagaatggctattcaccgcaagatctgcaaaccaaacttgctaaggcacaggagatgacagatgttgagtaccggagcacaaatatcacaagttacaactcgaagcataacagtgaccggacatctccggcttggcctgaagaacttgtcacaccaccaaatcaaagtctcagcgctactacctgccatgccaacgagggagaccaagctctgaatcggtcggcctggggcctagtaattgttacagcaggccgtggaggtcaaatcagaacatttcaaaacttcggttttcctgtaagagtatagcatgagtccgaatacataagatagtcactgccattcaggagtgcagtttgtgtatagataggagatagtgggtgagtttcacactattcagggattgggtttgactgttccttggtgcacctgctagagatcagaatcttcatctaacatacactgtcagtagtccaaaacttgtgtatgccaaatttattttaccctgaaggcccaagttgtacatgaaagagaaagccctacagagagcaacactatcagctgactggagataattcatctgtcagcttcaaccctacctttcggttttagacttctattccgaaccatgacatgttcttgtaagaaaagaaaaggaaaaagatagacgtggtgaaattgtcattttggctttatgatctcatggtattggtatcctgaatctttt

SEQ ID NO: 40380 - DNA, 3977 bp, Zea Mays
ctctcccgtgcctgccgcaacccccatgccccatccccctccacctgccaaaataaatccatgcgctctccagctcggtgctgcaatcccatcaaaagctagggtttcacgcctctcccgacttcacagttcacattcctctcctccccttcccacctccccaactcggccgccgtagacgcggtggcgcacgaactgccctagatttgagcgagccaccctgcgaatcttcacctgacgcacaaagtctgtcagagacagtgaagaattcgaacacgatcttaaacatcgttgattaagaccacacacaaacacatctacctggcttcccccctatcagttgtttttgtgtgtttttttttgctgtttcggacgattcataagaaccgacctgcaaggcttgcagatctaccttgagaaccagggcccttgttttggacgtccagaacgaacccttgaccctgcggatctgcttgatccgttttggatctgcttgtttttttgctggatctggagagaatgttcaagtcgatggtttattacgtgaacacctcaatcggagaggtggaggtgtggcccaagggcgaggcgagcgcgggcctgaccatggcggcgtgggcgcgagaaatccgcgttgaacgcatttccccgcccagcgagcggtgccctccgctggccgtcatgcacaccgtggccgtcggcgcccgatgcctcgtcatggagtccaggccgcccgttgtcgccgacgttgtgccgcctctcgtcgtcatgcacaccgcttgcctcagggagaacaagactgcggttgttccacttggagatgaagagttgcatttagttgcgatgacatccagaagaaacttgacaaatcatgcatgtttctggggctataaattgccatttggtttgtataattcttgcttgaccatgttaaatcttcggtgcctgggtattgtatttgaccttgatgagacattgattgtcgccaatacatcacggtcttttgaggacagaattgacgcacttcaaagaaagctgagtaatgagactgatccacaacgtaggaatggtatgctatcagagatcaagaggtaccaggatgataagtccatcctaaagcaatatatagaaggtgatcaggtctatgatgatggaaaagtgtataaagcacaacctgagattgttccaccattgtctgataaccagcaaccaatgacacgtccagttataagattacaagataaaaacattatcctgacaagaataaatcctctgattagggataccagtgtgcttgtatgtttaaggccagcctgggaggatcttcgcagctacttaattgccagaggtcgcaagcgttttgaggtctatgtgtgtacgatggctgaaagagactatgctttagaaatgtggagattgcttgatccagattcaagattgattaattctgttcaactccatgatcggatggtgtgtgtaaaatctggtttaaaaaagtccttgctaaatgtcttccatgatggttcttgccatcctggtatggcattagtaattgatgatcgcctgaaagtttgggatgagaaggatcaattacgagttcatgtggttcctgcatttactccatattatgctcctcaggcggaggcaaattgttctatcccagttctgtgtgtagccagaaacgttgcatgcaatgttaggggtggtttcttcaaagactttgatgaaggcctcttaccaaggattagcaatgttcactatgaggatgaagtaaatgagatatctgcgccagatgttggcaattatttgataacagatgatgaaaatgtcgcattagtgaatgggaatagagattcattgccttttgatggtatggcagatgcagaggttgagcggagaatgaaggaagccaatgctcaatcattccatcaaacagcgggagactttgtcatgccagtagcccctgcccagaatttcgtttcgacttcagttgcatcattagccccacctcttggcatgatgccatctccatttagccagccagttgctccaccaggtttttcagattcactgcaaggttctccagctagagaagagggtgaagttccagagtctgagttggatccggacacaaggagaaggcttcttatattacagcatggccaagacacaagagatcctacatctccactaccagcaataccacccgtccaagttccagttcctccagtgcaaccccatgggaattggtttcccacagaggatgggataaaccaaagtaacctgaatagaggctcagcaggattcactgtagaatctgattctattgtctatgagaaaaagcaaccacctcatccttcattctttcatggtggggatagtcctatgccgtctgatagatttggctatcagaaccagaggtttccctctcagctaccacacgaggatcaccccatgatgcagaaccatgcacctccaaaatacagatccttttctggtgaggaactagcatcttggcatgttccctcaagccagagaaacaaccagatagaatcaggaagacactttgcacaatatgctgggacctctgctggcatattagaggggattgctctgaaatgtggttctaaggtggagtacaagtcagcattatgtgatactgcagaactacaattctctattgaggtttggattgttggggaaaaggtcggtgaaggaattggtaggacaaggagagaagcacaacgccaagctgcagaaatgtctttaagaaacttggccaataaatacttgtcatctgatccaaataagttgtctgatatgaaagaaaatgatttcagtagcaacagaaatgtctttggttactctggaaatacgagggatgatatgttgccactttcaagtacttccgaggaatctcgctttatgaaaatggagaacaataattcccggaaaacaggaagttctgttgctgctctcaaagaactttgcactgttgagggatataacttagtttttcaagcctgtccatcttcagcagatggtttagttgggaaagaatcttatgctcaggtacaagttggtggacaaattctaggcaaaggagttgggttaacatgggaagaggccaagctccaggctgctgctgaggctcttggaactttaagatccatgctaggtcaacttggtcataaacgatctggctctccaaggtcattggcaccaaattttaacaagcggttcaagccagattttccaaggaccgtacaaagagttccttacggaacatattctaggatcgaaggtcatgttccttaagaggtctgcataaatgatgtgcctgggcgctaaacttcaaaactggatgaagctttgaactgtcagaatttcattgccatgatcttaccagtcacaagtgttaccccatgttgtcaacttggcataatcgttgacctggaagtttaacggttgaaccagggaccggcatgcagctccatttcttttttggtgtgtgtccatggatcaaagagcagcgccgtggttgggcatttttacccttcctttggtttaggtgaaagttggacctctgtagctcggagtcttagcaggtagccagtttttatttctgataagtttttaggcaagttgtaagttgtagcacaaaatcgatcacttgatagtattaacattgcattgatgtagacatgtagtcatctttgtagctgtactctaggcaagcaacacgaatccagtggcttacatcattcatttgtatgctgtagtcatcttgtaatatatggcccatttctttgcaaggctggaaatttgcctctctaagggccagtttaagagtccaaaaaccggagggaactggaggggttaaaacccactttttttattcaagggtattagcttctccaatctcctccgatttttggacttctaaactgtggctagtttggaaactctattcttcc

SEQ ID NO: 40381 - DNA, 2863 bp, Zea Mays
cgcaacccccatgccccatccccctccacctgccaaaataaatccatgcgctctccagctcggtgctgcaatcccatcaaaagctagggtttcacgcctctcccgacttcacagttcacattcctctcctccccttcccacctccccaactcggccgccgtagacgcggtggcgcacgaactgccctagatttgagcgagccaccctgcgaatcttcacctgacgcacaaagtctgtcagagacagtgaagaattcgaacacgatcttaaacatcgttgattaagaccacacacaaacacatctacctggcttcccccctatcagttgtttttgtgtgtttttttttgctgtttcggacgattcataagaaccgacctgcaaggcttgcagatctaccttgagaaccagggcccttgttttggacgtccagaacgaacccttgaccctgcggatctgcttgatccgttttggatctgcttgtttttttgctggatctggagagaatgttcaagtcgatggtttattacgtgaacacctcaatcggagaggtggaggtgtggcccaagggcgaggcgagcgcgggcctgaccatggcggcgtgggcgcgagaaatccgcgttgaacgcatttccccgcccagcgagcggtgccctccgctggccgtcatgcacaccgtggccgtcggcgcccgatgcctcgtcatggagtccaggccgcccgttgtcgccgacgttgtgccgcctctcgtcgtcatgcacaccgcttgcctcagggagaacaagactgcggttgttccacttggagatgaagagttgcatttagttgcgatgacatccagaagaaacttgacaaatcatgcatgtttctggggctataaattgccatttggtttgtataattcttgcttgaccatgttaaatcttcggtgcctgggtattgtatttgaccttgatgagacattgattgtcgccaatacatcacggtcttttgaggacagaattgacgcacttcaaagaaagctgagtaatgagactgatccacaacgtaggaatggtatgctatcagagatcaagaggtaccaggatgataagtccatcctaaagcaatatatagaaggtgatcaggtctatgatgatggaaaagtgtataaagcacaacctgagattgttccaccattgtctgataaccagcaaccaatgacacgtccagttataagattacaagataaaaacattatcctgacaagaataaatcctctgattagggataccagtgtgcttgtatgtttaaggccagcctgggaggatcttcgcagctacttaattgccagaggtcgcaagcgttttgaggtctatgtgtgtacgatggctgaaagagactatgctttagaaatgtggagattgcttgatccagattcaagattgattaattctgttcaactccatgatcggatggtgtgtgtaaaatctggtttaaaaaagtccttgctaaatgtcttccatgatggttcttgccatcctggtatggcattagtaattgatgatcgcctgaaagtttgggatgagaaggatcaattacgagttcatgtggttcctgcatttactccatattatgctcctcaggcggaggcaaattgttctatcccagttctgtgtgtagccagaaacgttgcatgcaatgttaggggtggtttcttcaaagactttgatgaaggcctcttaccaaggattagcaatgttcactatgaggatgaagtaaatgagatatctgcgccagatgttggcaattatttgataacagatgatgaaaatgtcgcattagtgaatgggaatagagattcattgccttttgatggtatggcagatgcagaggttgagcggagaatgaaggaagccaatgctcaatcattccatcaaacagcgggagactttgtcatgccagtagcccctgcccagaatttcgtttcgacttcagttgcatcattagccccacctcttggcatgatgccatctccatttagccagccagttgctccaccaggtttttcagattcactgcaaggttctccagctagagaagagggtgaagttccagagtctgagttggatccggacacaaggagaaggcttcttatattacagcatggccaagacacaagagatcctacatctccactaccagcaataccacccgtccaagttccagttcctccagtgcaaccccatgggaattggtttcccacagaggatgggataaaccaaagtaacctgaatagaggctcagcaggattcactgtagaatctgattctattgtctatgagaaaaagcaaccacctcatccttcattctttcatggtggggatagtcctatgccgtctgatagatttggctatcagaaccagaggtttccctctcagctaccacacgaggatcaccccatgatgcagaaccatgcacctccaaaatacagatccttttctggtgaggaactagcatcttggcatgttccctcaagccagagaaacaaccagatagaatcaggaagacactttgcacaatatgctgggacctctgctggcatattagaggggattgctctgaaatgtggttctaaggtggagtacaagtcagcattatgtgatactgcagaactacaattctctattgaggtttggattgttggggaaaaggtcggtgaaggaattggtaggacaaggagagaagcacaacgccaagctgcagaaatgtctttaagaaacttggccagatctttccaccaggaacatgatcgtcaggtcgaagtcgaatagcaccggtcctctgtacacgttgcggctgcctggatctctcacccgctgtcgt

SEQ ID NO: 40382 - DNA, 4139 bp, Zea Mays
cgcaacccccatgccccatccccctccacctgccaaaataaatccatgcgctctccagctcggtgctgcaatcccatcaaaagctagggtttcacgcctctcccgacttcacagttcacattcctctcctccccttcccacctccccaactcggccgccgtagacgcggtggcgcacgaactgccctagatttgagcgagccaccctgcgaatcttcacctgacgcacaaagtctgtcagagacagtgaagaattcgaacacgatcttaaacatcgttgattaagaccacacacaaacacatctacctggcttcccccctatcagttgtttttgtgtgtttttttttgctgtttcggacgattcataagaaccgacctgcaaggcttgcagatctaccttgagaaccagggcccttgttttggacgtccagaacgaacccttgaccctgcggatctgcttgatccgttttggatctgcttgtttttttgctggatctggagagaatgttcaagtcgatggtttattacgtgaacacctcaatcggagaggtggaggtgtggcccaagggcgaggcgagcgcgggcctgaccatggcggcgtgggcgcgagaaatccgcgttgaacgcatttccccgcccagcgagcggtgccctccgctggccgtcatgcacaccgtggccgtcggcgcccgatgcctcgtcatggagtccaggccgcccgttgtcgccgacgttgtgccgcctctcgtcgtcatgcacaccgcttgcctcagggagaacaagactgcggttgttccacttggagatgaagagttgcatttagttgcgatgacatccagaagaaacttgacaaatcatgcatgtttctggggctataaattgccatttggtttgtataattcttgcttgaccatgttaaatcttcggtgcctgggtattgtatttgaccttgatgagacattgattgtcgccaatacatcacggtcttttgaggacagaattgacgcacttcaaagaaagctgagtaatgagactgatccacaacgtaggaatggtatgctatcagagatcaagaggtaccaggatgataagtccatcctaaagcaatatatagaaggtgatcaggtctatgatgatggaaaagtgtataaagcacaacctgagattgttccaccattgtctgataaccagcaaccaatgacacgtccagttataagattacaagataaaaacattatcctgacaagaataaatcctctgattagggataccagtgtgcttgtatgtttaaggccagcctgggaggatcttcgcagctacttaattgccagaggtcgcaagcgttttgaggtctatgtgtgtacgatggctgaaagagactatgctttagaaatgtggagattgcttgatccagattcaagattgattaattctgttcaactccatgatcggatggtgtgtgtaaaatctggtttaaaaaagtccttgctaaatgtcttccatgatggttcttgccatcctggtatggcattagtaattgatgatcgcctgaaagtttgggatgagaaggatcaattacgagttcatgtggttcctgcatttactccatattatgctcctcaggcggaggcaaattgttctatcccagttctgtgtgtagccagaaacgttgcatgcaatgttaggggtggtttcttcaaagactttgatgaaggcctcttaccaaggattagcaatgttcactatgaggatgaagtaaatgagatatctgcgccagatgttggcaattatttgataacagatgatgaaaatgtcgcattagtgaatgggaatagagattcattgccttttgatggtatggcagatgcagaggttgagcggagaatgaaggaagccaatgctcaatcattccatcaaacagcgggagactttgtcatgccagtagcccctgcccagaatttcgtttcgacttcagttgcatcattagccccacctcttggcatgatgccatctccatttagccagccagttgctccaccaggtttttcagattcactgcaaggttctccagctagagaagagggtgaagttccagagtctgagttggatccggacacaaggagaaggcttcttatattacagcatggccaagacacaagagatcctacatctccactaccagcaataccacccgtccaagttccagttcctccagtgcaaccccatgggaattggtttcccacagaggatgggataaaccaaagtaacctgaatagaggctcagcaggattcactgtagaatctgattctattgtctatgagaaaaagcaaccacctcatccttcattctttcatggtggggatagtcctatgccgtctgatagatttggctatcagaaccagaggtttccctctcagctaccacacgaggatcaccccatgatgcagaaccatgcacctccaaaatacagatccttttctggtgaggaactagcatcttggcatgttccctcaagccagagaaacaaccagatagaatcaggaagacactttgcacaatatgctgggacctctgctggcatattagaggggattgctctgaaatgtggttctaaggtggagtacaagtcagcattatgtgatactgcagaactacaattctctattgaggtttggattgttggggaaaaggtcggtgaaggaattggtaggacaaggagagaagcacaacgccaagctgcagaaatgtctttaagaaacttggccaatttacttgcagataaatacttgtcatctgatccaaataagttgtctgatatgaaagaaaatgatttcagtagcaacagaaatgtctttggttactctggaaatacgagggatgatatgttgccactttcaagtacttccgaggaatctcgctttatgaaaatggagaacaataattcccggaaaacaggaagttctgttgctgctctcaaagaactttgcactgttgagggatataacttagtttttcaagcctgtccatcttcagcagatggtttagttgggaaagaatcttatgctcaggtacaagttggtggacaaattctaggcaaaggagttgggttaacatgggaagaggccaagctccaggctgctgctgaggctcttggaactttaagatccatgctaggtcaacttggtcataaacgatctggctctccaaggtcattggcaccaaattttaacaagcggttcaagccagattttccaaggaccgtacaaagagttccttacggaacatattctaggatcgaaggtcatgttccttaagaggtctgcataaatgatgtgcctgggcgctaaacttcaaaactggatgaagctttgaactgtcaggtcttcacacattgaatgcaagccgtagattcctggcttatagttggcttccaaggctctcacaagctgccactggctgagagtaccgacgaatataaaatacgtacttcatttaagtaagcgccaagagattgaaggattaatggtggccataactttatgcagaatttcattgccatgatcttaccagtcacaagtgttaccccatgttgtcaacttggcataatcgttgacctggaagtttaacggttgaaccagggaccggcatgcagctccatttcttttttggtgtgtgtccatggatcaaagagcagcgccgtggttgggcatttttacccttcctttggtttaggtgaaagttggacctctgtagctcggagtcttagcaggtagccagtttttatttctgataagtttttaggcaagttgtaagttgtagcacaaaatcgatcacttgatagtattaacattgcattgatgtagacatgtagtcatctttgtagctgtactctaggcaagcaacacgaatccagtggcttacatcattcatttgtatgctgtagtcatcttgtaatatatggcccatttctttgcaaggctggaaatttgcctctctaagggccagtttaagagtccaaaaaccggagggaactggaggggttaaaacccactttttttattcaagggtattagcttctccaatctcctccgatttttggacttctaaactgtggctagtttggaaactctattcttcc

SEQ ID NO: 40383 - DNA, 3960 bp, Zea Mays
cgcaacccccatgccccatccccctccacctgccaaaataaatccatgcgctctccagctcggtgctgcaatcccatcaaaagctagggtttcacgcctctcccgacttcacagttcacattcctctcctccccttcccacctccccaactcggccgccgtagacgcggtggcgcacgaactgccctagatttgagcgagccaccctgcgaatcttcacctgacgcacaaagtctgtcagagacagtgaagaattcgaacacgatcttaaacatcgttgattaagaccacacacaaacacatctacctggcttcccccctatcagttgtttttgtgtgtttttttttgctgtttcggacgattcataagaaccgacctgcaaggcttgcagatctaccttgagaaccagggcccttgttttggacgtccagaacgaacccttgaccctgcggatctgcttgatccgttttggatctgcttgtttttttgctggatctggagagaatgttcaagtcgatggtttattacgtgaacacctcaatcggagaggtggaggtgtggcccaagggcgaggcgagcgcgggcctgaccatggcggcgtgggcgcgagaaatccgcgttgaacgcatttccccgcccagcgagcggtgccctccgctggccgtcatgcacaccgtggccgtcggcgcccgatgcctcgtcatggagtccaggccgcccgttgtcgccgacgttgtgccgcctctcgtcgtcatgcacaccgcttgcctcagggagaacaagactgcggttgttccacttggagatgaagagttgcatttagttgcgatgacatccagaagaaacttgacaaatcatgcatgtttctggggctataaattgccatttgaattgacgcacttcaaagaaagctgagtaatgagactgatccacaacgtaggaatggtatgctatcagagatcaagaggtaccaggatgataagtccatcctaaagcaatatatagaaggtgatcaggtctatgatgatggaaaagtgtataaagcacaacctgagattgttccaccattgtctgataaccagcaaccaatgacacgtccagttataagattacaagataaaaacattatcctgacaagaataaatcctctgattagggataccagtgtgcttgtatgtttaaggccagcctgggaggatcttcgcagctacttaattgccagaggtcgcaagcgttttgaggtctatgtgtgtacgatggctgaaagagactatgctttagaaatgtggagattgcttgatccagattcaagattgattaattctgttcaactccatgatcggatggtgtgtgtaaaatctggtttaaaaaagtccttgctaaatgtcttccatgatggttcttgccatcctggtatggcattagtaattgatgatcgcctgaaagtttgggatgagaaggatcaattacgagttcatgtggttcctgcatttactccatattatgctcctcaggcggaggcaaattgttctatcccagttctgtgtgtagccagaaacgttgcatgcaatgttaggggtggtttcttcaaagactttgatgaaggcctcttaccaaggattagcaatgttcactatgaggatgaagtaaatgagatatctgcgccagatgttggcaattatttgataacagatgatgaaaatgtcgcattagtgaatgggaatagagattcattgccttttgatggtatggcagatgcagaggttgagcggagaatgaaggaagccaatgctcaatcattccatcaaacagcgggagactttgtcatgccagtagcccctgcccagaatttcgtttcgacttcagttgcatcattagccccacctcttggcatgatgccatctccatttagccagccagttgctccaccaggtttttcagattcactgcaaggttctccagctagagaagagggtgaagttccagagtctgagttggatccggacacaaggagaaggcttcttatattacagcatggccaagacacaagagatcctacatctccactaccagcaataccacccgtccaagttccagttcctccagtgcaaccccatgggaattggtttcccacagaggatgggataaaccaaagtaacctgaatagaggctcagcaggattcactgtagaatctgattctattgtctatgagaaaaagcaaccacctcatccttcattctttcatggtggggatagtcctatgccgtctgatagatttggctatcagaaccagaggtttccctctcagctaccacacgaggatcaccccatgatgcagaaccatgcacctccaaaatacagatccttttctggtgaggaactagcatcttggcatgttccctcaagccagagaaacaaccagatagaatcaggaagacactttgcacaatatgctgggacctctgctggcatattagaggggattgctctgaaatgtggttctaaggtggagtacaagtcagcattatgtgatactgcagaactacaattctctattgaggtttggattgttggggaaaaggtcggtgaaggaattggtaggacaaggagagaagcacaacgccaagctgcagaaatgtctttaagaaacttggccatagcaacagaaatgtctttggttactctggaaatacgagggatgatatgttgccactttcaagtacttccgaggaatctcgctttatgaaaatggagaacaataattcccggaaaacaggaagttctgttgctgctctcaaagaactttgcactgttgagggatataacttagtttttcaagcctgtccatcttcagcagatggtttagttgggaaagaatcttatgctcaggtacaagttggtggacaaattctaggcaaaggagttgggttaacatgggaagaggccaagctccaggctgctgctgaggctcttggaactttaagatccatgctaggtcaacttggtcataaacgatctggctctccaaggtcattggcaccaaattttaacaagcggttcaagccagattttccaaggaccgtacaaagagttccttacggaacatattctaggatcgaaggtcatgttccttaagaggtctgcataaatgatgtgcctgggcgctaaacttcaaaactggatgaagctttgaactgtcaggtcttcacacattgaatgcaagccgtagattcctggcttatagttggcttccaaggctctcacaagctgccactggctgagagtaccgacgaatataaaatacgtacttcatttaagtaagcgccaagagattgaaggattaatggtggccataactttatgcagaatttcattgccatgatcttaccagtcacaagtgttaccccatgttgtcaacttggcataatcgttgacctggaagtttaacggttgaaccagggaccggcatgcagctccatttcttttttggtgtgtgtccatggatcaaagagcagcgccgtggttgggcatttttacccttcctttggtttaggtgaaagttggacctctgtagctcggagtcttagcaggtagccagtttttatttctgataagtttttaggcaagttgtaagttgtagcacaaaatcgatcacttgatagtattaacattgcattgatgtagacatgtagtcatctttgtagctgtactctaggcaagcaacacgaatccagtggcttacatcattcatttgtatgctgtagtcatcttgtaatatatggcccatttctttgcaaggctggaaatttgcctctctaagggccagtttaagagtccaaaaaccggagggaactggaggggttaaaacccactttttttattcaagggtattagcttctccaatctcctccgatttttggacttctaaactgtggctagtttggaaactctattcttcc

SEQ ID NO: 40384 - DNA, 4132 bp, Zea Mays
cgcaacccccatgccccatccccctccacctgccaaaataaatccatgcgctctccagctcggtgctgcaatcccatcaaaagctagggtttcacgcctctcccgacttcacagttcacattcctctcctccccttcccacctccccaactcggccgccgtagacgcggtggcgcacgaactgccctagatttgagcgagccaccctgcgaatcttcacctgacgcacaaagtctgtcagagacagtgaagaattcgaacacgatcttaaacatcgttgattaagaccacacacaaacacatctacctggcttcccccctatcagttgtttttgtgtgtttttttttgctgtttcggacgattcataagaaccgacctgcaaggcttgcagatctaccttgagaaccagggcccttgttttggacgtccagaacgaacccttgaccctgcggatctgcttgatccgttttggatctgcttgtttttttgctggatctggagagaatgttcaagtcgatggtttattacgtgaacacctcaatcggagaggtggaggtgtggcccaagggcgaggcgagcgcgggcctgaccatggcggcgtgggcgcgagaaatccgcgttgaacgcatttccccgcccagcgagcggtgccctccgctggccgtcatgcacaccgtggccgtcggcgcccgatgcctcgtcatggagtccaggccgcccgttgtcgccgacgttgtgccgcctctcgtcgtcatgcacaccgcttgcctcagggagaacaagactgcggttgttccacttggagatgaagagttgcatttagttgcgatgacatccagaagaaacttgacaaatcatgcatgtttctggggctataaattgccatttggtttgtataattcttgcttgaccatgttaaatcttcggtgcctgggtattgtatttgaccttgatgagacattgattgtcgccaatacatcacggtcttttgaggacagaattgacgcacttcaaagaaagctgagtaatgagactgatccacaacgtaggaatggtatgctatcagagatcaagaggtaccaggatgataagtccatcctaaagcaatatatagaaggtgatcaggtctatgatgatggaaaagtgtataaagcacaacctgagattgttccaccattgtctgataaccagcaaccaatgacacgtccagttataagattacaagataaaaacattatcctgacaagaataaatcctctgattagggataccagtgtgcttgtatgtttaaggccagcctgggaggatcttcgcagctacttaattgccagaggtcgcaagcgttttgaggtctatgtgtgtacgatggctgaaagagactatgctttagaaatgtggagattgcttgatccagattcaagattgattaattctgttcaactccatgatcggatggtgtgtgtaaaatctggtttaaaaaagtccttgctaaatgtcttccatgatggttcttgccatcctggtatggcattagtaattgatgatcgcctgaaagtttgggatgagaaggatcaattacgagttcatgtggttcctgcatttactccatattatgctcctcaggcggaggcaaattgttctatcccagttctgtgtgtagccagaaacgttgcatgcaatgttaggggtggtttcttcaaagactttgatgaaggcctcttaccaaggattagcaatgttcactatgaggatgaagtaaatgagatatctgcgccagatgttggcaattatttgataacagatgatgaaaatgtcgcattagtgaatgggaatagagattcattgccttttgatggtatggcagatgcagaggttgagcggagaatgaaggaagccaatgctcaatcattccatcaaacagcgggagactttgtcatgccagtagcccctgcccagaatttcgtttcgacttcagttgcatcattagccccacctcttggcatgatgccatctccatttagccagccagttgctccaccaggtttttcagattcactgcaaggttctccagctagagaagagggtgaagttccagagtctgagttggatccggacacaaggagaaggcttcttatattacagcatggccaagacacaagagatcctacatctccactaccagcaataccacccgtccaagttccagttcctccagtgcaaccccatgggaattggtttcccacagaggatgggataaaccaaagtaacctgaatagaggctcagcaggattcactgtagaatctgattctattgtctatgagaaaaagcaaccacctcatccttcattctttcatggtggggatagtcctatgccgtctgatagatttggctatcagaaccagaggtttccctctcagctaccacacgaggatcaccccatgatgcagaaccatgcacctccaaaatacagatccttttctggtgaggaactagcatcttggcatgttccctcaagccagagaaacaaccagatagaatcaggaagacactttgcacaatatgctgggacctctgctggcatattagaggggattgctctgaaatgtggttctaaggtggagtacaagtcagcattatgtgatactgcagaactacaattctctattgaggtttggattgttggggaaaaggtcggtgaaggaattggtaggacaaggagagaagcacaacgccaagctgcagaaatgtctttaagaaacttggccaataaatacttgtcatctgatccaaataagttgtctgatatgaaagaaaatgatttcagtagcaacagaaatgtctttggttactctggaaatacgagggatgatatgttgccactttcaagtacttccgaggaatctcgctttatgaaaatggagaacaataattcccggaaaacaggaaaccttatgatacatgtaaaaacacaccgcagtgcactgttgagggatataacttagtttttcaagcctgtccatcttcagcagatggtttagttgggaaagaatcttatgctcaggtacaagttggtggacaaattctaggcaaaggagttgggttaacatgggaagaggccaagctccaggctgctgctgaggctcttggaactttaagatccatgctaggtcaacttggtcataaacgatctggctctccaaggtcattggcaccaaattttaacaagcggttcaagccagattttccaaggaccgtacaaagagttccttacggaacatattctaggatcgaaggtcatgttccttaagaggtctgcataaatgatgtgcctgggcgctaaacttcaaaactggatgaagctttgaactgtcaggtcttcacacattgaatgcaagccgtagattcctggcttatagttggcttccaaggctctcacaagctgccactggctgagagtaccgacgaatataaaatacgtacttcatttaagtaagcgccaagagattgaaggattaatggtggccataactttatgcagaatttcattgccatgatcttaccagtcacaagtgttaccccatgttgtcaacttggcataatcgttgacctggaagtttaacggttgaaccagggaccggcatgcagctccatttcttttttggtgtgtgtccatggatcaaagagcagcgccgtggttgggcatttttacccttcctttggtttaggtgaaagttggacctctgtagctcggagtcttagcaggtagccagtttttatttctgataagtttttaggcaagttgtaagttgtagcacaaaatcgatcacttgatagtattaacattgcattgatgtagacatgtagtcatctttgtagctgtactctaggcaagcaacacgaatccagtggcttacatcattcatttgtatgctgtagtcatcttgtaatatatggcccatttctttgcaaggctggaaatttgcctctctaagggccagtttaagagtccaaaaaccggagggaactggaggggttaaaacccactttttttattcaagggtattagcttctccaatctcctccgatttttggacttctaaactgtggctagtttggaaactctattcttcc

SEQ ID NO: 40385 - DNA, 3985 bp, Zea Mays
cgcaacccccatgccccatccccctccacctgccaaaataaatccatgcgctctccagctcggtgctgcaatcccatcaaaagctagggtttcacgcctctcccgacttcacagttcacattcctctcctccccttcccacctccccaactcggccgccgtagacgcggtggcgcacgaactgccctagatttgagcgagccaccctgcgaatcttcacctgacgcacaaagtctgtcagagacagtgaagaattcgaacacgatcttaaacatcgttgattaagaccacacacaaacacatctacctggcttcccccctatcagttgtttttgtgtgtttttttttgctgtttcggacgattcataagaaccgacctgcaaggcttgcagatctaccttgagaaccagggcccttgttttggacgtccagaacgaacccttgaccctgcggatctgcttgatccgttttggatctgcttgtttttttgctggatctggagagaatgttcaagtcgatggtttattacgtgaacacctcaatcggagaggtggaggtgtggcccaagggcgaggcgagcgcgggcctgaccatggcggcgtgggcgcgagaaatccgcgttgaacgcatttccccgcccagcgagcggtgccctccgctggccgtcatgcacaccgtggccgtcggcgcccgatgcctcgtcatggagtccaggccgcccgttgtcgccgacgttgtgccgcctctcgtcgtcatgcacaccgcttgcctcagggagaacaagactgcggttgttccacttggagatgaagagttgcatttagttgcgatgacatccagaagaaacttgacaaatcatgcatgtttctggggctataaattgccatttggtttgtataattcttgcttgaccatgttaaatcttcggtgcctgggtattgtatttgaccttgatgagacattgattgtcgccaatacatcacggtcttttgaggacagaattgacgcacttcaaagaaagctgagtaatgagactgatccacaacgtaggaatggtatgctatcagagatcaagaggtaccaggatgataagtccatcctaaagcaatatatagaaggtgatcaggtctatgatgatggaaaagtgtataaagcacaacctgagattgttccaccattgtctgataaccagcaaccaatgacacgtccagttataagattacaagataaaaacattatcctgacaagaataaatcctctgattagggataccagtgtgcttgtatgtttaaggccagcctgggaggatcttcgcagctacttaattgccagaggtcgcaagcgttttgaggtctatgtgtgtacgatggctgaaagagactatgctttagaaatgtggagattgcttgatccagattcaagattgattaattctgttcaactccatgatcggatggtgtgtgtaaaatctggtttaaaaaagtccttgctaaatgtcttccatgatggttcttgccatcctggtatggcattagtaattgatgatcgcctgaaagtttgggatgagaaggatcaattacgagttcatgtggttcctgcatttactccatattatgctcctcaggcggaggcaaattgttctatcccagttctgtgtgtagccagaaacgttgcatgcaatgttaggggtggtttcttcaaagactttgatgaaggcctcttaccaaggattagcaatgttcactatgaggatgaagtaaatgagatatctgcgccagatgttggcaattatttgataacagatgatgaaaatgtcgcattagtgaatgggaatagagattcattgccttttgatggtatggcagatgcagaggttgagcggagaatgaaggaagccaatgctcaatcattccatcaaacagcgggagactttgtcatgccagtagcccctgcccagaatttcgtttcgacttcagttgcatcattagccccacctcttggcatgatgccatctccatttagccagccagttgctccaccaggtttttcagattcactgcaaggttctccagctagagaagagggtgaagttccagagtctgagttggatccggacacaaggagaaggcttcttatattacagcatggccaagacacaagagatcctacatctccactaccagcaataccacccgtccaagttccagttcctccagtgcaaccccatgggaattggtttcccacagaggatgggataaaccaaagtaacctgaatagaggctcagcaggattcactgtagaatctgattctattgtctatgagaaaaagcaaccacctcatccttcattctttcatggtggggatagtcctatgccgtctgatagatttggctatcagaaccagaggtttccctctcagctaccacacgaggatcaccccatgatgcagaaccatgcacctccaaaatacagatccttttctggtgaggaactagcatcttggcatgttccctcaagccagagaaacaaccagatagaatcaggaagacactttgcacaatatgctgggacctctgctggcatattagaggggattgctctgaaatgtggttctaaggtggagtacaagtcagcattatgtgatactgcagaactacaattctctattgaggtttggattgttggggaaaaggtcggtgaaggaattggtaggacaaggagagaagcacaacgccaagctgcagaaatgtctttaagaaacttggccatagcaacagaaatgtctttggttactctggaaatacgagggatgatatgttgccactttcaagtacttccgaggaatctcgctttatgaaaatggagaacaataattcccggaaaacaggaagttctgttgctgctctcaaagaacttgtacaagttggtggacaaattctaggcaaaggagttgggttaacatgggaagaggccaagctccaggctgctgctgaggctcttggaactttaagatccatgctaggtcaacttggtcataaacgatctggctctccaaggtcattggcaccaaattttaacaagcggttcaagccagattttccaaggaccgtacaaagagttccttacggaacatattctaggatcgaaggtcatgttccttaagaggtctgcataaatgatgtgcctgggcgctaaacttcaaaactggatgaagctttgaactgtcaggtcttcacacattgaatgcaagccgtagattcctggcttatagttggcttccaaggctctcacaagctgccactggctgagagtaccgacgaatataaaatacgtacttcatttaagtaagcgccaagagattgaaggattaatggtggccataactttatgcagaatttcattgccatgatcttaccagtcacaagtgttaccccatgttgtcaacttggcataatcgttgacctggaagtttaacggttgaaccagggaccggcatgcagctccatttcttttttggtgtgtgtccatggatcaaagagcagcgccgtggttgggcatttttacccttcctttggtttaggtgaaagttggacctctgtagctcggagtcttagcaggtagccagtttttatttctgataagtttttaggcaagttgtaagttgtagcacaaaatcgatcacttgatagtattaacattgcattgatgtagacatgtagtcatctttgtagctgtactctaggcaagcaacacgaatccagtggcttacatcattcatttgtatgctgtagtcatcttgtaatatatggcccatttctttgcaaggctggaaatttgcctctctaagggccagtttaagagtccaaaaaccggagggaactggaggggttaaaacccactttttttattcaagggtattagcttctccaatctcctccgatttttggacttctaaactgtggctagtttggaaactctattcttcc

SEQ ID NO: 40386 - DNA, 4082 bp, Zea Mays
cgcaacccccatgccccatccccctccacctgccaaaataaatccatgcgctctccagctcggtgctgcaatcccatcaaaagctagggtttcacgcctctcccgacttcacagttcacattcctctcctccccttcccacctccccaactcggccgccgtagacgcggtggcgcacgaactgccctagatttgagcgagccaccctgcgaatcttcacctgacgcacaaagtctgtcagagacagtgaagaattcgaacacgatcttaaacatcgttgattaagaccacacacaaacacatctacctggcttcccccctatcagttgtttttgtgtgtttttttttgctgtttcggacgattcataagaaccgacctgcaaggcttgcagatctaccttgagaaccagggcccttgttttggacgtccagaacgaacccttgaccctgcggatctgcttgatccgttttggatctgcttgtttttttgctggatctggagagaatgttcaagtcgatggtttattacgtgaacacctcaatcggagaggtggaggtgtggcccaagggcgaggcgagcgcgggcctgaccatggcggcgtgggcgcgagaaatccgcgttgaacgcatttccccgcccagcgagcggtgccctccgctggccgtcatgcacaccgtggccgtcggcgcccgatgcctcgtcatggagtccaggccgcccgttgtcgccgacgttgtgccgcctctcgtcgtcatgcacaccgcttgcctcagggagaacaagactgcggttgttccacttggagatgaagagttgcatttagttgcgatgacatccagaagaaacttgacaaatcatgcatgtttctggggctataaattgccatttggtttgtataattcttgcttgaccatgttaaatcttcggtgcctgggtattgtatttgaccttgatgagacattgattgtcgccaatacatcacggtcttttgaggacagaattgacgcacttcaaagaaagctgagtaatgagactgatccacaacgtaggaatggtatgctatcagagatcaagaggtaccaggatgataagtccatcctaaagcaatatatagaaggtgatcaggtctatgatgatggaaaagtgtataaagcacaacctgagattgttccaccattgtctgataaccagcaaccaatgacacgtccagttataagattacaagataaaaacattatcctgacaagaataaatcctctgattagggataccagtgtgcttgtatgtttaaggccagcctgggaggatcttcgcagctacttaattgccagaggtcgcaagcgttttgaggtctatgtgtgtacgatggctgaaagagactatgctttagaaatgtggagattgcttgatccagattcaagattgattaattctgttcaactccatgatcggatggtgtgtgtaaaatctggtttaaaaaagtccttgctaaatgtcttccatgatggttcttgccatcctggtatggcattagtaattgatgatcgcctgaaagtttgggatgagaaggatcaattacgagttcatgtggttcctgcatttactccatattatgctcctcaggcggaggcaaattgttctatcccagttctgtgtgtagccagaaacgttgcatgcaatgttaggggtggtttcttcaaagactttgatgaaggcctcttaccaaggattagcaatgttcactatgaggatgaagtaaatgagatatctgcgccagatgttggcaattatttgataacagatgatgaaaatgtcgcattagtgaatgggaatagagattcattgccttttgatggtatggcagatgcagaggttgagcggagaatgaaggaagccaatgctcaatcattccatcaaacagcgggagactttgtcatgccagtagcccctgcccagaatttcgtttcgacttcagttgcatcattagccccacctcttggcatgatgccatctccatttagccagccagttgctccaccaggtttttcagattcactgcaaggttctccagctagagaagagggtgaagttccagagtctgagttggatccggacacaaggagaaggcttcttatattacagcatggccaagacacaagagatcctacatctccactaccagcaataccacccgtccaagttccagttcctccagtgcaaccccatgggaattggtttcccacagaggatgggataaaccaaagtaacctgaatagaggctcagcaggattcactgtagaatctgattctattgtctatgagaaaaagcaaccacctcatccttcattctttcatggtggggatagtcctatgccgtctgatagatttggctatcagaaccagaggtttccctctcagctaccacacgaggatcaccccatgatgcagaaccatgcacctccaaaatacagatccttttctggtgaggaactagcatcttggcatgttccctcaagccagagaaacaaccagatagaatcaggaagacactttgcacaatatgctgggacctctgctggcatattagaggggattgctctgaaatgtggttctaaggtggagtacaagtcagcattatgtgatactgcagaactacaattctctattgaggtttggattgttggggaaaaggtcggtgaaggaattggtaggacaaggagagaagcacaacgccaagctgcagaaatgtctttaagaaacttggccaaaaatgatttcagtagcaacagaaatgtctttggttactctggaaatacgagggatgatatgttgccactttcaagtacttccgaggaatctcgctttatgaaaatggagaacaataattcccggaaaacaggaagttctgttgctgctctcaaagaactttgcactgttgagggatataacttagtttttcaagcctgtccatcttcagcagatggtttagttgggaaagaatcttatgctcaggtacaagttggtggacaaattctaggcaaaggagttgggttaacatgggaagaggccaagctccaggctgctgctgaggctcttggaactttaagatccatgctaggtcaacttggtcataaacgatctggctctccaaggtcattggcaccaaattttaacaagcggttcaagccagattttccaaggaccgtacaaagagttccttacggaacatattctaggatcgaaggtcatgttccttaagaggtctgcataaatgatgtgcctgggcgctaaacttcaaaactggatgaagctttgaactgtcaggtcttcacacattgaatgcaagccgtagattcctggcttatagttggcttccaaggctctcacaagctgccactggctgagagtaccgacgaatataaaatacgtacttcatttaagtaagcgccaagagattgaaggattaatggtggccataactttatgcagaatttcattgccatgatcttaccagtcacaagtgttaccccatgttgtcaacttggcataatcgttgacctggaagtttaacggttgaaccagggaccggcatgcagctccatttcttttttggtgtgtgtccatggatcaaagagcagcgccgtggttgggcatttttacccttcctttggtttaggtgaaagttggacctctgtagctcggagtcttagcaggtagccagtttttatttctgataagtttttaggcaagttgtaagttgtagcacaaaatcgatcacttgatagtattaacattgcattgatgtagacatgtagtcatctttgtagctgtactctaggcaagcaacacgaatccagtggcttacatcattcatttgtatgctgtagtcatcttgtaatatatggcccatttctttgcaaggctggaaatttgcctctctaagggccagtttaagagtccaaaaaccggagggaactggaggggttaaaacccactttttttattcaagggtattagcttctccaatctcctccgatttttggacttctaaactgtggctagtttggaaactctattcttcc

SEQ ID NO: 40387 - DNA, 4043 bp, Zea Mays
cgcaacccccatgccccatccccctccacctgccaaaataaatccatgcgctctccagctcggtgctgcaatcccatcaaaagctagggtttcacgcctctcccgacttcacagttcacattcctctcctccccttcccacctccccaactcggccgccgtagacgcggtggcgcacgaactgccctagatttgagcgagccaccctgcgaatcttcacctgacgcacaaagtctgtcagagacagtgaagaattcgaacacgatcttaaacatcgttgattaagaccacacacaaacacatctacctggcttcccccctatcagttgtttttgtgtgtttttttttgctgtttcggacgattcataagaaccgacctgcaaggcttgcagatctaccttgagaaccagggcccttgttttggacgtccagaacgaacccttgaccctgcggatctgcttgatccgttttggatctgcttgtttttttgctggatctggagagaatgttcaagtcgatggtttattacgtgaacacctcaatcggagaggtggaggtgtggcccaagggcgaggcgagcgcgggcctgaccatggcggcgtgggcgcgagaaatccgcgttgaacgcatttccccgcccagcgagcggtgccctccgctggccgtcatgcacaccgtggccgtcggcgcccgatgcctcgtcatggagtccaggccgcccgttgtcgccgacgttgtgccgcctctcgtcgtcatgcacaccgcttgcctcagggagaacaagactgcggttgttccacttggagatgaagagttgcatttagttgcgatgacatccagaagaaacttgacaaatcatgcatgtttctggggctataaattgccatttggtttgtataattcttgcttgaccatgttaaatcttcggtgcctgggtattgtatttgaccttgatgagacattgattgtcgccaatacatcacggtcttttgaggacagaattgacgcacttcaaagaaagctgagtaatgagactgatccacaacgtaggaatggtatgctatcagagatcaagaggtaccaggatgataagtccatcctaaagcaatatatagaaggtgatcaggtctatgatgatggaaaagtgtataaagcacaacctgagattgttccaccattgtctgataaccagcaaccaatgacacgtccagttataagattacaagataaaaacattatcctgacaagaataaatcctctgattagggataccagtgtgcttgtatgtttaaggccagcctgggaggatcttcgcagctacttaattgccagaggtcgcaagcgttttgaggtctatgtgtgtacgatggctgaaagagactatgctttagaaatgtggagattgcttgatccagattcaagattgattaattctgttcaactccatgatcggatggtgtgtgtaaaatctggtttaaaaaagtccttgctaaatgtcttccatgatggttcttgccatcctggtatggcattagtaattgatgatcgcctgaaagtttgggatgagaaggatcaattacgagttcatgtggttcctgcatttactccatattatgctcctcaggcggaggcaaattgttctatcccagttctgtgtgtagccagaaacgttgcatgcaatgttaggggtggtttcttcaaagactttgatgaaggcctcttaccaaggattagcaatgttcactatgaggatgaagtaaatgagatatctgcgccagatgttggcaattatttgataacagatgatgaaaatgtcgcattagtgaatgggaatagagattcattgccttttgatggtatggcagatgcagaggttgagcggagaatgaaggaagccaatgctcaatcattccatcaaacagcgggagactttgtcatgccagtagcccctgcccagaatttcgtttcgacttcagttgcatcattagccccacctcttggcatgatgccatctccatttagccagccagttgctccaccaggtttttcagattcactgcaaggttctccagctagagaagagggtgaagttccagagtctgagttggatccggacacaaggagaaggcttcttatattacagcatggccaagacacaagagatcctacatctccactaccagcaataccacccgtccaagttccagttcctccagtgcaaccccatgggaattggtttcccacagaggatgggataaaccaaagtaacctgaatagaggctcagcaggattcactgtagaatctgattctattgtctatgagaaaaagcaaccacctcatccttcattctttcatggtggggatagtcctatgccgtctgatagatttggctatcagaaccagaggtttccctctcagctaccacacgaggatcaccccatgatgcagaaccatgcacctccaaaatacagatccttttctggtgaggaactagcatcttggcatgttccctcaagccagagaaacaaccagatagaatcaggaagacactttgcacaatatgctgggacctctgctggcatattagaggggattgctctgaaatgtggttctaaggtggagtacaagtcagcattatgtgatactgcagaactacaattctctattgaggtttggattgttggggaaaaggtcggtgaaggaattggtaggacaaggagagaagcacaacgccaagctgcagaaatgtctttaagaaacttggccaataaatacttgtcatctgatccaaataagttgtctgatatgaaagaaaatgatttcagtagcaacagaaatgtctttggttactctggaaatacgagggatgatatgttgccactttcaagtacttccgaggaatctcgctttatgaaaatggagaacaataattcccggaaaacaggaagttctgttgctgctctcaaagaacttgtacaagttggtggacaaattctaggcaaaggagttgggttaacatgggaagaggccaagctccaggctgctgctgaggctcttggaactttaagatccatgctaggtcaacttggtcataaacgatctggctctccaaggtcattggcaccaaattttaacaagcggttcaagccagattttccaaggaccgtacaaagagttccttacggaacatattctaggatcgaaggtcatgttccttaagaggtctgcataaatgatgtgcctgggcgctaaacttcaaaactggatgaagctttgaactgtcaggtcttcacacattgaatgcaagccgtagattcctggcttatagttggcttccaaggctctcacaagctgccactggctgagagtaccgacgaatataaaatacgtacttcatttaagtaagcgccaagagattgaaggattaatggtggccataactttatgcagaatttcattgccatgatcttaccagtcacaagtgttaccccatgttgtcaacttggcataatcgttgacctggaagtttaacggttgaaccagggaccggcatgcagctccatttcttttttggtgtgtgtccatggatcaaagagcagcgccgtggttgggcatttttacccttcctttggtttaggtgaaagttggacctctgtagctcggagtcttagcaggtagccagtttttatttctgataagtttttaggcaagttgtaagttgtagcacaaaatcgatcacttgatagtattaacattgcattgatgtagacatgtagtcatctttgtagctgtactctaggcaagcaacacgaatccagtggcttacatcattcatttgtatgctgtagtcatcttgtaatatatggcccatttctttgcaaggctggaaatttgcctctctaagggccagtttaagagtccaaaaaccggagggaactggaggggttaaaacccactttttttattcaagggtattagcttctccaatctcctccgatttttggacttctaaactgtggctagtttggaaactctattcttcc

SEQ ID NO: 40388 - DNA, 1499 bp, Zea Mays
tctccctttaaagtccccagcgtacacgcgaaaccaacaagcaacaggaaagggccgcggcgagcagcagcgggggcggagtgtgctgtggagcggcccgcgtgcggcgagggtcgtccctacaagccgtctgacagttcataagaggtacccttttgggaaggtcctcaccatggatctatcccaggcactgacctcatccagtgatgatgaaaccagggcacttggtacattgcttgatatgttcagcagttccttttcacttgatgatatagctgatgcatatatcaaagcaaatggcgatgttaacaaagctggagatttcttatacgaccttcaacattcattgcctcataccaaagatgttgagtcaagtgtcgaggctaacctttcccatactgacaaggcagttgaagaaaactgtatggacaattcaagccaaccaagaactcttctccgtactgagcaggcagttgaagaaaatcatttcgagaattcagatcacacaaaaatgcctgaaaatctgcataagtctagtgctgcatttggtactgtctccagcatgttaagaaaagagtctatcagggctacaacaacagcgagtagagcatcaaaaaaaggcaaacctcttagggttgaactgccagagtacatgcgggatgattttaaggtgacatctgatgaatctgactctgcaccgaggagagagactttgaataacagggatgttgaggagtttctgttttgcatgcttggtgaaggatttaagctcagtaaagaattgatccatgaagttctaggcagctgtggatatgatattaagaaggctgctgatgctttcagggagggtaaccagaaagaagtcgattatcttatacaggaaggcaagcgctattatcagatggctcgactcgctgatgagaaatctgctagggagattatcaagcccagggaaacagagtcaaaaaatgaattttgtcttgatctgcgcaaacaagatgcaggaaatgtatctaatctcttgagactccatcttaaacagttggcaaacattccatcttttgattacctgagagttattattggtattgacgacagcagtttcaagatgggacaaagaagaagaaagtatgtggaaaagaattcactccagtggactgaagaagaacctcgctctgggaacatcctcatccggattaatcaggtggaaaatcggcagggataggttcatgtatacaaaggtggcgtgacacaaggtgacagaagatggatcgtagatcttaataagtgccgttttgaatcaaggtgatgttctttcggcacagggagtcatgtaattgctgcattgctgacgtaatgtaaccagcaatgcagcaattaactcgaaacgtctgcaatgtatgcacaaaaagaataccattcatggcaacttgaacatgtggacaatggtttctgatatctcaagggtcctttgcagtttcgaaactggtttcttcttt

SEQ ID NO: 40389 - DNA, 1452 bp, Zea Mays
ctttgtttgggggcggaggttgatctcgtgcgctttgctccgccatggtgtcccgcggttgtttagctaagtgtctgacagttcataagaggtacccttttgggaaggtcctcaccatggatctatcccaggcactgacctcatccagtgatgatgaaaccagggcacttggtacattgcttgatatgttcagcagttccttttcacttgatgatatagctgatgcatatatcaaagcaaatggcgatgttaacaaagctggagatttcttatacgaccttcaacattcattgcctcataccaaagatgttgagtcaagtgtcgaggctaacctttcccatactgacaaggcagttgaagaaaactgtatggacaattcaagccaaccaagaactcttctccgtactgagcaggcagttgaagaaaatcatttcgagaattcagatcacacaaaaatgcctgaaaatctgcataagtctagtgctgcatttggtactgtctccagcatgttaagaaaagagtctatcagggctacaacaacagcgagtagagcatcaaaaaaaggcaaacctcttagggttgaactgccagagtacatgcgggatgattttaaggtgacatctgatgaatctgactctgcaccgaggagagagactttgaataacagggatgttgaggagtttctgttttgcatgcttggtgaaggatttaagctcagtaaagaattgatccatgaagttctaggcagctgtggatatgatattaagaaggctgctgatgctttcagggagggtaaccagaaagaagtcgattatcttatacaggaaggcaagcgctattatcagatggctcgactcgctgatgagaaatctgctagggagattatcaagcccagggaaacagagtcaaaaaatgaattttgtcttgatctgcgcaaacaagatgcaggaaatgtatctaatctcttgagactccatcttaaacagttggcaaacattccatcttttgattacctgagagttattattggtattgacgacagcagtttcaagatgggacaaagaagaagaaaggtgatgaagtatgtggaaaagaattcactccagtggactgaagaagaacctcgctctgggaacatcctcatccggattaatcaggtggaaaatcggcagggataggttcatgtatacaaaggtggcgtgacacaaggtgacagaagatggatcgtagatcttaataagtgccgttttgaatcaaggtgatgttctttcggcacagggagtcatgtaattgctgcattgctgacgtaatgtaaccagcaatgcagcaattaactcgaaacgtctgcaatgtatgcacaaaaagaataccattcatggcaacttgaacatgtggacaatggtttctgatatctcaagggtcctttgcagtttcgaaactggtttcttcttt

SEQ ID NO: 40390 - DNA, 1381 bp, Zea Mays
acaagcaccaagaccgccggcgctataaaacgtgcaccggatcatccgatctttatctcactgccaaactctcctctccacccacacacacgcgtaaccttctacaccaccttgctcaagaataatcagctttcagctgcactgacatggaaggagacacaggcagccgatctgagaaagaggtcgctgtggtcacaggaggcaacaggggaattgggctagagatatgcaggcaactggcttccagtggagtcaccgtagtgttgacagcaagggacgcggagaggggcgcggaggcagccagcacgcttgggctacccaacgtcgtcttccatcagctggatgtcggcgatccgtcgagcgctgcacgcttagctggttttatcgaggagaagtttggcaggctggatatattggtcaacaatgcagcaattactggaacgacaagtaacgtcgacgatccagaagcttttcgtcaagagctcgcaggcatggatctcatgcagaggatcgaagcaatcaacaagcacaacacagaaccgtacgagcaagcacagaagtgcttgcggacgaactaccacgggaccaaagctgtcacaaaagcgctgctccctcttctgcagtcctcgtcccatggaaggatcgttaacctgtcatcctcctatggactactcaggcggagacgaactgaaagaggagctcagcagcatcgatggcctgtccgaacagaggctggacgagctgtcagagctgtttctcaaggacttcaaggatgggcagctggaggctcgagagggtggcccaatgaaggagggttcgtcacgtacaaggcgtccaaggcgctcgcgaacgcctattcccggatccttgcgaaggagcacccgtcgctgtgcgtcaactgtgtgcatcctggctacgtccagacggacatgaacttccggtctgggcatctgacggtcgaggagggcgcgcggggagctctcatgctggccatggcgcccaagggaggcgtcactggcgcgttcttggaccacactgaggtcgcgtccttcgtgtaatatatatgctcgcaccttgcaaccataaatataactcagatttgccttctctattatttctgtatttttagaaaccaacacccatatattgtaccatgtaatttgtatgcgattgaagtgttctacctttgtatccttcgtttttcagtgttttaaatcgccggctaataaggcatttaaaacttcacgagttggaaaaccaatgcactaggagtgaagcaaacatgttaacacacatatattcacactaggaatatgaccgtgactagctacgaaatcaatataataaaatatatttatatgcaaaaaacataaaatagtag

SEQ ID NO: 40391 - DNA, 1712 bp, Zea Mays
ctcagtgtcgccactctcctctccacacacacacatacacacacgtaacctagcttctacacggatcgggatcccctgcagtactgcatgggccactgccgcgtgggctccgcgtgcgacagggcccacgcgcagtgacccaacggcacggtgcagtacgtcagaggatccgtgtcccttctacaccaccttgcgcaagaattttagctttcagctgcattagcatggaaggagacaaaggcaaccgatatgggaaacagtgagcgccaaatctcttcggcagagtactgcagtagcactataaacaatgtctaatgcataagaacagacaagaatgctatgtccagaatttaaataagcagaattacctgagccatggttttatctttctcgagtgtcgcatgtaatttttttacaggaaatttgtgattttgatgccatcttcttctttgttacggccagggtcgccgtggtcacaggaggcaacagggggatcgggctagaaatatgcaggcaactggcttccagtggagtcaccgtagtgttgacagcaagggacgcggagcggggcgcgggagcagccagcacgcttgggcaacaacccaacgtcgtcttccatcagctggatgtcggcgatccgtccagcgccgcacgcttagctggttttatcgaggagaagtttggcaggctggatatattaattgatcaacaatgcaggaattactggaacggcaagtaacgtcgacgatccagaagcttttcgtctggagctcgcgggcatggatctcatgcagaggatcgaagcaatcaacaggcacagcacggaaccgtacgagcaagcagagaagtgcctcaacaccaactaccacgggatcaaggctgtcacaaaagcgctgctcccgcttctacagtcctcgtcccatggaaggatcgttaacctgtcgtcctactatggactactcaggtttttcagcggagacgaactgaaagaggagctcagcagcatcgacggcctgtccaaacagaggctggacgagctgtcagagctgtttctcaaggacttcaaggatgggcagctggaggctcaagggtggccgaatgaaggagggttcgccgcgtacaaggcgtccaaggcgctcgcgaacgcctattcccggatccttgcgaaggagcacccgtcgctgcgcatcaactgtgtgcatcccggctatgtccagacggacatgaacttcgggtctgggcatctgacggtcgaggagggcgcgcgggccgggagctctcatgctggccatggagcccaagggaggcgtcactggcgcgtttttcgaccacaccgtggttgcgtccttcgtgtaatatgctcgcccttgcactcgcaccgttagctatcgcagtaataaaattccacagaaccaaaggaggatacactattaggtcctgaatcagatctgttctatcccctcccctgggaaaatatcctctcgctgtcgctgggtagatggccgtccaatttcattttggttgccgatgagtgttctcattcgcagcgaattagtctatcttgtatgattcatctgttatgaatataaaagaaataagaatcctcgtatcaaaaaacaattaggtctttttttttgttattctccttctactacaagggttagaggattaggagagattttgatttgctagggatttaatttcacccattc

SEQ ID NO: 40392 - DNA, 2306 bp, Zea Mays
ggcggaatcagattgcccgcgaggccgcgggcgcagccgtgaccagcgagccgaaggccctggcgccatccacggccgccgacggcgtcaattcgagttcgcaagattggaaggcccaattgaagcttccacctcctgatacacgctacaggacagaggatgttacagccaccaagggcaatgagtttgaagactattttctcaagcgtgaactcctaatgggtatttacgaaaagggatttgaaagaccctctcctattcaagaggaaagcattcctattgctttaactggtagtgacattcttgcaagagcgaagaatggaactggcaagactgctgcattttgtattcctgcactggaaaagattgatcaagaaaaaaatgctattcaagttgttatattggttcccacaagggaattggctctacaaacatcacaagtttgtaaggagcttggtaaacatttgaagatccaagttatggtcaccactggtggaaccagcttgaaggatgatattgttcgtctgtaccaacccgtgcacttaattgttggaacacctggccgtattttggatcttacaaagaaaggtgtttgcattttgaaggactgttcaatgcttattatggatgaggcagacaagcttctctctcctgagtttcaaccttccatagaacagttgattcgctacctccctgctagtcgacagattttgatgttctcagcgacattccctgtgactgttaaggagttcaaggacaaatatcttcctaaaccttatgtgattaaccttatggatgaacttacactgaagggaattacgcagttctatgcttttgttgaagaacgacagaaagttcactgtctcaacaccctcttttccaagcttcaaatcaatcagtcaataatattctgtaactctgtaaatcgtgttgaactattggcgaagaagatcacagagcttggttattcttgcttctatattcatgcaaagatgctacaggaccaccgcaatagagttttccatgatttccgtaatggagcgtgcaggaatcttgtttgtactgatctttttacaaggggaatagatattcaagctgtgaatgttgttatcaattttgatttccccaagaactctgaaacatatctccacagggttggtagatctgggagatttggccaccttggtctggccgttaatttgatcacctatgaggatcgatttaacttgtataggattgaacaagagcttgggactgaaataaaaccaattcctcctcagatagaccaggctatatattgccaatgatcaggcagttttcatctttgttcatttctccgtgattaataaggagacaacttttgtaaataccagctcatcaggttttatggtgttgatctcatttggtgcatcggagacaattctaagttggtggattacgtgagacgaggcacccgacttttcctgatcaccttgtcatgctgacactattatggctatatgagggaaaatgtcctgccacactaggcacaaagtagtgtatattactaggacattttaaccctgttgctggttctgggcgtgtggcctgtgggtgccgcgcacaagggtaaaagacattttagcccaagtggaacttggggatgtgcgcctcagattggttaatgggtgtgacaagtcggccatcacacttgaggtctggagtctgaacggtagtgaagtgattttaagtttgccaataatcagtggtaagctgcaccgtgctgtgctgtcttttacccttgcaaccatgtccctttgcttcttggcatggtcgccatttagattctgtccggcgaatgtaacgctgggataaaacgttcttgtcgtttgtgatggatttatgtgtttggcacaagcaacttggccaggttatgggtaccagaactgtctacttgtttcttccataataacaaactttgcagttcttttgtactcattcttttttttttcgtgattgacctcgaccccttgtttaagtgatgtttttccgcgccccagcaatggatgccttttattaatagggatgtttgtttatttatataaataagaatggttgactttggagccacgtaaatcatttcgtcaaatgcgtcgtgtttaaatttggcattggttcgctatggtgctgacatggtttgtagctgggtttctctcatctatgcaggtatatgcttgctagaaatctcaacccgttaccgttactagcttggtcctggaaagacgaacataatcgtgcgcatagcatcatgtagctttcgtgaattg

SEQ ID NO: 40393 - DNA, 2276 bp, Zea Mays
gaaggccctggcgccatccacggccgccgacggcgtcaattcgagttcgcaagattggaaggcccaattgaagcttccacctcctgatacacgctacaggacagaggatgttacagccaccaagggcaatgagtttgaagactattttctcaagcgtgaactcctaatgggtatttacgaaaagggatttgaaagaccctctcctattcaagaggaaagcattcctattgctttaactggtagtgacattcttgcaagagcgaagaatggaactggcaagactgctgcattttgtattcctgcactggaaaagattgatcaagaaaaaaatgctattcaagttgttatattggttcccacaagggaattggctctacaaacatcacaagtttgtaaggagcttggtaaacatttgaagatccaagttatggtcaccactggtggaaccagcttgaaggatgatattgttcgtctgtaccaacccgtgcacttaattgttggaacacctggccgtattttggatcttacaaagaaaggtgtttgcattttgaaggactgttcaatgcttattatggatgaggcagacaagcttctctctcctgagtttcaaccttccatagaacagttgattcgctacctccctgctagtcgacagattttgatgttctcagcgacattccctgtgactgttaaggagttcaaggacaaatatcttcctaaaccttatgtgattaaccttatggatgaacttacactgaagggaattacgcagttctatgcttttgttgaagaacgacagaaagttcactgtctcaacaccctcttttccaagatcacagagcttggttattcttgcttctatattcatgcaaagatgctacaggaccaccgcaatagagttttccatgatttccgtaatggagcgtgcaggaatcttgtttgtactgatctttttacaaggggaatagatattcaagctgtgaatgttgttatcaattttgatttccccaagaactctgaaacatatctccacagggttggtagatctgggagatttggccaccttggtctggccgttaatttgatcacctatgaggatcgatttaacttgtataggattgaacaagagcttgggactgaaataaaaccaattcctcctcagatagaccaggctatatattgccaatgatcaggcagttttcatctttgttcatttctccgtgattaataaggagacaacttttgtaaataccagctcatcaggttttatggtgttgatctcatttggtgcatcggagacaattctaagttggtggattacgtgagacgaggcacccgacttttcctgatcaccttgtcatgctgacactattatggctatatgagggaaaatgtcctgccacactaggcacaaagtagtgtatattactaggtgcctattcctagaccctgtcctgctttgagttcgtttgtatttcccttgttttccgtacgccgtgtcgttaagcagtttcacacaggacattttaaccctgttgctggttctgggcgtgtggcctgtgggtgccgcgcacaagggtaaaagacattttagcccaagtggaacttggggatgtgcgcctcagattggttaatgggtgtgacaagtcggccatcacacttgaggtctggagtctgaacggtagtgaagtgattttaagtttgccaataatcagtggtaagctgcaccgtgctgtgctgtcttttacccttgcaaccatgtccctttgcttcttggcatggtcgccatttagattctgtccggcgaatgtaacgctgggataaaacgttcttgtcgtttgtgatggatttatgtgtttggcacaagcaacttggccaggttatgggtaccagaactgtctacttgtttcttccataataacaaactttgcagttcttttgtactcattcttttttttttcgtgattgacctcgaccccttgtttaagtgatgtttttccgcgccccagcaatggatgccttttattaatagggatgtttgtttatttatataaataagaatggttgactttggagccacgtaaatcatttcgtcaaatgcgtcgtgtttaaatttggcattggttcgctatggtgctgacatggtttgtagctgggtttctctcatctatgcaggtatatgcttgctagaaatctcaacccgttaccgttactagcttggtcctggaaagacgaacataatcgtgcgcatagcatcatgtagctttcgtgaattg

SEQ ID NO: 40394 - DNA, 2406 bp, Zea Mays
ggcgccaatgccatggccgcacggtccgagttcgacacgcaaaaccagaaccgctgagcttgaggcctctgcactgcttccctcccagtccatcccttcccttcccttccgcttcccccacgccacccgtctactccgtcgtcttgtcgcaggcagcaggtggaaatctccgccattaatagcgcaccccggggatcctcctcggccgcaaacaaaaccctcctcgtcatccgcggccgcttttcccctgacccctgcctcgaccaatcctccctcccacacacatcacacccacaagacaaaaaaaagcgcctttgagcgccgcgcgacctctggtgcttggtgtcgtcgcgacgcgttagtttcagagcgcgcacgcgcgtttgtgctgtgggggttgggaagagccgaagagcgaggcggcagcgcgatcgagagcggttcggcgggcggcggccgagccgatgggaagggcaccctgctgcgacaagaacaagggcctcaagaaggggccctggacgccggaggaggacaagctcctcgtcgactacatccagaccaacggccatggcagctggcgcctgctccccaagctcgcagggctgaaccggtgcggcaagagctgccgactgcggtggaccaactacctccggccggacatcaagcgcgggcccttcacagccgaggaggagaagtccatcgtccagctccacgccatcgtcggcaacaagtaagaaaacttttttgccgagccgaggtagcaactgcctgcccgtcccattcgatctgtggcaccggcagagagcagcacgtttcctctctcgtcatgctctcatctcactcactcatcatagcttagagagctcgcactgccggtgtactgctcggcgcagcgcctcactgtcgcaaagcatcgcgtcgcattgaatgatgccacctccgtccaaggcatcgcgtccaaaacctggcgccttcagcatgccggatgtgtattgctattgcctcgctctcgtagacgtagtactcctatttactagagccctgtctgctcatatttctgccacggcaattggtgattggctgattgctattggcaggacaactctctccctctccggaaaaaaagtttgcaaactattctcgctgcttgaagagtcaaacggtctaaacttcaactaaatttatataaaaaaatacaaacattttcagtacaaaaagaagtgtcattaaattaggtatacacacgctggtgctaattactataaacttggacagtttgattgtcataaataatattgttgcattctctcgagaacgaacggcatacgttgacggttttttttatctggtgttgatcctggtacctcaaggtggtccatgatcgcggcgcagctcccaggccggacggacaacgagatcaagaactactggaacacgcacctcaagaagcagctgcgccggatgggcctcgacgagcccccgcccggcccggccgccggctgccccgccgcgcgccacatggcgcagtgggagacggccaggctcgaggccgaggcgcgcctctccctcctcgccgccaccgccgcctcctccggcaccaccgcgaccaccacagccaccaccaccacgtctgcagcctcctcgtcctccaccaccgtcgctggcgcggccgacaacaaggcctccaaccccgcggacatcttcctgcgcctgtggagctcggacatcggggactccttccgccgcaagacggacacgacgccagcggtgcccgcgcttccggcgcccgtcgtcaagaggaaggacacggcgatcaagcaggagccgcgggcgctgctgctcggcctcagggacgactcctcggcggcgtccaacgacaacgagacggaggtggcggaggcgctggaggcgaagtaccagatgttcctcgacttcgcgggcgaagagctgggattgttccatggccggcacggcggcttctcgctgttcccgccgctcgacgtgctcgctgaggcgtccctggactcggctttcaagtgaagacgtagccagcaccacgtacgtacacggtacacatacgtacgggtacggcaagcggcagtagccaactggccatgcctctacggcttagctatacgcctcgaaatgcgcgcatggatgtatatagatatgcgtgtgactgcactggcatatcagcaattttttgggttaggccagcaagtgcgtggtttagcttgttattatccagggttggttttggtaggacatcatggtgtattattgcctgtatgaggattctctgttcattggagatgctctaatacatcacgagatgttcttcaatcttcggttagattctgggactgctttttcgcactggaaacatatttgacctggtttttagag

SEQ ID NO: 40395 - DNA, 3017 bp, Zea Mays
gttccaatctttatcttcctgttgccttggcccatgacgtgcaactgtagtccaaacaatgatgcgcagatacttcaagtccagcccaaataaaagcccattaatgctacacgctgtcacccatcgtatcggtcaggtaggcacggccgatccggcgccagcagcggcggtgctcgaccttcaggcatcagagctgcgggacatcacacgcaccgctacgatctcctcctgcgagcgagatctcaccaccgcagcggcgccgcggccatggcgggaaggtatcaccaggatcagggcggggacgggggcgcgtccatggaggtagtcagcacgccgaaccaggagctggcccttaccaactgcgcatacgtctctcccgctgacctccgccgcttccccaacgggctcgccctcgtcgctgacgcctgggtcttcaccctacgtgaccacaatgctgttgcaagtggacgcattgccttgaatgctattcagcgtcggcaggcaaaggtttcagctggggattctgttactgttagcagttttgtcccccctgatgatttcaagttggctttgctcactttagatctagattatgccaaggcaagagccaaccgaaatgacgagctggatgctgttgtgcttgcccaacaactccgtaagaggtttctgaatcaggtcatgacctcagggcaaagggtgccatttgaattttatggaacaaactatgtattcaccgtcaatcaagctttgctagagggtcaagagagttctacaccattggatagaggattcttgtccagtgatacatacatcatatttgaggctgctcctaattcaggaattaaggtgatcaaccaaaaggaagctgctagcagcaagcttttcaaacataaagagtttaacctggaaaaattgggtataggtggattaagcgctgaattcactgacatatttcgtagggcattcgcttcaagagtctttccgcctcatgttgtcagtaagttgggcatcaaacatgttaagggtatattgctatatggacctcctggtactggcaagactctaatggccagacaaattggaaagttactgaatggaaaagatcccaagattgtgaatggacctgaagttctgagcaagtttgttggagaaactgagaagaatgtgagagatttgtttgctgatgctgaaaatgagcagagaacacgaggtgatcagagtgacctccatgttatcatattcgatgaaattgatgccatctgcaagtctagaggatctacccgtgatggtacaggtgtacatgatagcattgtaaaccagctgcttacaaagatagatggtgttgaggcgttgaataatgtattgcttattggaatgacgaatcgtaaagatttgcttgatgaagctttattgagacctggacgattggaagtacacattgagataaacctgcctgatgaaaatggtcgtttgcaaatccttcaaattcatacaaataagatgaaggagaattctttcctgtctccagatattaatcttcaggagctaggcaccctaaggcaaggatcaagggaaagcttagcaacccaaaaccagattccctcctcacccatgtgaaaagtgccagcaaacagcagctgcacacaaccacacatgattgtgccagttcagcaataacattacttatgcacattagcactcagttttacctttggaaattctttatgtatcaaatgacaactgagtttcttaacaaagctgcgcggacaaagaactacagtggagcagagttggaaggtgttgtcaaaagtgctgtctcatttgctttgaaccggcagataaccatggatgacctcactaaacctttggatgaggaaagcatcaaggttaccatggatgattttgtgaatgcacttcatgaaattacccctgcatttggtgcttccaccgatgatctcgaaagatgcagattgcgtggtattgttgattgtggcaaggcacataagcacatttatcaaagagctatgctcctcgtagagcaagttaaagttagcaaaggtagcccactcgtgacttgcctattggaaggtcctgctggaagtgggaaaacggctatggcagcaagtgttggcattgacagtgattttgcatatgtgaaaattatatcagcagaaacaatgattggtttcagtgaaagcagcaaatgcgcacagatttgcaaggtttttgaggacgcatacaagtctcagttcagcatgataattcttgatgatatcgaaaggttactggagtatgtagccatcggaccacgtttttcaaacttgatctcacaaactcttctggtcctcctcaagagagttcctcctaagggaaaaaacttgcttgtcgttggaacaacaagcgaggttggcttcctagaatctgttggaatgtgtgacgtgttctctgtgacctaccatgttcccaaactgaaaaaggaggatgccaaaaaggtattgcatcatcttgatgtgttcgatgacggagatcttgacgcagcagcagaagcactggacgatatgccaatcaagaagttgtacacacttgttgagatggctgctcaggggccaaccggaggaagtgctgaagcgatttatgccggagagaagatagatatcaaccatttctttagcatcttgagtgatattatccgttactaagcccgcatggagccgaaatgaaccctataagtatccagtaggagtttgtttgcacccgtgcttcatcaaccatttctgtagattggtttgatctttgatgtgttgtttttgtttgatgcacctactagagctgttggattagatcagaggcgaattacacgatatatcatttttgtattgtatgacgatgtttatacagttcttaatgggatccagctttacacctcagaacaccgataattttcacattcctattagacccgcttgttttgttgaaattgaattctattttaataaatacgatttagagaaaactaa

SEQ ID NO: 40396 - DNA, 2688 bp, Zea Mays
ccatcgtatcggtcaggtaggcacggccgatccggcgccagcagcggcggtgctcgaccttcaggcatcagagctgcgggacatcacacgcaccgctacgatctcctcctgcgagcgagatctcaccaccgcagcggcgccgcggccatggcgggaaggtatcaccaggatcagggcggggacgggggcgcgtccatggaggtagtcagcacgccgaaccaggagctggcccttaccaactgcgcatacgtctctcccgctgacctccgccgcttccccaacgggctcgccctcgtcgctgacgcctgggtcttcaccctacgtgaccacaatgctgttgcaagtggacgcattgccttgaatgctattcagcgtcggcaggcaaaggtttcagctggggattctgttactgttagcagttttgtcccccctgatgatttcaagttggctttgctcactttagatctagattatgccaaggcaagagccaaccgaaatgacgagctggatgctgttgtgcttgcccaacaactccgtaagaggtttctgaatcaggtcatgacctcagggcaaagggtgccatttgaattttatggaacaaactatgtattcaccgtcaatcaagctttgctagagggtcaagagagttctacaccattggatagaggattcttgtccagtgatacatacatcatatttgaggctgctcctaattcaggaattaaggtgatcaaccaaaaggaagctgctagcagcaagcttttcaaacataaagagtttaacctggaaaaattgggtataggtggattaagcgctgaattcactgacatatttcgtagggcattcgcttcaagagtctttccgcctcatgttgtcagtaagttgggcatcaaacatgttaagggtatattgctatatggacctcctggtactggcaagactctaatggccagacaaattggaaagttactgaatggaaaagatcccaagattgtgaatggacctgaagttctgagcaagtttgttggagaaactgagaagaatgtgagagatttgtttgctgatgctgaaaatgagcagagaacacgaggtgatcagagtgacctccatgttatcatattcgatgaaattgatgccatctgcaagtctagaggatctacccgtgatggtacaggtgtacatgatagcattgtaaaccagctgcttacaaagatagatggtgttgaggcgttgaataatgtattgcttattggaatgacgaatcgtaaagatttgcttgatgaagctttattgagacctggacgattggaagtacacattgagataaacctgcctgatgaaaatggtcgtttgcaaatccttcaaattcatacaaataagatgaaggagaattctttcctgtctccagatattaatcttcaggagctagctgcgcggacaaagaactacagtggagcagagttggaaggtgttgtcaaaagtgctgtctcatttgctttgaaccggcagataaccatggatgacctcactaaacctttggatgaggaaagcatcaaggttaccatggatgattttgtgaatgcacttcatgaaattacccctgcatttggtgcttccaccgatgatctcgaaagatgcagattgcgtggtattgttgattgtggcaaggcacataagcacatttatcaaagagctatgctcctcgtagagcaagttaaagttagcaaaggtagcccactcgtgacttgcctattggaaggtcctgctggaagtgggaaaacggctatggcagcaagtgttggcattgacagtgattttgcatatgtgaaaattatatcagcagaaacaatgattggtttcagtgaaagcagcaaatgcgcacagatttgcaaggtttttgaggacgcatacaagtctcagttcagcatgataattcttgatgatatcgaaaggttactggagtatgtagccatcggaccacgtttttcaaacttgatctcacaaactcttctggtcctcctcaagagagttcctcctaagggaaaaaacttgcttgtcgttggaacaacaagcgaggttggcttcctagaatctgttggaatgtgtgacgtgttctctgtgacctaccatgttcccaaactgaaaaaggaggatgccaaaaaggtattgcatcatcttgatgtgttcgatgacggagatcttgacgcagcagcagaagcactggacgatatgccaatcaagaagttgtacacacttgttgagatggctgctcaggggccaaccggaggaagtgctgaagcgatttatgccggagagaagatagatatcaaccatttctttagcatcttgagtgatattatccgttactaagcccgcatggagccgaaatgaaccctataagtatccagtaggagtttgtttgcacccgtgcttcatcaaccatttctgtagattggtttgatctttgatgtgttgtttttgtttgatgcacctactagagctgttggattagatcagaggcgaattacacgatatatcatttttgtattgtatgacgatgtttatacagttcttaatgggatccagctttacacctcagaacaccgataattttcacattcctattagacccgcttgttttgttgaaattgaattctattttaataaatacgatttagagaaaactaa

SEQ ID NO: 40397 - DNA, 3141 bp, Zea Mays
atcggtcaggtaggcacggccgatccggcgccagcagcggcggtgctcgaccttcaggcatcagagctgcgggacatcacacgcaccgctacgatctcctcctgcgagcgagatctcaccaccgcagcggcgccgcggccatggcgggaaggtatcaccaggatcagggcggggacgggggcgcgtccatggaggtagtcagcacgccgaaccaggagctggcccttaccaactgcgcatacgtctctcccgctgacctccgccgcttccccaacgggctcgccctcgtcgctgacgcctgggtcttcaccctacgtgaccacaatgctgttgcaagtggacgcattgccttgaatgctattcagcgtcggcaggcaaaggtttcagctggggattctgttactgttagcagatctagattatgccaaggcaagagccaaccgaaatgacgagctggatgctgttgtgcttgcccaacaactccgtaagaggtttctgaatcaggtcatgacctcagggcaaagggtgccatttgaattttatggaacaaactatgtattcaccgtcaatcaagctttgctagagggtcaagagagttctacaccattggatagaggattcttgtccagtgatacatacatcatatttgaggctgctcctaattcaggaattaaggtgatcaaccaaaaggaagctgctagcagcaagcttttcaaacataaagagtttaacctggaaaaattgggtataggtggattaagcgctgaattcactgacatatttcgtagggcattcgcttcaagagtctttccgcctcatgttgtcagtaagtaagtatggtacctgcttaactactttttgtactgttgtaatcaggatcttttgctaacggtctagtactataggttgggcatcaaacatgttaagggtatattgctatatggacctcctggtactggcaagactctaatggccagacaaattggaaagttactgaatggaaaagatcccaagattgtgaatggacctgaagttctgagcaagtttgttggagaaactgagaagaatgtgagagatttgtttgctgatgctgaaaatgagcagagaacacgaggtgatcagagtgacctccatgttatcatattcgatgaaattgatgccatctgcaagtctagaggatctacccgtgatggtacaggtgtacatgatagcattgtaaaccagctgcttacaaagatggtgttgaggcgttgaataatgtattgcttattggaatgacgaatcgtaaagatttgcttgatgaagctttattgagacctggacgattggaagtacacattgagataaacctgcctgatgaaaatggtcgtttgcaaatccttcaaattcatacaaataagatgaaggagaattctttcctgtctccagatattaatcttcaggagctaggtatgctgaatgacagataatagcagcagacatttgaagttgtctagcagcaaatgttaggagtaggtttttcttgtgtaacgaatcgtgtcggttatcaaactgaccacccatgtactataaataggcaccctaaggcaaggatcaagggaaagcttagcaacccaaaaccagattccctcctcacccatgtgaaaagtgccagcaaacagcagctgcacacaaccacacatgattgtgccagttcagcaataacattacttatgcacattagcactcagttttacctttggaaattctttatgtatcaaatgacaactgagtttcttaacaaagctgcgcggacaaagaactacagtggagcagagttggaaggtgttgtcaaaagtgctgtctcatttgctttgaaccggcagataaccatggatgacctcactaaacctttggatgaggaaagcatcaaggttaccatggatgattttgtgaatgcacttcatgaaattacccctgcatttggtgcttccaccgatgatctcgaaagatgcagattgcgtggtattgttgattgtggcaaggcacataagcacatttatcaaagagctatgctcctcgtagagcaagttaaagttagcaaaggtagcccactcgtgacttgcctattggaaggtcctgctggaagtgggaaaacggctatggcagcaagtgttggcattgacagtgattttgcatatgtgaaaattatatcagcagaaacaatgattggtttcagtgaaagcagcaaatgcgcacagatttgcaaggtttttgaggacgcatacaagtctcagttcagcatgataattcttgatgatatcgaaaggtgcttgagcccttgattctagaagtgaacaggctgccatgcaaaactttatgcatctcatttcgctctgttttagtattcttgtatgattttgtaggttactggagtatgtagccatcggaccacgtttttcaaacttgatctcacaaactcttctggtcctcctcaagagagttcctcctaagggaaaaaacttgcttgtcgttggaacaacaagcgaggttggcttcctagaatctgttggaatgtgtgacgtgttctctgtgacctaccatgttcccaaactgaaaaaggaggatgccaaaaaggtattgcatcatcttgatgtgttcgatgacggagatcttgacgcagcagcagaagcactggacgatatgccaatcaagaagttgtacacacttgttgagatggctgctcaggggccaaccggaggaagtgctgaagcgatttatgccggagagaagatagatatcaaccatttctttagcatcttgagtgatattatccgttactaagcccgcatggagccgaaatgaaccctataagtatccagtaggagtttgtttgcacccgtgcttcatcaaccatttctgtagattggtttgatctttgatgtgttgtttttgtttgatgcacctactagagctgttggattagatcagaggcgaattacacgatatatcatttttgtattgtatgacgatgtttatacagttcttaatgggatccagctttacacctcagaacaccgataattttcacattcctattagacccgcttgttttgttgaaattgaattctattttaataaatacgatttagagaaaactaa

SEQ ID NO: 40398 - DNA, 2995 bp, Zea Mays
gccagcagcggcggtgctcgaccttcaggcatcagagctgcgggacatcacacgcaccgctacgatctcctcctgcgagcgagatctcaccaccgcagcggcgccgcggccatggcgggaaggtatcaccaggatcagggcggggacgggggcgcgtccatggaggtagtcagcacgccgaaccaggagctggcccttaccaactgcgcatacgtctctcccgctgacctccgccgcttccccaacgggctcgccctcgtcgctgacgcctgggtcttcaccctacgtgaccacaatgctgttgcaagtggacgcattgccttgaatgctattcagcgtcggcaggcaaaggtttcagctggggattctgttactgttagcagatctagattatgccaaggcaagagccaaccgaaatgacgagctggatgctgttgtgcttgcccaacaactccgtaagaggtttctgaatcaggtacgagactatcggttacttaaattctttgagtagggcccttttttgcttggttagctttaaagtgtatgctattcatgagatgccactagtgcattattggattatcaatggctgtagttttattattggtacttatgtgcccgataagttggtcccctggggttgtttacacgttgcaggtcatgacctcagggcaaagggtgccatttgaattttatggaacaaactatgtattcaccgtcaatcaagctttgctagagggtcaagagagttctacaccattggatagaggattcttgtccagtgatacatacatcatatttgaggctgctcctaattcaggaattaaggtgatcaaccaaaaggaagctgctagcagcaagcttttcaaacataaagagtttaacctggaaaaattgggtataggtggattaagcgctgaattcactgacatatttcgtagggcattcgcttcaagagtctttccgcctcatgttgtcagtaagttgggcatcaaacatgttaagggtatattgctatatggacctcctggtactggcaagactctaatggccagacaaattggaaagttactgaatggaaaagatcccaagattgtgaatggacctgaagttctgagcaagtttgttggagaaactgagaagaatgtgagagatttgtttgctgatgctgaaaatgagcagagaacacgaggtgatcagagtgacctccatgttatcatattcgatgaaattgatgccatctgcaagtctagaggatctacccgtgatggtacaggtgtacatgatagcattgtaaaccagctgcttacaaagatggtgttgaggcgttgaataatgtattgcttattggaatgacgaatcgtaaagatttgcttgatgaagctttattgagacctggacgattggaagtacacattgagataaacctgcctgatgaaaatggtcgtttgcaaatccttcaaattcatacaaataagatgaaggagaattctttcctgtctccagatattaatcttcaggagctaggcaccctaaggcaaggatcaagggaaagcttagcaacccaaaaccagattccctcctcacccatgtgaaaagtgccagcaaacagcagctgcacacaaccacacatgattgtgccagttcagcaataacattacttatgcacattagcactcagttttacctttggaaattctttatgtatcaaatgacaactgagtttcttaacaaagctgcgcggacaaagaactacagtggagcagagttggaaggtgttgtcaaaagtgctgtctcatttgctttgaaccggcagataaccatggatgacctcactaaacctttggatgaggaaagcatcaaggttaccatggatgattttgtgaatgcacttcatgaaattacccctgcatttggtgcttccaccgatgatctcgaaagatgcagattgcgtggtattgttgattgtggcaaggcacataagcacatttatcaaagagctatgctcctcgtagagcaagttaaagttagcaaaggtagcccactcgtgacttgcctattggaaggtcctgctggaagtgggaaaacggctatggcagcaagtgttggcattgacagtgattttgcatatgtgaaaattatatcagcagaaacaatgattggtttcagtgaaagcagcaaatgcgcacagatttgcaaggtttttgaggacgcatacaagtctcagttcagcatgataattcttgatgatatcgaaaggttactggagtatgtagccatcggaccacgtttttcaaacttgatctcacaaactcttctggtcctcctcaagagagttcctcctaagggaaaaaacttgcttgtcgttggaacaacaagcgaggttggcttcctagaatctgttggaatgtgtgacgtgttctctgtgacctaccatgttcccaaactgaaaaaggaggatgccaaaaaggtattgcatcatcttgatgtgttcgatgacggagatcttgacgcagcagcagaagcactggacgatatgccaatcaagaagttgtacacacttgttgagatggctgctcaggggccaaccggaggaagtgctgaagcgatttatgccggagagaagatagatatcaaccatttctttagcatcttgagtgatattatccgttactaagcccgcatggagccgaaatgaaccctataagtatccagtaggagtttgtttgcacccgtgcttcatcaaccatttctgtagattggtttgatctttgatgtgttgtttttgtttgatgcacctactagagctgttggattagatcagaggcgaattacacgatatatcatttttgtattgtatgacgatgtttatacagttcttaatgggatccagctttacacctcagaacaccgataattttcacattcctattagacccgcttgttttgttgaaattgaattctattttaataaatacgatttagagaaaactaa

SEQ ID NO: 40399 - DNA, 3249 bp, Zea Mays
gccagcagcggcggtgctcgaccttcaggcatcagagctgcgggacatcacacgcaccgctacgatctcctcctgcgagcgagatctcaccaccgcagcggcgccgcggccatggcgggaaggtatcaccaggatcagggcggggacgggggcgcgtccatggaggtagtcagcacgccgaaccaggagctggcccttaccaactgcgcatacgtctctcccgctgacctccgccgcttccccaacgggctcgccctcgtcgctgacgcctgggtcttcaccctacgatatccttttgtagacggtctctgaccacaatgctgttgcaagtggacgcattgccttgaatgctattcagcgtcggcaggcaaaggtttcagctggggattctgttactgttagcagttttgtcccccctgatgatttcaagttggctttgctcactttagatctagattatgccaaggcaagagccaaccgaaatgacgagctggatgctgttgtgcttgcccaacaactccgtaagaggtttctgaatcaggtcatgacctcagggcaaagggtgccatttgaattttatggaacaaactatgtattcaccgtcaatcaagctttgctagagggtcaagagagttctacaccattggatagaggattcttgtccagtgatacatacatcatatttgaggctgctcctaattcaggaattaaggtgatcaaccaaaaggaagctgctagcagcaagcttttcaaacataaagagtttaacctggaaaaattgggtataggtggattaagcgctgaattcactgacatatttcgtagggcattcgcttcaagagtctttccgcctcatgttgtcagtaagttgggcatcaaacatgttaagggtatattgctatatggacctcctggtactggcaagactctaatggccagacaaattggaaagttactgaatggaaaagatcccaagattgtgaatggacctgaagttctgagcaagtttgttggagaaactgagaagaatgtgagagatttgtttgctgatgctgaaaatgagcagagaacacgaggtgatcagagtgacctccatgttatcatattcgatgaaattgatgccatctgcaagtctagaggatctacccgtgatggtacaggtgtacatgatagcattgtaaaccagctgcttacaaagatggtgttgaggcgttgaataatgtattgcttattggaatgacgaatcgtaaagatttgcttgatgaagctttattgagacctggacgattggaagtacacattgagataaacctgcctgatgaaaatggtcgtttgcaaatccttcaaattcatacaaataagatgaaggagaattctttcctgtctccagatattaatcttcaggagctaggtctgcctctctttttttttggcaaattgatatactttcaggcattgcatttatagcaaaggtttccattatttttcatagcatggacccctaactaagttagctctggctgaatcatgctagttctattgattaaattgtaatattttggaaattttgctttgaaagatttactgttgtaatccttgcattgtactgattactgaatagtaggcattctttcgtttttctttggcttactaggtatgctgaatgacagataatagcagcagacatttgaagttgtctagcagcaaatgttaggagtaggtttttcttgtgtaacgaatcgtgtcggttatcaaactgaccacccatgtactataaataggcaccctaaggcaaggatcaagggaaagcttagcaacccaaaaccagattccctcctcacccatgtgaaaagtgccagcaaacagcagctgcacacaaccacacatgattgtgccagttcagcaataacattacttatgcacattagcactcagttttacctttggaaattctttatgtatcaaatgacaactgagtttcttaacaaagctgcgcggacaaagaactacagtggagcagagttggaaggtgttgtcaaaagtgctgtctcatttgctttgaaccggcagataaccatggatgacctcactaaacctttggatgaggaaagcatcaaggttaccatggatgattttgtgaatgcacttcatgaaattacccctgcatttggtgcttccaccgatgatctcgaaagatgcagattgcgtggtattgttgattgtggcaaggcacataagcacatttatcaaagagctatgctcctcgtagagcaagttaaagttagcaaaggtagcccactcgtgacttgcctattggaaggtcctgctggaagtgggaaaacggctatggcagcaagtgttggcattgacagtgattttgcatatgtgaaaattatatcagcagaaacaatgattggtttcagtgaaagcagcaaatgcgcacagatttgcaaggtttttgaggacgcatacaagtctcagttcagcatgataattcttgatgatatcgaaaggttactggagtatgtagccatcggaccacgtttttcaaacttgatctcacaaactcttctggtcctcctcaagagagttcctcctaagggaaaaaacttgcttgtcgttggaacaacaagcgaggttggcttcctagaatctgttggaatgtgtgacgtgttctctgtgacctaccatgttcccaaactgaaaaaggaggatgccaaaaaggtattgcatcatcttgatgtgttcgatgacggagatcttgacgcagcagcagaagcactggacgatatgccaatcaagaagttgtacacacttgttgagatggctgctcaggggccaaccggaggaagtgctgaagcgatttatgccggagagaagatagatatcaaccatttctttagcatcttgagtgatattatccgttactaagcccgcatggagccgaaatgaaccctataagtatccagtaggagtttgtttgcacccgtgcttcatcaaccatttctgtagattggtttgatctttgatgtgttgtttttgtttgatgcacctactagagctgttggattagatcagaggcgaattacacgatatatcatttttgtattgtatgacgatgtttatacagttcttaatgggatccagctttacacctcagaacaccgataattttcacattcctattagacccgcttgttttgttgaaattgaattctattttaataaatacgatttagagaaaactaa

SEQ ID NO: 40400 - DNA, 2857 bp, Zea Mays
gccagcagcggcggtgctcgaccttcaggcatcagagctgcgggacatcacacgcaccgctacgatctcctcctgcgagcgagatctcaccaccgcagcggcgccgcggccatggcgggaaggtatcaccaggatcagggcggggacgggggcgcgtccatggaggtagtcagcacgccgaaccaggagctggcccttaccaactgcgcatacgtctctcccgctgacctccgccgcttccccaacgggctcgccctcgtcgctgacgcctgggtcttcaccctacgtgaccacaatgctgttgcaagtggacgcattgccttgaatgctattcagcgtcggcaggcaaaggtttcagctggggattctgttactgttagcagttttgtcccccctgatgatttcaagttggctttgctcactttagatctagattatgccaaggcaagagccaaccgaaatgacgagctggatgctgttgtgcttgcccaacaactccgtaagaggtttctgaatcaggtcatgacctcagggcaaagggtgccatttgaattttatggaacaaactatgtattcaccgtcaatcaagctttgctagagggtcaagagagttctacaccattggatagaggattcttgtccagtgatacatacatcatatttgaggctgctcctaattcaggaattaaggtgatcaaccaaaaggaagctgctagcagcaagcttttcaaacataaagagtttaacctggaaaaattgggtataggtggattaagcgctgaattcactgacatatttcgtagggcattcgcttcaagagtctttccgcctcatgttgtcagtaagttgggcatcaaacatgttaagggtatattgctatatggacctcctggtactggcaagactctaatggccagacaaattggaaagttactgaatggaaaagatcccaagattgtgaatggacctgaagttctgagcaagtttgttggagaaactgagaagaatgtgagagatttgtttgctgatgctgaaaatgagcagagaacacgaggtgatcagagtgacctccatgttatcatattcgatgaaattgatgccatctgcaagtctagaggatctacccgtgatggtacaggtgtacatgatagcattgtaaaccagctgcttacaaagatggtgttgaggcgttgaataatgtattgcttattggaatgacgaatcgtaaagatttgcttgatgaagctttattgagacctggacgattggaagtacacattgagataaacctgcctgatgaaaatggtcgtttgcaaatccttcaaattcatacaaataagatgaaggagaattctttcctgtctccagatattaatcttcaggagctaggcaccctaaggcaaggatcaagggaaagcttagcaacccaaaaccagattccctcctcacccatgtgaaaagtgccagcaaacagcagctgcacacaaccacacatgattgtgccagttcagcaataacattacttatgcacattagcactcagttttacctttggaaattctttatgtatcaaatgacaactgagtttcttaacaaagctgcgcggacaaagaactacagtggagcagagttggaaggtgttgtcaaaagtgctgtctcatttgctttgaaccggcagataaccatggatgacctcactaaacctttggatgaggaaagcatcaaggttaccatggatgattttgtgaatgcacttcatgaaattacccctgcatttggtgcttccaccgatgatctcgaaagatgcagattgcgtggtattgttgattgtggcaaggcacataagcacatttatcaaagagctatgctcctcgtagagcaagttaaagttagcaaaggtagcccactcgtgacttgcctattggaaggtcctgctggaagtgggaaaacggctatggcagcaagtgttggcattgacagtgattttgcatatgtgaaaattatatcagcagaaacaatgattggtttcagtgaaagcagcaaatgcgcacagatttgcaaggtttttgaggacgcatacaagtctcagttcagcatgataattcttgatgatatcgaaaggttactggagtatgtagccatcggaccacgtttttcaaacttgatctcacaaactcttctggtcctcctcaagagagttcctcctaagggaaaaaacttgcttgtcgttggaacaacaagcgaggttggcttcctagaatctgttggaatgtgtgacgtgttctctgtgacctaccatgttcccaaactgaaaaaggaggatgccaaaaaggtattgcatcatcttgatgtgttcgatgacggagatcttgacgcagcagcagaagcactggacgatatgccaatcaagaagttgtacacacttgttgagatggctgctcaggggccaaccggaggaagtgctgaagcgatttatgccggagagaagatagatatcaaccatttctttagcatcttgagtgatattatccgttactaagcccgcatggagccgaaatgaaccctataagtatccagtaggagtttgtttgcacccgtgcttcatcaaccatttctgtagattggtttgatctttgatgtgttgtttttgtttgatgcacctactagagctgttggattagatcagaggcgaattacacgatatatcatttttgtattgtatgacgatgtttatacagttcttaatgggatccagctttacacctcagaacaccgataattttcacattcctattagacccgcttgttttgttgaaattgaattctattttaataaatacgatttagagaaaactaa

SEQ ID NO: 40401 - DNA, 2623 bp, Zea Mays
gccagcagcggcggtgctcgaccttcaggcatcagagctgcgggacatcacacgcaccgctacgatctcctcctgcgagcgagatctcaccaccgcagcggcgccgcggccatggcgggaaggtatcaccaggatcagggcggggacgggggcgcgtccatggaggtagtcagcacgccgaaccaggagctggcccttaccaactgcgcatacgtctctcccgctgacctccgccgcttccccaacgggctcgccctcgtcgctgacgcctgggtcttcaccctacgtgaccacaatgctgttgcaagtggacgcattgccttgaatgctattcagcgtcggcaggcaaaggtttcagctggggattctgttactgttagcagttttgtcccccctgatgatttcaagttggctttgctcactttagatctagattatgccaaggcaagagccaaccgaaatgacgagctggatgctgttgtgcttgcccaacaactccgtaagaggtttctgaatcaggtcatgacctcagggcaaagggtgccatttgaattttatggaacaaactatgtattcaccgtcaatcaagctttgctagagggtcaagagagttctacaccattggatagaggattcttgtccagtgatacatacatcatatttgaggctgctcctaattcaggaattaaggtgatcaaccaaaaggaagctgctagcagcaagcttttcaaacataaagagtttaacctggaaaaattgggtataggtggattaagcgctgaattcactgacatatttcgtagggcattcgcttcaagagtctttccgcctcatgttgtcagtaagttgggcatcaaacatgttaagggtatattgctatatggacctcctggtactggcaagactctaatggccagacaaattggaaagttactgaatggaaaagatcccaagattgtgaatggacctgaagttctgagcaagtttgttggagaaactgagaagaatgtgagagatttgtttgctgatgctgaaaatgagcagagaacacgaggtgatcagagtgacctccatgttatcatattcgatgaaattgatgccatctgcaagtctagaggatctacccgtgatggtacaggtgtacatgatagcattgtaaaccagctgcttacaaagatagatggtgttgaggcgttgaataatgtattgcttattggaatgacgaatcgtaaagatttgcttgatgaagctttattgagacctggacgattggaagtacacattgagataaacctgcctgatgaaaatggtcgtttgcaaatccttcaaattcatacaaataagatgaaggagaattctttcctgtctccagatattaatcttcaggagctagctgcgcggacaaagaactacagtggagcagagttggaaggtgttgtcaaaagtgctgtctcatttgctttgaaccggcagataaccatggatgacctcactaaacctttggatgaggaaagcatcaaggttaccatggatgattttgtgaatgcacttcatgaaattacccctgcatttggtgcttccaccgatgatctcgaaagatgcagattgcgtggtattgttgattgtggcaaggcacataagcacatttatcaaagagctatgctcctcgtagagcaagttaaagttagcaaaggtttactgctttagtgggaaaacggctatggcagcaagtgttggcattgacagtgattttgcatatgtgaaaattatatcagcagaaacaatgattggtttcagtgaaagcagcaaatgcgcacagatttgcaaggtttttgaggacgcatacaagtctcagttcagcatgataattcttgatgatatcgaaaggttactggagtatgtagccatcggaccacgtttttcaaacttgatctcacaaactcttctggtcctcctcaagagagttcctcctaagggaaaaaacttgcttgtcgttggaacaacaagcgaggttggcttcctagaatctgttggaatgtgtgacgtgttctctgtgacctaccatgttcccaaactgaaaaaggaggatgccaaaaaggtattgcatcatcttgatgtgttcgatgacggagatcttgacgcagcagcagaagcactggacgatatgccaatcaagaagttgtacacacttgttgagatggctgctcaggggccaaccggaggaagtgctgaagcgatttatgccggagagaagatagatatcaaccatttctttagcatcttgagtgatattatccgttactaagcccgcatggagccgaaatgaaccctataagtatccagtaggagtttgtttgcacccgtgcttcatcaaccatttctgtagattggtttgatctttgatgtgttgtttttgtttgatgcacctactagagctgttggattagatcagaggcgaattacacgatatatcatttttgtattgtatgacgatgtttatacagttcttaatgggatccagctttacacctcagaacaccgataattttcacattcctattagacccgcttgttttgttgaaattgaattctattttaataaatacgatttagagaaaactaa

SEQ ID NO: 40402 - DNA, 2883 bp, Zea Mays
gccagcagcggcggtgctcgaccttcaggcatcagagctgcgggacatcacacgcaccgctacgatctcctcctgcgagcgagatctcaccaccgcagcggcgccgcggccatggcgggaaggtatcaccaggatcagggcggggacgggggcgcgtccatggaggtagtcagcacgccgaaccaggagctggcccttaccaactgcgcatacgtctctcccgctgacctccgccgcttccccaacgggctcgccctcgtcgctgacgcctgggtcttcaccctacgatatccttttgtagacggtctctgaccacaatgctgttgcaagtggacgcattgccttgaatgctattcagcgtcggcaggcaaaggtttcagctggggattctgttactgttagcagttttgtcccccctgatgatttcaagttggctttgctcactttagatctagattatgccaaggcaagagccaaccgaaatgacgagctggatgctgttgtgcttgcccaacaactccgtaagaggtttctgaatcaggtcatgacctcagggcaaagggtgccatttgaattttatggaacaaactatgtattcaccgtcaatcaagctttgctagagggtcaagagagttctacaccattggatagaggattcttgtccagtgatacatacatcatatttgaggctgctcctaattcaggaattaaggtgatcaaccaaaaggaagctgctagcagcaagcttttcaaacataaagagtttaacctggaaaaattgggtataggtggattaagcgctgaattcactgacatatttcgtagggcattcgcttcaagagtctttccgcctcatgttgtcagtaagttgggcatcaaacatgttaagggtatattgctatatggacctcctggtactggcaagactctaatggccagacaaattggaaagttactgaatggaaaagatcccaagattgtgaatggacctgaagttctgagcaagtttgttggagaaactgagaagaatgtgagagatttgtttgctgatgctgaaaatgagcagagaacacgaggtgatcagagtgacctccatgttatcatattcgatgaaattgatgccatctgcaagtctagaggatctacccgtgatggtacaggtgtacatgatagcattgtaaaccagctgcttacaaagatagatggtgttgaggcgttgaataatgtattgcttattggaatgacgaatcgtaaagatttgcttgatgaagctttattgagacctggacgattggaagtacacattgagataaacctgcctgatgaaaatggtcgtttgcaaatccttcaaattcatacaaataagatgaaggagaattctttcctgtctccagatattaatcttcaggagctaggcaccctaaggcaaggatcaagggaaagcttagcaacccaaaaccagattccctcctcacccatgtgaaaagtgccagcaaacagcagctgcacacaaccacacatgattgtgccagttcagcaataacattacttatgcacattagcactcagttttacctttggaaattctttatgtatcaaatgacaactgagtttcttaacaaagctgcgcggacaaagaactacagtggagcagagttggaaggtgttgtcaaaagtgctgtctcatttgctttgaaccggcagataaccatggatgacctcactaaacctttggatgaggaaagcatcaaggttaccatggatgattttgtgaatgcacttcatgaaattacccctgcatttggtgcttccaccgatgatctcgaaagatgcagattgcgtggtattgttgattgtggcaaggcacataagcacatttatcaaagagctatgctcctcgtagagcaagttaaagttagcaaaggtagcccactcgtgacttgcctattggaaggtcctgctggaagtgggaaaacggctatggcagcaagtgttggcattgacagtgattttgcatatgtgaaaattatatcagcagaaacaatgattggtttcagtgaaagcagcaaatgcgcacagatttgcaaggtttttgaggacgcatacaagtctcagttcagcatgataattcttgatgatatcgaaaggttactggagtatgtagccatcggaccacgtttttcaaacttgatctcacaaactcttctggtcctcctcaagagagttcctcctaagggaaaaaacttgcttgtcgttggaacaacaagcgaggttggcttcctagaatctgttggaatgtgtgacgtgttctctgtgacctaccatgttcccaaactgaaaaaggaggatgccaaaaaggtattgcatcatcttgatgtgttcgatgacggagatcttgacgcagcagcagaagcactggacgatatgccaatcaagaagttgtacacacttgttgagatggctgctcaggggccaaccggaggaagtgctgaagcgatttatgccggagagaagatagatatcaaccatttctttagcatcttgagtgatattatccgttactaagcccgcatggagccgaaatgaaccctataagtatccagtaggagtttgtttgcacccgtgcttcatcaaccatttctgtagattggtttgatctttgatgtgttgtttttgtttgatgcacctactagagctgttggattagatcagaggcgaattacacgatatatcatttttgtattgtatgacgatgtttatacagttcttaatgggatccagctttacacctcagaacaccgataattttcacattcctattagacccgcttgttttgttgaaattgaattctattttaataaatacgatttagagaaaactaa

SEQ ID NO: 40403 - DNA, 3252 bp, Zea Mays
gccagcagcggcggtgctcgaccttcaggcatcagagctgcgggacatcacacgcaccgctacgatctcctcctgcgagcgagatctcaccaccgcagcggcgccgcggccatggcgggaaggtatcaccaggatcagggcggggacgggggcgcgtccatggaggtagtcagcacgccgaaccaggagctggcccttaccaactgcgcatacgtctctcccgctgacctccgccgcttccccaacgggctcgccctcgtcgctgacgcctgggtcttcaccctacgtgaccacaatgctgttgcaagtggacgcattgccttgaatgctattcagcgtcggcaggcaaaggtttcagctggggattctgttactgttagcagttttgtcccccctgatgatttcaagttggctttgctcactttagatctagattatgccaaggcaagagccaaccgaaatgacgagctggatgctgttgtgcttgcccaacaactccgtaagaggtttctgaatcaggtcatgacctcagggcaaagggtgccatttgaattttatggaacaaactatgtattcaccgtcaatcaagctttgctagagggtcaagagagttctacaccattggatagaggattcttgtccagtgatacatacatcatatttgaggctgctcctaattcaggaattaaggtgatcaaccaaaaggaagctgctagcagcaagcttttcaaacataaagagtttaacctggaaaaattgggtataggtggattaagcgctgaattcactgacatatttcgtagggcattcgcttcaagagtctttccgcctcatgttgtcagtaagttgggcatcaaacatgttaagggtatattgctatatggacctcctggtactggcaagactctaatggccagacaaattggaaagttactgaatggaaaagatcccaagattgtgaatggacctgaagttctgagcaagtttgttggagaaactgagaagaatgtgagagatttgtttgctgatgctgaaaatgagcagagaacacgaggtgatcagagtgacctccatgttatcatattcgatgaaattgatgccatctgcaagtctagaggatctacccgtgatggtacaggtgtacatgatagcattgtaaaccagctgcttacaaagatagatggtgttgaggcgttgaataatgtattgcttattggaatgacgaatcgtaaagatttgcttgatgaagctttattgagacctggacgattggaagtacacattgagataaacctgcctgatgaaaatggtcgtttgcaaatccttcaaattcatacaaataagatgaaggagaattctttcctgtctccagatattaatcttcaggagctaggtctgcctctctttttttttggcaaattgatatactttcaggcattgcatttatagcaaaggtttccattatttttcatagcatggacccctaactaagttagctctggctgaatcatgctagttctattgattaaattgtaatattttggaaattttgctttgaaagatttactgttgtaatccttgcattgtactgattactgaatagtaggcattctttcgtttttctttggcttactaggtatgctgaatgacagataatagcagcagacatttgaagttgtctagcagcaaatgttaggagtaggtttttcttgtgtaacgaatcgtgtcggttatcaaactgaccacccatgtactataaataggcaccctaaggcaaggatcaagggaaagcttagcaacccaaaaccagattccctcctcacccatgtgaaaagtgccagcaaacagcagctgcacacaaccacacatgattgtgccagttcagcaataacattacttatgcacattagcactcagttttacctttggaaattctttatgtatcaaatgacaactgagtttcttaacaaagctgcgcggacaaagaactacagtggagcagagttggaaggtgttgtcaaaagtgctgtctcatttgctttgaaccggcagataaccatggatgacctcactaaacctttggatgaggaaagcatcaaggttaccatggatgattttgtgaatgcacttcatgaaattacccctgcatttggtgcttccaccgatgatctcgaaagatgcagattgcgtggtattgttgattgtggcaaggcacataagcacatttatcaaagagctatgctcctcgtagagcaagttaaagttagcaaaggtagcccactcgtgacttgcctattggaaggtcctgctggaagtgggaaaacggctatggcagcaagtgttggcattgacagtgattttgcatatgtgaaaattatatcagcagaaacaatgattggtttcagtgaaagcagcaaatgcgcacagatttgcaaggtttttgaggacgcatacaagtctcagttcagcatgataattcttgatgatatcgaaagtattcttgtatgattttgtaggttactggagtatgtagccatcggaccacgtttttcaaacttgatctcacaaactcttctggtcctcctcaagagagttcctcctaagggaaaaaacttgcttgtcgttggaacaacaagcgaggttggcttcctagaatctgttggaatgtgtgacgtgttctctgtgacctaccatgttcccaaactgaaaaaggaggatgccaaaaaggtattgcatcatcttgatgtgttcgatgacggagatcttgacgcagcagcagaagcactggacgatatgccaatcaagaagttgtacacacttgttgagatggctgctcaggggccaaccggaggaagtgctgaagcgatttatgccggagagaagatagatatcaaccatttctttagcatcttgagtgatattatccgttactaagcccgcatggagccgaaatgaaccctataagtatccagtaggagtttgtttgcacccgtgcttcatcaaccatttctgtagattggtttgatctttgatgtgttgtttttgtttgatgcacctactagagctgttggattagatcagaggcgaattacacgatatatcatttttgtattgtatgacgatgtttatacagttcttaatgggatccagctttacacctcagaacaccgataattttcacattcctattagacccgcttgttttgttgaaattgaattctattttaataaatacgatttagagaaaactaa

SEQ ID NO: 40404 - DNA, 2572 bp, Zea Mays
gccagcagcggcggtgctcgaccttcaggcatcagagctgcgggacatcacacgcaccgctacgatctcctcctgcgagcgagatctcaccaccgcagcggcgccgcggccatggcgggaaggtatcaccaggatcagggcggggacgggggcgcgtccatggaggtagtcagcacgccgaaccaggagctggcccttaccaactgcgcatacgtctctcccgctgacctccgccgcttccccaacgggctcgccctcgtcgctgacgcctgggtcttcaccctacgtgaccacaatgctgttgcaagtggacgcattgccttgaatgctattcagcgtcggcaggcaaaggtttcagctggggattctgttactgttagcagttttgtcccccctgatgatttcaagttggctttgctcactttagatctagattatgccaaggcaagagccaaccgaaatgacgagctggatgctgttgtgcttgcccaacaactccgtaagaggtttctgaatcaggtcatgacctcagggcaaagggtgccatttgaattttatggaacaaactatgtattcaccgtcaatcaagctttgctagagggtcaagagagttctacaccattggatagaggattcttgtccagtgatacatacatcatatttgaggctgctcctaattcaggaattaaggtgatcaaccaaaaggaagctgctagcagcaagcttttcaaacataaagagtttaacctggaaaaattgggtataggtggattaagcgctgaattcactgacatatttcgtagggcattcgcttcaagagtctttccgcctcatgttgtcagtaagttgggcatcaaacatgttaagggtatattgctatatggacctcctggtactggcaagactctaatggccagacaaattggaaagttactgaatggaaaagatcccaagattgtgaatggacctgaagttctgagcaagtttgttggagaaactgagaagaatgtgagagatttgtttgctgatgctgaaaatgagcagagaacacgaggtgatcagagtgacctccatgttatcatattcgatgaaattgatgccatctgcaagtctagaggatctacccgtgatggtacaggtgtacatgatagcattgtaaaccagctgcttacaaagatagatggtgttgaggcgttgaataatgtattgcttattggaatgacgaatcgtaaagatttgcttgatgaagctttattgagacctggacgattggaagtacacattgagataaacctgcctgatgaaaatggtcgtttgcaaatccttcaaattcatacaaataagatgaaggagaattctttcctgtctccagatattaatcttcaggagctagataaccatggatgacctcactaaacctttggatgaggaaagcatcaaggttaccatggatgattttgtgaatgcacttcatgaaattacccctgcatttggtgcttccaccgatgatctcgaaagatgcagattgcgtggtattgttgattgtggcaaggcacataagcacatttatcaaagagctatgctcctcgtagagcaagttaaagttagcaaaggtagcccactcgtgacttgcctattggaaggtcctgctggaagtgggaaaacggctatggcagcaagtgttggcattgacagtgattttgcatatgtgaaaattatatcagcagaaacaatgattggtttcagtgaaagcagcaaatgcgcacagatttgcaaggtttttgaggacgcatacaagtctcagttcagcatgataattcttgatgatatcgaaaggttactggagtatgtagccatcggaccacgtttttcaaacttgatctcacaaactcttctggtcctcctcaagagagttcctcctaagggaaaaaacttgcttgtcgttggaacaacaagcgaggttggcttcctagaatctgttggaatgtgtgacgtgttctctgtgacctaccatgttcccaaactgaaaaaggaggatgccaaaaaggtattgcatcatcttgatgtgttcgatgacggagatcttgacgcagcagcagaagcactggacgatatgccaatcaagaagttgtacacacttgttgagatggctgctcaggggccaaccggaggaagtgctgaagcgatttatgccggagagaagatagatatcaaccatttctttagcatcttgagtgatattatccgttactaagcccgcatggagccgaaatgaaccctataagtatccagtaggagtttgtttgcacccgtgcttcatcaaccatttctgtagattggtttgatctttgatgtgttgtttttgtttgatgcacctactagagctgttggattagatcagaggcgaattacacgatatatcatttttgtattgtatgacgatgtttatacagttcttaatgggatccagctttacacctcagaacaccgataattttcacattcctattagacccgcttgttttgttgaaattgaattctattttaataaatacgatttagagaaaactaa

SEQ ID NO: 40405 - DNA, 2638 bp, Zea Mays
gccagcagcggcggtgctcgaccttcaggcatcagagctgcgggacatcacacgcaccgctacgatctcctcctgcgagcgagatctcaccaccgcagcggcgccgcggccatggcgggaaggtatcaccaggatcagggcggggacgggggcgcgtccatggaggtagtcagcacgccgaaccaggagctggcccttaccaactgcgcatacgtctctcccgctgacctccgccgcttccccaacgggctcgccctcgtcgctgacgcctgggtcttcaccctacgtgaccacaatgctgttgcaagtggacgcattgccttgaatgctattcagcgtcggcaggcaaaggtttcagctggggattctgttactgttagcagttttgtcccccctgatgatttcaagttggctttgctcactttagatctagattatgccaaggcaagagccaaccgaaatgacgagctggatgctgttgtgcttgcccaacaactccgtaagaggtttctgaatcaggtcatgacctcagggcaaagggtgccatttgaattttatggaacaaactatgtattcaccgtcaatcaagctttgctagagggtcaagagagttctacaccattggatagaggattcttgtccagtgatacatacatcatatttgaggctgctcctaattcaggaattaaggtgatcaaccaaaaggaagctgctagcagcaagcttttcaaacataaagagtttaacctggaaaaattgggtataggtggattaagcgctgaattcactgacatatttcgtagggcattcgcttcaagagtctttccgcctcatgttgtcagtaagttgggcatcaaacatgttaagggtatattgctatatggacctcctggtactggcaagactctaatggccagacaaattggaaagttactgaatggaaaagatcccaagattgtgaatggacctgaagttctgagcaagtttgttggagaaactgagaagaatgtgagagatttgtttgctgatgctgaaaatgagcagagaacacgaggtgatcagagtgacctccatgttatcatattcgatgaaattgatgccatctgcaagtctagaggatctacccgtgatggtacaggtgtacatgatagcattgtaaaccagctgcttacaaagatagatggtgttgaggcgttgaataatgtattgcttattggaatgacgaatcgtaaagatttgcttgatgaagctttattgagacctggacgattggaagtacacattgagataaacctgcctgatgaaaatggtcgtttgcaaatccttcaaattcatacaaataagatgaaggagaattctttcctgtctccagatattaatcttcaggagctagaactacagtggagcagagttggaaggtgttgtcaaaagtgctgtctcatttgctttgaaccggcagataaccatggatgacctcactaaacctttggatgaggaaagcatcaaggttaccatggatgattttgtgaatgcacttcatgaaattacccctgcatttggtgcttccaccgatgatctcgaaagatgcagattgcgtggtattgttgattgtggcaaggcacataagcacatttatcaaagagctatgctcctcgtagagcaagttaaagttagcaaaggtagcccactcgtgacttgcctattggaaggtcctgctggaagtgggaaaacggctatggcagcaagtgttggcattgacagtgattttgcatatgtgaaaattatatcagcagaaacaatgattggtttcagtgaaagcagcaaatgcgcacagatttgcaaggtttttgaggacgcatacaagtctcagttcagcatgataattcttgatgatatcgaaaggttactggagtatgtagccatcggaccacgtttttcaaacttgatctcacaaactcttctggtcctcctcaagagagttcctcctaagggaaaaaacttgcttgtcgttggaacaacaagcgaggttggcttcctagaatctgttggaatgtgtgacgtgttctctgtgacctaccatgttcccaaactgaaaaaggaggatgccaaaaaggtattgcatcatcttgatgtgttcgatgacggagatcttgacgcagcagcagaagcactggacgatatgccaatcaagaagttgtacacacttgttgagatggctgctcaggggccaaccggaggaagtgctgaagcgatttatgccggagagaagatagatatcaaccatttctttagcatcttgagtgatattatccgttactaagcccgcatggagccgaaatgaaccctataagtatccagtaggagtttgtttgcacccgtgcttcatcaaccatttctgtagattggtttgatctttgatgtgttgtttttgtttgatgcacctactagagctgttggattagatcagaggcgaattacacgatatatcatttttgtattgtatgacgatgtttatacagttcttaatgggatccagctttacacctcagaacaccgataattttcacattcctattagacccgcttgttttgttgaaattgaattctattttaataaatacgatttagagaaaactaa

SEQ ID NO: 40406 - DNA, 3010 bp, Zea Mays
gccagcagcggcggtgctcgaccttcaggcatcagagctgcgggacatcacacgcaccgctacgatctcctcctgcgagcgagatctcaccaccgcagcggcgccgcggccatggcgggaaggtatcaccaggatcagggcggggacgggggcgcgtccatggaggtagtcagcacgccgaaccaggagctggcccttaccaactgcgcatacgtctctcccgctgacctccgccgcttccccaacgggctcgccctcgtcgctgacgcctgggtcttcaccctacgatatccttttgtagacggtctctgaccacaatgctgttgcaagtggacgcattgccttgaatgctattcagcgtcggcaggcaaaggtttcagctggggattctgttactgttagcagttttgtcccccctgatgatttcaagttggctttgctcactttagatctagattatgccaaggcaagagccaaccgaaatgacgagctggatgctgttgtgcttgcccaacaactccgtaagaggtttctgaatcaggtcatgacctcagggcaaagggtgccatttgaattttatggaacaaactatgtattcaccgtcaatcaagctttgctagagggtcaagagagttctacaccattggatagaggattcttgtccagtgatacatacatcatatttgaggctgctcctaattcaggaattaaggtgatcaaccaaaaggaagctgctagcagcaagcttttcaaacataaagagtttaacctggaaaaattgggtataggtggattaagcgctgaattcactgacatatttcgtagggcattcgcttcaagagtctttccgcctcatgttgtcagtaagttgggcatcaaacatgttaagggtatattgctatatggacctcctggtactggcaagactctaatggccagacaaattggaaagttactgaatggaaaagatcccaagattgtgaatggacctgaagttctgagcaagtttgttggagaaactgagaagaatgtgagagatttgtttgctgatgctgaaaatgagcagagaacacgaggtgatcagagtgacctccatgttatcatattcgatgaaattgatgccatctgcaagtctagaggatctacccgtgatggtacaggtgtacatgatagcattgtaaaccagctgcttacaaagatagatggtgttgaggcgttgaataatgtattgcttattggaatgacgaatcgtaaagatttgcttgatgaagctttattgagacctggacgattggaagtacacattgagataaacctgcctgatgaaaatggtcgtttgcaaatccttcaaattcatacaaataagatgaaggagaattctttcctgtctccagatattaatcttcaggagctaggtatgctgaatgacagataatagcagcagacatttgaagttgtctagcagcaaatgttaggagtaggtttttcttgtgtaacgaatcgtgtcggttatcaaactgaccacccatgtactataaataggcaccctaaggcaaggatcaagggaaagcttagcaacccaaaaccagattccctcctcacccatgtgaaaagtgccagcaaacagcagctgcacacaaccacacatgattgtgccagttcagcaataacattacttatgcacattagcactcagttttacctttggaaattctttatgtatcaaatgacaactgagtttcttaacaaagctgcgcggacaaagaactacagtggagcagagttggaaggtgttgtcaaaagtgctgtctcatttgctttgaaccggcagataaccatggatgacctcactaaacctttggatgaggaaagcatcaaggttaccatggatgattttgtgaatgcacttcatgaaattacccctgcatttggtgcttccaccgatgatctcgaaagatgcagattgcgtggtattgttgattgtggcaaggcacataagcacatttatcaaagagctatgctcctcgtagagcaagttaaagttagcaaaggtagcccactcgtgacttgcctattggaaggtcctgctggaagtgggaaaacggctatggcagcaagtgttggcattgacagtgattttgcatatgtgaaaattatatcagcagaaacaatgattggtttcagtgaaagcagcaaatgcgcacagatttgcaaggtttttgaggacgcatacaagtctcagttcagcatgataattcttgatgatatcgaaaggttactggagtatgtagccatcggaccacgtttttcaaacttgatctcacaaactcttctggtcctcctcaagagagttcctcctaagggaaaaaacttgcttgtcgttggaacaacaagcgaggttggcttcctagaatctgttggaatgtgtgacgtgttctctgtgacctaccatgttcccaaactgaaaaaggaggatgccaaaaaggtattgcatcatcttgatgtgttcgatgacggagatcttgacgcagcagcagaagcactggacgatatgccaatcaagaagttgtacacacttgttgagatggctgctcaggggccaaccggaggaagtgctgaagcgatttatgccggagagaagatagatatcaaccatttctttagcatcttgagtgatattatccgttactaagcccgcatggagccgaaatgaaccctataagtatccagtaggagtttgtttgcacccgtgcttcatcaaccatttctgtagattggtttgatctttgatgtgttgtttttgtttgatgcacctactagagctgttggattagatcagaggcgaattacacgatatatcatttttgtattgtatgacgatgtttatacagttcttaatgggatccagctttacacctcagaacaccgataattttcacattcctattagacccgcttgttttgttgaaattgaattctattttaataaatacgatttagagaaaactaa

SEQ ID NO: 40407 - DNA, 3304 bp, Zea Mays
tcgactgacccgttcttccccgaggggcgaggaggagtgtccatgaccggagcctgacgcgcctacagagggagaaaggagggggaatacccggcccggtccagatctctcagaccgaagcgctggacaaggggccgatggcttcggcggctgcagcggtgatcccggacggccggcgatggagcaaaggtccgggctcctcgtcgtcgccggtgacaacggccattttcctcttcttcttcgttgtcgtggtcggcgtcctcgtgtccgcccgctggatcaccaccacgactcatctgtcgaccaccaatctggatcagtggagctcaaagctggtaggctatcttaaccgcgacgcacaccacctcctccatcccggccatccccgcggcaccgccgccgcctcggccgacctactccctctcctgcccggcgccgccgcttcaccgtgacccgaccatccccagcaacatctcccagaccctcgacctcgtgctctcccccaacgcctcctccgcctccacttgcgccgcctttcccgaccccccgccgctccctgccaactccaacgcctcctccacctgccccgcctacttccgcttcatccacgaggacctccacccatggcgcgccgctgggggcatcacccgcgccatggtcgaccgcgcgcgcgccaccgccaacttccgcctcgtcgtcatccggggccgcgcgtacatcgagcgcatcgcgccggcattccagacgcgcgacctcttcaccatctggggcattctgcagctgctccggcgctaccccggccgcgtccctgacctcgacctcatgtttgactgcgtcgactggcccgtcgtgcacgccgaccagtaccagggggagaacgccacgctattgccgccgctcttcaggtactgcggcgacaacgagacgctagatgttgtcttcccagactggtcattctggggctggcctgagatcaacataaaaccgtgggatgctctgcagaaggaattgaatggtggaaacaagagggtgaaatggttggctagagaaccttatgcttattggaaagggaatccagatgttgcagttacaaggcaggagcttgttaagtgtaacgtctccagtaagcatgaatggaatgcaaggatttacaaacaggattggctcaaagagatcaaggcaggatacaaacagtcagatttggctagtcaatgcactcataggtacaagatttatattgaaggatcagcatggtcagtcagtgagaagtatattctagcttgtgattccatgacactagttgttacaccaaaatactatgatttttattcaagggtgctgatgcccatgcaacattattggccaatttgggatgacaataagtgtagctccataaagtttgctgttgattggggcaactctcacaagcagaaggtatcttttcgtgtacacctttattatatcattaagaagggcaggcctagtgcagcggtgagagcactgagtcatcagataacgggttcgaagtagcttgtccgcatttgagggatggggagcttgactcagtttatcactttctcagatcccactcatatgggagcctctggcattgggtctgccccctttattatattagtaacaaagcttcactgttttatttgttttgagtcaggtcccatatatcagtcacagatgtaaatgaacctcataacaagagagaactttctaatacagatattataagagagtaatacatttattataagtcttcaaaaagtatagctaggactgtacagcattgtactagtagtagaaaggacaaaaggttggttaaatacgacagtggagtcaggatggttgagaatttcttttgtttccaaaacaaatgtcaccaggtactacaatgtgcaaaataatgagttaaaagaagtgtgctttgtttgattaggcacctaccataaggtaaagagattggttagacaatgttagttgttagtgtaacaaagcttcactacagaaagtatcttacctatttgcatgaatgatggaatacattggttatatggtgcattgtgctgtatgcactcaggagatatttctagtgtcacctataataatcaaactaacatgacatatatcatgctcagcatatttctaggaagcttttgccagacaaactttttagcctgtaatattaggcagattcatattttaatagaagttcctcaagcagtatataagactcctttttctcctttgtagtatatgctatagctgaatgttctgtgctttaaccagagcataagtgtagaaaataactgttgaaatgacttgtgggtagtgagtcatcaatttgaatactcgtctacttttctaatccaattctccttgacctttcacaaataataacatagtggagtaaatagtgccccttttcttctatagagaatgttttcttacgtacatttgtaaatgttttgcatgttttattaatgaccgtgtacatttgtaaatgttttgcatgttttattaatgaccatatccacgtattgcacttcaaatataggcacagaggataggaaagcaaggaagcaactttattcaaaaagagctcagcatggaatatgtatatgattacatgtttcacctcttaactgagtatgccaagctcctaaggttcaagccaagaaaaccacctgaagctattgaggtctgtcctgaatctctggcttgccaagctataggccgcgagaagaagttcatggaggactccatggtgagatccgccagcgatgctggcccatgtgacctgcctcctcctttcagtcctgaggaattcaaagcactgcgacgtaggagagagaaggcaatgaagcggatcgaaacatgggtgcaaaaaacttcgaggcccatggttagcaagccctgagagagcttcatgcttttccctccccaatagatacatacccaatttttgtcgtgctaataacccaaggcatttcttatctgtttgaatcaaatgtgtgattctgcagaagttatagatggtttcagttctccagatcttatcagtattcttctatttgtcttgtggcttgtatttttcgatactctctgctttagctgtaggatgtagcgatattgcttagtgacccgactttagagtgagagtaaagaatgtgtttgtctagagccagttgaggggagggtttagatagagggattccaggacattttgtttggttggtgggacgagaaatgcggttttaggggcacgtttggtctgtggctcttgatgagaaag

SEQ ID NO: 40408 - DNA, 3270 bp, Zea Mays
ggaggagtgtccatgaccggagcctgacgcgcctacagagggagaaaggagggggaatacccggcccggtccagatctctcagaccgaagcgctggacaaggggccgatggcttcggcggctgcagcggtgatcccggacggccggcgatggagcaaaggtccgggctcctcgtcgtcgccggtgacaacggccattttcctcttcttcttcgttgtcgtggtcggcgtcctcgtgtccgcccgctggatcaccaccacgactcatctgtcgaccaccaatctggatcagtggagctcaaagctggctatcttaaccgcgacgcacaccacctcctccatcccggccatccccgcggcaccgccgccgcctcggccgacctactccctctcctgcccggcgccgccgcttcaccgtgacccgaccatccccagcaacatctcccagaccctcgacctcgtgctctcccccaacgcctcctccgcctccacttgcgccgcctttcccgaccccccgccgctccctgccaactccaacgcctcctccacctgccccgcctacttccgcttcatccacgaggacctccacccatggcgcgccgctgggggcatcacccgcgccatggtcgaccgcgcgcgcgccaccgccaacttccgcctcgtcgtcatccggggccgcgcgtacatcgagcgcatcgcgccggcattccagacgcgcgacctcttcaccatctggggcattctgcagctgctccggcgctaccccggccgcgtccctgacctcgacctcatgtttgactgcgtcgactggcccgtcgtgcacgccgaccagtaccagggggagaacgccacgctattgccgccgctcttcaggtactgcggcgacaacgagacgctagatgttgtcttcccagactggtcattctggggctggcctgagatcaacataaaaccgtgggatgctctgcagaaggaattgaatggtggaaacaagagggtgaaatggttggctagagaaccttatgcttattggaaagggaatccagatgttgcagttacaaggcaggagcttgttaagtgtaacgtctccagtaagcatgaatggaatgcaaggatttacaaacaggattggctcaaagagatcaaggcaggatacaaacagtcagatttggctagtcaatgcactcataggtacaagatttatattgaaggatcagcatggtcagtcagtgagaagtatattctagcttgtgattccatgacactagttgttacaccaaaatactatgatttttattcaagggtgctgatgcccatgcaacattattggccaatttgggatgacaataagtgtagctccataaagtttgctgttgattggggcaactctcacaagcagaaggtatcttttcgtgtacacctttattatatcattaagaagggcaggcctagtgcagcggtgagagcactgagtcatcagataacgggttcgaagtagcttgtccgcatttgagggatggggagcttgactcagtttatcactttctcagatcccactcatatgggagcctctggcattgggtctgccccctttattatattagtaacaaagcttcactgttttatttgttttgagtcaggtcccatatatcagtcacagatgtaaatgaacctcataacaagagagaactttctaatacagatattataagagagtaatacatttattataagtcttcaaaaagtatagctaggactgtacagcattgtactagtagtagaaaggacaaaaggttggttaaatacgacagtggagtcaggatggttgagaatttcttttgtttccaaaacaaatgtcaccaggtactacaatgtgcaaaataatgagttaaaagaagtgtgctttgtttgattaggcacctaccataaggtaaagagattggttagacaatgttagttgttagtgtaacaaagcttcactacagaaagtatcttacctatttgcatgaatgatggaatacattggttatatggtgcattgtgctgtatgcactcaggagatatttctagtgtcacctataataatcaaactaacatgacatatatcatgctcagcatatttctaggaagcttttgccagacaaactttttagcctgtaatattaggcagattcatattttaatagaagttcctcaagcagtatataagactcctttttctcctttgtagtatatgctatagctgaatgttctgtgctttaaccagagcataagtgtagaaaataactgttgaaatgacttgtgggtagtgagtcatcaatttgaatactcgtctacttttctaatccaattctccttgacctttcacaaataataacatagtggagtaaatagtgccccttttcttctatagagaatgttttcttacgtacatttgtaaatgttttgcatgttttattaatgaccgtgtacatttgtaaatgttttgcatgttttattaatgaccatatccacgtattgcacttcaaatataggcacagaggataggaaagcaaggaagcaactttattcaaaaagagctcagcatggaatatgtatatgattacatgtttcacctcttaactgagtatgccaagctcctaaggttcaagccaagaaaaccacctgaagctattgaggtctgtcctgaatctctggcttgccaagctataggccgcgagaagaagttcatggaggactccatggtgagatccgccagcgatgctggcccatgtgacctgcctcctcctttcagtcctgaggaattcaaagcactgcgacgtaggagagagaaggcaatgaagcggatcgaaacatgggtgcaaaaaacttcgaggcccatggttagcaagccctgagagagcttcatgcttttccctccccaatagatacatacccaatttttgtcgtgctaataacccaaggcatttcttatctgtttgaatcaaatgtgtgattctgcagaagttatagatggtttcagttctccagatcttatcagtattcttctatttgtcttgtggcttgtatttttcgatactctctgctttagctgtaggatgtagcgatattgcttagtgacccgactttagagtgagagtaaagaatgtgtttgtctagagccagttgaggggagggtttagatagagggattccaggacattttgtttggttggtgggacgagaaatgcggttttaggggcacgtttggtctgtggctcttgatgagaaag

SEQ ID NO: 40409 - DNA, 1487 bp, Zea Mays
ctcgtcgacacggcagcgatcgtcgctgacgctggctcatatcaaagttgacattgccattgctgcccatcccaaaaaggaattgcttttggtcgtgatgccgcacaacacaactgcacaagaatctctgatgcgagtagcacagcaccaagcgtccttaagatcgatcgatcgatcgatcgcatgtcctagctactagcctagcagctagcactgttgtgtctaagctcaagcacagtctcaaggctccaactatgcacctgctcatcagcggcctcgtcgcggccgcactcttcctccacgtcgacgccgcgcggggcacgttcgtgtacgcagggtgctcgccgtccaggtacgcgcccaacacggccttcgagagcaacctcaactccctcctgtcctccatggctcccaccgcgtcctccggcgccacctacagcaccttcaccgcccctggcgccggcctggcggaggccgagtcccccgccgcctacggcctgtaccagtgccgcggcggcctgcgccccggcgagtgcgtggcgtgcgtgcgcgacacggtggcgcggatcggcgcggtgtgcgccggcgcggccgcggcgtcgctgcagtcggacgggtgctacgtgcgctacggcggcgcctccgcggcgtaccacagctgcggcgccggcaccagcggggacccctggttcctgaggtcccgcgacgccgtcctgtcggagctgcagggcgtggacgccaccgcggcctcgggctcgggctcgggcgggtacaaggtgagcgcctcgggccccgtgcggggcgccgcgcagtgcctcggcggcatcgcggcgggcgactgcgccgcgtgcctggcgcaggcggcggcgcagctccgcggcacgtgcggcgccgcgctcgccgccgacgtgtacctggtgcagtgctccgtgaggtactggaccgacggcgccaaccagctccggtcgtcgcaagataatccggaggatgacgctgggaggacactggcaatagcaattggtatctcggccggggtagcagcactcgtagtgttcatctctttcctcagaaaagcatgctcaagctagctacccccacaaggcagagatgaagaagggctcgcaccgaccgcgcgcagcagtcgctaacaatttttatcgtcttcgtgaaaagcacgacggccgtcgagctcgtaccgtaactacagctatcgtcacattgattttgccggggatagagaattagagattcactacctgcttgggctctttaagctgtccgagcagcggtgtctgtttatcagtcttttaaacttatagtgttgtgccgtcttagttcctaaactcttaggtcccgtttttttcttttcattttgaggaattgaaatcttactagtggaataggctatttttttagaatgtggcattccaccactttccaaagttatcatataagtttatctcaaattcatggggtgagagatggaa

SEQ ID NO: 40410 - DNA, 2496 bp, Zea Mays
tttttttaaaaaggttcgtttgcacgatttgcagtaatggttggtttccatcgaagatggaaacacacacagtgcaggccgtgatccgatggaaacacacacagtgcaggccgtgatcatcggatcgtccttccgtagccttccgtgaccgtgatccctcatccctgatcagctacttcgtacaggaaccttccagaactcttgagaactgggatccaacgcagctgggctcctctcggttttataaaaatctcaacagggtttcgttttttcgccttaatccccatcaaaccccaagcgcgcacccatcttctggcctttccagccgccaagccttctagaagcttcaagagctcgattcgatcggaaccctcgccatggccgacgaggcgaaggcgaagggtaacgcggcgttctcggccggccgcttcgaggaggcggcgcggcacttcacggacgccatcgcgcttgccccagacaaccacgtcctctactccaaccggtcggcggcgctcgcctcgctccaccgctactccgatgctctcgccgacgcgcagaagaccgtcgacctcaagcccgactgggccaagggctactcccgcctcggcgcggcgcacctcggcctcggcgacgcggccagcgccgtcgccgcctacgagaagggcctcgagctcgaccccagcaacgagggcctcaaagcggggctccaggacgccaagaaagccgccgccgcccctccgcgccgcgggtcgtccggccccgacgccatcggccagatgttccagggccccgagctgtggagcaagatcgcgtccgacccctccacgcgcgcctaccttaacgagcccgattttatgcatatgatgcgcgaagtgcagaggaaccccagcagcatcagtatgtatctctccgatccccgcatgatgcaggtgctcagcctcatgcttaatgtcaagatccagagacccgaggcctccgagccgtcgcagtctaccccgccgccgccgaagcagcagcagcagcagcagacgccgccttctgagacgaaggctagggatgtggagcccgagcccgaggcagagccgatggatttgactgatgaggaaaaggaccgcaagcagacgaaagctgctgctcagaaagagaaggagttaggtaacgcagcttacaagaagaaggacttcgaggtggcaatccagcattacaccaaagccttggaacttgacgacgaggatatttcctatctgactaaccgagcagcagtctacattgagatgggaaagtacgatgaatgcatcaaggactgtgataaggctgtggagaggggaagagaacttcgtgctgatttcaagatgatttcaagggcactgacaagaaaaggaacagctctggtcaaacttgctaagacctctaaggattttgatattgctatcgagaccttccagaaggctctgactgagcatcggaacccagacactcttaaaaagttaaatgaggctgagaaagcaaagaaagagttagagcaacaagagtattatgatccaaaattggcagatgaggagagagagaaaggcaatgagttcttcaaggagcaaaaatacccagaagcaataaaacactacacagaggctctcaagagaaacccgaaggatcctagggtttatagcaatagggccgcctgctacaccaagttaggagccatgcctgaaggtcttaaagacgcagaaaagtgtcttgaacttgaccccaccttcaccaaagggtatacgaggaaaggtgcaattcagttcttcatgaaagaatatgacaaggccgtggaaacctaccaggctggcttgaagcatgacccgaacaaccaggaactgcttgatggtgttaagaggtgtgttgaacagatcaacaaggccaacagaggtgaaataagccaggacgaattgcaagaaagacagaacaaagctatgcaagacccagagatccagaacattcttaccgaccctatcatgcgacaggttctaatagatttccaggagaacccaagtgcggcccaggagcacctgaagaaccccggggttatgcagaagattcagaagcttgtaagtgctgggatagttcagatgagatgatcgagcgatgcgatgattggctttgttcgttcacgtgcaccctggtcatacatatgttttaacaagcagcagcggcataagaatgaacctgttcgggggctaatcttattccttttggattggctgcctcactgctcgttacccgtttgatttgaatttgaggcttgaggacttggttaaagccacacctccctccagtcaaactgaatgtaggcattttcgaagaagcatacagaaatttcattggaatctagggtggtcgactgtcgagggagcgtcttattcctatgaaatttctgctttattttataaaatttctactttctaaattgacccttcgttattgaaagctcgattgaaggattattttctg

SEQ ID NO: 40411 - DNA, 2373 bp, Zea Mays
tttttttaaaaaggttcgtttgcacgatttgcagtaatggttggtttccatcgaagatggaaacacacacagtgcaggccgtgatccgatggaaacacacacagtgcaggccgtgatcatcggatcgtccttccgtagccttccgtgaccgtgatccctcatccctgatcagctacttcgtacaggaaccttccagaactcttgagaactgggatccaacgcagctgggctcctctcggttttataaaaatctcaacagggtttcgttttttcgccttaatccccatcaaaccccaagcgcgcacccatcttctggcctttccagccgccaagccttctagaagcttcaagagctcgattcgatcggaaccctcgccatggccgacgaggcgaaggcgaagggtaacgcggcgttctcggccggccgcttcgaggaggcggcgcggcacttcacggacgccatcgcgcttgccccagacaaccacgtcctctactccaaccggtcggcggcgctcgcctcgctccaccgctactccgatgctctcgccgacgcgcagaagaccgtcgacctcaagcccgactgggccaagggctactcccgcctcggcgcggcgcacctcggcctcggcgacgcggccagcgccgtcgccgcctacgagaagggcctcgagctcgaccccagcaacgagggcctcaaagcggggctccaggacgccaagaaagccgccgccgcccctccgcgccgcgggtcgtccggccccgacgccatcggccagatgttccagggccccgagctgtggagcaagatcgcgtccgacccctccacgcgcgcctaccttaacgagcccgattttatgcatatgatgcgcgaagtgcagaggaaccccagcagcatcagtatgtatctctccgatccccgcatgatgcaggtgctcagcctcatgcttaatgtcaagatccagagacccgaggcctccgagccgtcgcagtctaccccgccgccgccgaagcagcagcagcagcagcagacgccgccttctgagacgaaggctagggatgtggagcccgagcccgaggcagagccgatggatttgactgatgaggaaaaggaccgcaagcagacgaaagctgctgctcagaaagagaaggagttaggtaacgcagcttacaagaagaaggacttcgaggtggcaatccagcattacaccaaagccttggaacttgacgacgaggatatttcctatctgactaaccgagcagcagtctacattgagatgggaaagtacgatgaatgcatcaaggactgtgataaggctgtggagaggggaagagaacttcgtgctgatttcaagatgatttcaagggcactgacaagaaaaggaacagctctggtcaaacttgctaagacctctaaggattttgatattgctatcgagaccttccagaaggctctgactgagcatcggaacccagacactcttaaaaagttaaatgaggctgagaaagcaaagaaagagttagagcaacaagagtattatgatccaaaattggcagatgaggagagagagaaaggcaatgagttcttcaaggagcaaaaatacccagaagcaataaaacactacacagaggctctcaagagaaacccgaaggatcctagggtttatagcaatagggccgcctgctacaccaagttaggagccatgcctgaaggtcttaaagacgcagaaaagtgtcttgaacttgaccccaccttcaccaaagggtatacgaggaaaggtgcaattcagttcttcatgaaagaatatgacaaggccgtggaaacctaccaggctggcttgaagcatgacccgaacaaccaggaactgcttgatggtgttaagaggtgtgttgaacagatcaacaaggccaacagaggtgaaataagccaggacgaattgcaagaaagacagaacaaagctatgcaagacccagagatccagaacattcttaccgaccctatcatgcgacaggttctaatagatttccaggagaacccaagtgcggcccaggagcacctgaagaaccccggggttatgcagaagattcagaagcttgtaagtgctgggatagttcagatgagatgatcgagcgatgcgatgattggctttgttcgttcacgtgcaccctggtcatacatatgttttaacaagcagcagcggcataagaatgaacctgttcgggggctaatcttattccttttggattggctgcctcactgctcgttacccgtttgatttgaatttgaggcttgaggacttggttaaagccacacctccctccagtcaaactgctgttaaattgttcttcttgctccacggctaaacatggcattag

SEQ ID NO: 40412 - DNA, 3685 bp, Zea Mays
tttttttaaaaaggttcgtttgcacgatttgcagtaatggttggtttccatcgaagatggaaacacacacagtgcaggccgtgatccgatggaaacacacacagtgcaggccgtgatcatcggatcgtccttccgtagccttccgtgaccgtgatccctcatccctgatcagctacttcgtacaggaaccttccagaactcttgagaactgggatccaacgcagctgggctcctctcggttttataaaaatctcaacagggtttcgttttttcgccttaatccccatcaaaccccaagcgcgcacccatcttctggcctttccagccgccaagccttctagaagcttcaagagctcgattcgatcggaaccctcgccatggccgacgaggcgaaggcgaagggtaacgcggcgttctcggccggccgcttcgaggaggcggcgcggcacttcacggacgccatcgcgcttgccccagacaaccacgtcctctactccaaccggtcggcggcgctcgcctcgctccaccgctactccgatgctctcgccgacgcgcagaagaccgtcgacctcaagcccgactgggccaagggctactcccgcctcggcgcggcgcacctcggcctcggcgacgcggccagcgccgtcgccgcctacgagaagggcctcgagctcgaccccagcaacgagggcctcaaagcggggctccaggacgccaagaaagccgccgccgcccctccgcgccgcgggtcgtccggccccgacgccatcggccagatgttccagggccccgagctgtggagcaagatcgcgtccgacccctccacgcgcgcctaccttaacgagcccgattttatgcatatgatgcgcgaagtgcagaggaaccccagcagcatcagtatgtatctctccgatccccgcatgatgcaggtgctcagcctcatgcttaatgtcaagatccagagacccgaggcctccgagccgtcgcagtctaccccgccgccgccgaagcagcagcagcagcagcagacgccgccttctgagacgaaggctagggatgtggagcccgagcccgaggcagagccgatggatttgactgatgaggaaaaggaccgcaagcagacgaaagctgctgctcagaaagagaaggagttaggtaacgcagcttacaagaagaaggacttcgaggtggcaatccagcattacaccaaagccttggaacttgacgacgaggatatttcctatctgactaaccgagcagcagtctacattgagatgggaaagtacgatgaatgcatcaaggactgtgataaggctgtggagaggggaagagaacttcgtgctgatttcaagatgatttcaagggcactgacaagaaaaggaacagctctggtcaaacttgctaagacctctaaggattttgatattgctatcgagaccttccagaaggctctgactgagcatcggaacccagacactcttaaaaagttaaatgaggctgagaaagcaaagaaagagttagagcaacaagagtattatgatccaaaattggcagatgaggagagagagaaaggcaatgagttcttcaaggagcaaaaatacccagaagcaataaaacactacacagaggctctcaagagaaacccgaaggatcctagggtttatagcaatagggccgcctgctacaccaagttaggagccatgcctgaaggtcttaaagacgcagaaaagtgtcttgaacttgaccccaccttcaccaaagggtatacgaggaaaggtgcaattcagttcttcatgaaagaatatgacaaggccgtggaaacctaccaggctggcttgaagcatgacccgaacaaccaggaactgcttgatggtgttaagaggtgtgttgaacagatcaacaaggccaacagaggtgaaataagccaggacgaattgcaagaaagacagaacaaagctatgcaagacccagagatccagaacattcttaccgaccctatcatgcgacaggttctaatagatttccaggagaacccaagtgcggcccaggagcacctgaagaaccccggggttatgcagaagattcagaagcttcagcggcataagaatgaacctgttcgggggctaatcttattccttttggattggctgcctcactgctcgttacccgtttgatttgaatttgaggcttgaggacttggttaaagccacacctccctccagtcaaactggcattttcgaagaagcatacagaaatttcattggaatctagggtggtcgactgtcgagggagcgtcttattcctatgaaatttctgctttattttataaaatttctactttctaaattgacccttcgttattgaaagctcgattgaaggattattttctgaatcctgctctttttttctatgtttttgaactaattcatgtaaaatttatgtactatttttgtgaaattctgcgttccaaagaagccctgaactattctttctttttagctgttaaattgttcttcttgctccacggctaaacatggcattagctattggattgatcttcttgctctaaagaactggatgctgaaaatcgaggggctctgaatggtacggaaccgagctcatcttgcgttgcgtactgaatgcctagcgggttttattcgatatgaagacaagtattttacacgtggatatgttaatggacaagaaaatatatctactggatagacacatatatacgtacggggtcatatcgttctatctattaactatcaagttatgtaattattatggtttgttatattttgagttgaatttatttttgtgtgtttgtttagcattttgagtgattgatatattagaatttgagacttcactagcgggtacagttacccaatagataaaatcacccgcgtgcgtacgaatatgggtaagattctacacccacgagtagatatggtaagccgacgagtataatttgtgcatctagttgatgattatcagagttcactttttgtacttaaggaagagtagttgatgatcattttttaaagccttcaacagttcaagcactaatttatgcatctagttggataagaggctctcaacatgagaaaaaattgcacctattcttgtggtaggtaatcctattataggttgtaacatagcaactatatttaatatttcttttaacttttattctatgtaatgctgatgtgtcatgtgtggactgttcaggaggaagatgatggtgatatcgagtttgtggagttccctaagggggtggaggttgaaggaatatgtgctagccttttggttttggtggcatgcttttagccttttggatgttgacaggttctaacttagaacttctaagggagataggagtcatagccttttggatgctgctagccttttgttggcatgttgacatgctgcacttgtgctgctagagcagcagtgctagccttttggtggttgactgcgactagttctggttgtttcttttcatggcaggaaagtgcatgtaaaagtggctaaactattactcacctaggaacagaatgtacattgtcttttgtctagtctagtggtacagtcttgttgacacataatgaaaatgtaaaattgtatgttgtctaaattctgaatttttatgatgcttgagttcaaacttcagagattctac

SEQ ID NO: 40413 - DNA, 2780 bp, Zea Mays
tttttttaaaaaggttcgtttgcacgatttgcagtaatggttggtttccatcgaagatggaaacacacacagtgcaggccgtgatccgatggaaacacacacagtgcaggccgtgatcatcggatcgtccttccgtagccttccgtgaccgtgatccctcatccctgatcagctacttcgtacaggaaccttccagaactcttgagaactgggatccaacgcagctgggctcctctcggttttataaaaatctcaacagggtttcgttttttcgccttaatccccatcaaaccccaagcgcgcacccatcttctggcctttccagccgccaagccttctagaagcttcaagagctcgattcgatcggaaccctcgccatggccgacgaggcgaaggcgaagggtaacgcggcgttctcggccggccgcttcgaggaggcggcgcggcacttcacggacgccatcgcgcttgccccagacaaccacgtcctctactccaaccggtcggcggcgctcgcctcgctccaccgctactccgatgctctcgccgacgcgcagaagaccgtcgacctcaagcccgactgggccaagggctactcccgcctcggcgcggcgcacctcggcctcggcgacgcggccagcgccgtcgccgcctacgagaagggcctcgagctcgaccccagcaacgagggcctcaaagcggggctccaggacgccaagaaagccgccgccgcccctccgcgccgcgggtcgtccggccccgacgccatcggccagatgttccagggccccgagctgtggagcaagatcgcgtccgacccctccacgcgcgcctaccttaacgagcccgattttatgcatatgatgcgcgaagtgcagaggaaccccagcagcatcagtatgtatctctccgatccccgcatgatgcaggtgctcagcctcatgcttaatgtcaagatccagagacccgaggcctccgagccgtcgcagtctaccccgccgccgccgaagcagcagcagcagcagcagacgccgccttctgagacgaaggctagggatgtggagcccgagcccgaggcagagccgatggatttgactgatgaggaaaaggaccgcaagcagacgaaagctgctgctcagaaagagaaggagttaggtaacgcagcttacaagaagaaggacttcgaggtggcaatccagcattacaccaaagccttggaacttgacgacgaggatatttcctatctgactaaccgagcagcagtctacattgagatgggaaagtacgatgaatgcatcaaggactgtgataaggctgtggagaggggaagagaacttcgtgctgatttcaagatgatttcaagggcactgacaagaaaaggaacagctctggtcaaacttgctaagacctctaaggattttgatattgctatcgagaccttccagaaggctctgactgagcatcggaacccagacactcttaaaaagttaaatgaggctgagaaagcaaagaaagagttagagcaacaagagtattatgatccaaaattggcagatgaggagagagagaaaggcaatgagttcttcaaggagcaaaaatacccagaagcaataaaacactacacagaggctctcaagagaaacccgaaggatcctagggtttatagcaatagggccgcctgctacaccaagttaggagccatgcctgaaggtcttaaagacgcagaaaagtgtcttgaacttgaccccaccttcaccaaagggtatacgaggaaaggtgcaattcagttcttcatgaaagaatatgacaaggccgtggaaacctaccaggctggcttgaagcatgacccgaacaaccaggaactgcttgatggtgttaagaggtgtgttgaacagatcaacaaggccaacagaggtgaaataagccaggacgaattgcaagaaagacagaacaaagctatgcaagacccagagatccagaacattcttaccgaccctatcatgcgacaggttctaatagatttccaggagaacccaagtgcggcccaggagcacctgaagaaccccggggttatgcagaagattcagaagcttgtaagtgctgggatagttcagatgagatgatcgagcgatgcgatgattggctttgttcgttcacgtgcaccctggtcatacatatgttttaacaagcagcagcggcataagaatgaacctgttcgggggctaatcttattccttttggattggctgcctcactgctcgttacccgtttgatttgaatttgaggcttgaggacttggttaaagccacacctccctccagtcaaactggaggaagatgatggtgatatcgagtttgtggagttccctaagggggtggaggttgaaggaatatgtgctagccttttggttttggtggcatgcttttagccttttggatgttgacaggttctaacttagaacttctaagggagataggagtcatagccttttggatgctgctagccttttgttggcatgttgacatgctgcacttgtgctgctagagcagcagtgctagccttttggtggttgactgcgactagttctggttgtttcttttcatggcaggaaagtgcatgtaaaagtggctaaactattactcacctaggaacagaatgtacattgtcttttgtctagtctagtggtacagtcttgttgacacataatgaaaatgtaaaattgtatgttgtctaaattctgaatttttatgatgcttgagttcaaacttcagagattctac

SEQ ID NO: 40414 - DNA, 3055 bp, Zea Mays
tttttttaaaaaggttcgtttgcacgatttgcagtaatggttggtttccatcgaagatggaaacacacacagtgcaggccgtgatccgatggaaacacacacagtgcaggccgtgatcatcggatcgtccttccgtagccttccgtgaccgtgatccctcatccctgatcagctacttcgtacaggaaccttccagaactcttgagaactgggatccaacgcagctgggctcctctcggttttataaaaatctcaacagggtttcgttttttcgccttaatccccatcaaaccccaagcgcgcacccatcttctggcctttccagccgccaagccttctagaagcttcaagagctcgattcgatcggaaccctcgccatggccgacgaggcgaaggcgaagggtaacgcggcgttctcggccggccgcttcgaggaggcggcgcggcacttcacggacgccatcgcgcttgccccagacaaccacgtcctctactccaaccggtcggcggcgctcgcctcgctccaccgctactccgatgctctcgccgacgcgcagaagaccgtcgacctcaagcccgactgggccaagggctactcccgcctcggcgcggcgcacctcggcctcggcgacgcggccagcgccgtcgccgcctacgagaagggcctcgagctcgaccccagcaacgagggcctcaaagcggggctccaggacgccaagaaagccgccgccgcccctccgcgccgcgggtcgtccggccccgacgccatcggccagatgttccagggccccgagctgtggagcaagatcgcgtccgacccctccacgcgcgcctaccttaacgagcccgattttatgcatatgatgcgcgaagtgcagaggaaccccagcagcatcagtatgtatctctccgatccccgcatgatgcaggtgctcagcctcatgcttaatgtcaagatccagagacccgaggcctccgagccgtcgcagtctaccccgccgccgccgaagcagcagcagcagcagcagacgccgccttctgagacgaaggctagggatgtggagcccgagcccgaggcagagccgatggatttgactgatgaggaaaaggaccgcaagcagacgaaagctgctgctcagaaagagaaggagttaggtaacgcagcttacaagaagaaggacttcgaggtggcaatccagcattacaccaaagccttggaacttgacgacgaggatatttcctatctgactaaccgagcagcagtctacattgagatgggaaagtacgatgaatgcatcaaggactgtgataaggctgtggagaggggaagagaacttcgtgctgatttcaagatgatttcaagggcactgacaagaaaaggaacagctctggtcaaacttgctaagacctctaaggattttgatattgctatcgagaccttccagaaggctctgactgagcatcggaacccagacactcttaaaaagttaaatgaggctgagaaagcaaagaaagagttagagcaacaagagtattatgatccaaaattggcagatgaggagagagagaaaggcaatgagttcttcaaggagcaaaaatacccagaagcaataaaacactacacagaggctctcaagagaaacccgaaggatcctagggtttatagcaatagggccgcctgctacaccaagttaggagccatgcctgaaggtcttaaagacgcagaaaagtgtcttgaacttgaccccaccttcaccaaagggtatacgaggaaaggtgcaattcagttcttcatgaaagaatatgacaaggccgtggaaacctaccaggctggcttgaagcatgacccgaacaaccaggaactgcttgatggtgttaagaggtgtgttgaacagatcaacaaggccaacagaggtgaaataagccaggacgaattgcaagaaagacagaacaaagctatgcaagacccagagatccagaacattcttaccgaccctatcatgcgacaggttctaatagatttccaggagaacccaagtgcggcccaggagcacctgaagaaccccggggttatgcagaagattcagaagcttcagcggcataagaatgaacctgttcgggggctaatcttattccttttggattggctgcctcactgctcgttacccgtttgatttgaatttgaggcttgaggacttggttaaagccacacctccctccagtcaaactggcattttcgaagaagcatacagaaatttcattggaatctagggtggtcgactgtcgagggagcgtcttattcctatgaaatttctgctttattttataaaatttctactttctaaattgacccttcgttattgaaagctcgattgaaggattattttctgaatcctgctctttttttctatgtttttgaactaattcatgtaaaatttatgtactatttttgtgaaattctgcgttccaaagaagccctgaactattctttctttttagctgttaaattgttcttcttgctccacggctaaacatggcattagctattggattgatcttcttgctctaaagaactggatgctgaaaatcgaggggctctgaatggaggaagatgatggtgatatcgagtttgtggagttccctaagggggtggaggttgaaggaatatgtgctagccttttggttttggtggcatgcttttagccttttggatgttgacaggttctaacttagaacttctaagggagataggagtcatagccttttggatgctgctagccttttgttggcatgttgacatgctgcacttgtgctgctagagcagcagtgctagccttttggtggttgactgcgactagttctggttgtttcttttcatggcaggaaagtgcatgtaaaagtggctaaactattactcacctaggaacagaatgtacattgtcttttgtctagtctagtggtacagtcttgttgacacataatgaaaatgtaaaattgtatgttgtctaaattctgaatttttatgatgcttgagttcaaacttcagagattctac

SEQ ID NO: 40415 - DNA, 1067 bp, Zea Mays
tagtttccaactatttacttctaaatttatgcagtaattcaatatgcagacagacaaatatcatgagttcacggtagatgaccatgattagctatagggaccagtcccagtgattttttttcctgatggaatggaacatcacgttactattgcgctgttgcagcgcacgtcaacacgataacacagaagagtcaggaattacaattacggtcgtaggataggacgatgtcgtcagcaattgaggcctgatcggcggcggctaggcagaaaagcatgcacgaagccagccgcacaaacaaatgatggcccggtaggtatcctactaaaaaactacagaaatcagaaggtaccgtacaccacaccaagataataaaaaaaaagtgggggggagggtagttacatctcttaggtcagtcgctcgcaccgttcatccgatccgatcagccgaacgaagggatcccgtatctccagccattggaggatcgccggcgagggggcggctgctgctgcggcgcaaagctgagcccgaacatctccctgaggacttgccctggctcctggagcccgatcagcttggcgacaagggaggcactctccctgacatgttctaggtcctcggcctcggtccagagccggcgagcgacctggagcttcctcttcttggagtccagcgaaatgccccatttggtgtacaggcgctccctttcctctgccgtgagccgcttctgcatctgcctcgcaagcatctcccgttcacgctgcagcttcttggcgctgcatgaagcggttcattggagaatcatttctcattctaagagaagacgttgcgacaattgtcatcaagttatgatacaggaaagtgcaagtatatatataaatatattcgcttacctcgcagcgggggaagagttcaagctgcctaccaccgcattgctaggggtgtttccccgagagtaggtatctctgaggaatgatagcctccggagctccacttccatgtagattgaatcagcttgttctcccttgaatagcaagaaaaagtaggtcctgtggactaaggaaataca

SEQ ID NO: 40416 - DNA, 1943 bp, Zea Mays
ctccgtggcgctcgcttctcccttttcttccattggcacgcgggcccaccttgtcatctgctcgtacgtgctgttgcacgttcttcctccccacacgctaacgacctagagctatcgccgtggatcccgcctgcgctagcagctcgccctcaaccaccctacccactccatgggcataagctgacggctgcaacccctctctgtttcctcgcctcatcaagccctgcaccgtggtcgtcgtatgaggaaaattcgccatacgtgagggagagtcggtcaccaccgttggatcgcgacttcatcgccgttggggtccgggaatcgggccaggaggcgtcatcgtaccaccgggtgtgtgctcgtgcggcgggggaaaatcatcctcacaccgatgacaatttctcgtcaaagctccgcgaccgcgccaatccgcacttcaccgcggaccggtctcctgtgcgcgccatctccgaagagcctatggctgaggatcccggtgttcagcagatagaagttgctgagcaggagctcattgaaggcaagttgtgcccttgaccactttttatccaataatgttctttgttatcacttatcaatgcataggtttaatattgatgggacccaataagtcaccctagaccggttatccttttaccttgtttttccctgaatcatttgggtagttatgctattgctttacatggttttgggttaatatttcattatatccatgttccaattattctgttattttatttatgttcatgtcaagatcattatttttaattggaacatggagcttaacttgagaaacacgtaccaccacaagggtgaaatgggatgcccttggctgactaattaggaaagctagtggaagactatcttacccgaaaggggcaagggcagtaggggagtaggcgtgtagggaggttctcggttgattttgctgcgatggcggtcagacgagggattcctgcattgctattcccagaaactgtagcgggttttcgaaagctagtggaactttgtaaaggcctcatagtgttaccctgccttgcttccttagtagacgtgtatggggctcgtacaaccccgtggcagatgggtaacatgacttgtgggtacagggtacaacctctgcagagtgtaaaacaggtatactagccgagctcacggtcatgagcagctcaggactctcgcattattaaattatggaacttaaattcaatttgtcatttgcattgcatgggatttattattaattttgttctattactcttgttatggtttggtatttacttacacttagtaactgctaataaaatttgaccaacttattaaaagcaatgctcagctataacccctattgttgatcagccttacgcttcacatgaacttccacctttggtgagttcatgcacattattccccacaacttgttgagctatggacgtatgtgagctcacccttgctgtctcacccccacaggagaagaacaggtggttcaagaggagccacacaacgaggagtttgacttgatctaggtggcatctcccagtcgactttatggcgccaaggatggaatttagttcattttatatttatcttttattttataagacttccgctatgtaataagtactctgatgatattgtgacatttatctctatacactctgttattatatgtgttgtcttctttggcgcatatatgagatgcacccggctttatcccttaaatccgggtgtgacacttctggccgagtcactagtacatgtccaattcctccaactcagcttatttgttcaagatttggtcactttactaaactgagacttcaaattccatcactctatgtcacttcaccttcttcaaccacttcaaactggaaatcaccctatgcaacttcaacttccgcaacatattatagaaggaatttccc

SEQ ID NO: 40417 - DNA, 852 bp, Zea Mays
gcacgttcttcctccccacacgctaacgacctagagctatcgccgtggatcccgcctgcgctagcagctcgccctcaaccaccctacccactccatgggcataagctgacggctgcaacccctctctgtttcctcgcctcatcaagccctgcaccgtggtcgtcgtatgaggaaaattcgccatacgtgagggagagtcggtcaccaccgttggatcgcgacttcatcgccgttggggtccgggaatcgggccaggaggcgtcatcgtaccaccgggtgtgtgctcgtgcggcgggggaaaatcatcctcacaccgatgacaatttctcgtcaaagctccgcgaccgcgccaatccgcacttcaccgcggaccggtctcctgtgcgcgccatctccggagaagaacaggtggttcaagaggagccacacaacgaggagtttgacttgatctaggtggcatctcccagtcgactttatggcgccaaggatggaatttagttcattttatatttatcttttattttataagacttccgctatgtaataagtactctgatgatattgtgacatttatctctatacactctgttattatatgtgttgtcttctttggcgcatatatgagatgcacccggctttatcccttaaatccgggtgtgacacttctggccgagtcactagtacatgtccaattcctccaactcagcttatttgttcaagatttggtcactttactaaactgagacttcaaattccatcactctatgtcacttcaccttcttcaaccacttcaaactggaaatcaccctatgcaacttcaacttccgcaacatattatagaaggaatttccc

SEQ ID NO: 40418 - DNA, 2561 bp, Zea Mays
cttggctttctctgcctgcccttacagccctccacactctttcgcccctttccagttgtccatgaccccatccctccctttcaccactgccccttcttcctcctccccctagctgcacagccccctcgctgccagtttccgtcataacccgtcgtccagaggggccggaaccaaaggtggcggcggccatgctgcaccaccacggtggcgccgggtccccgtacatggccccggagacggctggcacgggcacgggcacggccccgttctcgccgacgccgacggggctcgccgtgtctgtcaccgccgccatcccagccctgccgacgatgcagttgcagccggcggggtcgagcgctaatttcgaggaattggcagcgggcggctccggcgccggtgtggcggtcagactccaggacgaagacatgcaggccgacttgggcgccagcggcgcgggagcgtccggcaaccggtggccgcgcgaggagacgctggcgctcatcaggatccggacggagatggacgccgacttccggagctccccgctcaaagcgccgctctgggagaacgtcgcaaggaagcttgcagggctgggttaccaccggagcgccaagaagtgcaaggagaagttcgagaacgtggacaagtactacaggcgcaccaaggacgcccgcgccgggcgccaggacggcaagagctaccgcttcttctcgcagctcgaggcgctgcacgcctcggcgccgcctctgccgcccccgccctcgggcatgaccacggtgcaagctggccctcatcagccgatggaaatggcatggacggcgggccctacggtgctgggccctgccgccgtcgccggcctgccggacctcagcttctcgtcgatgtccgagtccgactcagagtacgactcggacgacgacgacgacgactctggtgcgggggaggagggcctcagcgggggcgagtgcgacagggagatgatggccaccttcgagaggatgatgaagcagttcacggagaagcaagacgccatgcagcgcgtgttcctggagacgctggagcggtgcgaggcagagcgcacggcgcgcgaggaggcgtggcggcgccaggaggtcgcccgcatgaaccgcgagcgcgagcagctcgccagggagcgcgccgccgcggcctcccgcgacgccgcgctgatcgcgttcctccagcgtgtcggcggggggcagggcgagcccgcgcggctccctccgcacggcgccggcgtcgtgcccccgccgcctatgccggactgcgcccctccgtcgcctcggcgccacgcggccgccgcctcgcttcagcagctggtgcccgtaccgcccaaggcggtggaggccttggcgcgcgctggaggagagggcggcgggtccacgccgtcgcggtggcccaaggaggaagtggaggcgctgatccagatgcggaacgagaagggcgagaagtaccacgacgcgggggccaaggggcccctttgggaggacatcgccgccgcgatgcgggggatagggtacagccggagcgccaagcggtgcaaggaaaagtgggagaacatcaacaagtactacaagaaggtgaaggagagcaacaagaggcgccccgaggactccaagacctgtccttacttccaccagctcgacgccatgtaccgcaacaaacaccgcagcggcacaggcggcagaacggcacccagaacgaacatggcctccgccgtcgccgtcgcagcaaccgtgcaggacaatccgagcaagcgcgagctcgagggaaagagcagcaacgatgccgacaaccggaagaatgacgaacaggggaacgtgcttacttctcccgctagcggcgatacagcaccaggtggcgccgccaaaaacaagacggcagagggcaatgtggatgatacagatgtgcagcaccagcaccagcagcggttcagtgcggacgagacagacagcgacgacgacatggacatggcaagaaactacacagtttacactgaagaaggcaacaacgaagacaaaatgaagtacaagatgggcgtccaggagcgtgatgtgatcgggagcagcggcaacgtgcttgcgccaccaccatcaccagcagcagtagcagcgacggctgcggcaccgacgagttcagctgccccaacgagcagcaccttccttgccgttcagtagagggcaacgctgcagcaggaggcccggtgccagccgatcagcaccagtgcatcaccaccttttgcggcccattatcaccgagtatacttgccctgcatctgaaccatccgaataccatttattgatttgttctgtaataagtaccagatcatgaaaaccctcaaaaggtaaaaagaagacaatgaagaacagaggaggcagcagagacgcctaaacagaaagttcttttctttttttctcatcataggtcatgttatactttacctattgctaacaattgtacattcatgtctcagtctcaacttcctgtaatctactccgacagaaattgatcagggttttggagtggcgaatcgacattatttc

SEQ ID NO: 40419 - DNA, 354 bp, Zea Mays
ctcaaaactagtgaacatcaagacttttagcttcccctcaccttatggttacgatgggagttatagcctaataatgctaatatccctttatgcttgccttttagacgaagagtgtacatgaaggaattgttgggggtatgcttcgtagccgaagatcctaaaggaagagaacaccttcggcagatcctctcagaagcagcgccgaagctatcacctataaagcttcggcacggtgacagatctcaagacgaaggggtgaaccgacttaaagatgaaatgacttaaagacccatgatgttttgtgtcattattgtagtctattgtaaagggcataaatgtaattttacacaggat

SEQ ID NO: 40420 - DNA, 798 bp, Zea Mays
ctgcactttcttagcaagaaaatggaaaggacttgctcctaagatcagattaaatcgacattagattaatattgcttttgattgctacttctactacgactgtgagtgcttattttctttatattctaagctctaaatttgtcggatttcttgttcatactatttgatgtcagcatttctctaattcactctactcttcatcagagtaaaggtatgtggttactaataaacttgtgtgttcttcattggtgcatcacttaagtaactatgttccatgacttctgttttgaatgtttccataagttcattgtattcagttagatgtagctatcattataactgttgctttgacaaactcatataactctgctactaatcaattgaaatggtgatgcttccttattaatgtcacagatattctgctccttaaattgctttgtttctttgttctattttgttgttgttctgcttaatacactatgacttgctatatgcttccttttctttggtactattggaaatgacttctaagattctcatattcattgtgtgcaacacagataactttgtattagaaccatatgaaacagagataacaaccaaatcatctccatttgctattgcactggctagacatttgcactctataggtgctaaggagtatggagcattctggtgttctcattgcaatgaacaaaaacaggacagtctacgctgttgggcgacaacgtggagacgtttgagcaaaggattgccaagctcctatagtagaagttcatgggtggcatgatgaagcag

SEQ ID NO: 40421 - DNA, 804 bp, Zea Mays
ctgcactttcttagcaagaaaatggaaaggacttgctcctaagatcagattaaatcgacattagattaatattgcttttgattgctacttctactacgactgtgagtgcttattttctttatattctaagctctaaatttgtcggatttcttgttcatactatttgatgtcagcatttctctaattcactctactcttcatcagagtaaaggtatgtggttactaataaacttgtgtgttcttcattggtgcatcacttaagtaactatgttccatgacttctgttttgaatgtttccataagttcattgtattcagttagatgtagctatcattataactgttgctttgacaaactcatataactctgctactaatcaattgaaatggtgatgcttccttattaatgtcacagatattctgctccttaaattgctttgtttctttgttctattttgttgttgttctgcttaatacactatgacttgctatatgcttccttttctttggtactattggaaatgacttctaagattctcatattcattgtgtgcaacacagataactttgtattagaaccatatgaaacagagataacaaccaaatcatctccatttgctattgcactggctagacatttgcactctataggtgctaaggagtatggagcattctggtgttctcattgcaatgaacaaaaacagctacaggacagtctacgctgttgggcgacaacgtggagacgtttgagcaaaggattgccaagctcctatagtagaagttcatgggtggcatgatgaagcag

SEQ ID NO: 40422 - DNA, 1017 bp, Zea Mays
aaaaggccggatcctgattcctgagaacaggaggaattgaagaagaaggccggatccggagtcgcatgcaacagatcacgaggaagaaaaggaggaagctttcttactttgaggggaatgttgtctggctcgaggtgcagaaacacgcagatctcatcgaggtcgtcttggttgttgttgatctcggaccaggcttcattcccctcaagtagagctcccggctccatcgatctctctcgttcttgcctctcgcgcgcatgcatgactgagcagatttgcagagaattggaacaagcagagaagacgatgtgcatacaaaacatattcacatccaagtgatcgatggcattaactttaatttgttggcgacgctctcacttatgaagctatgatagagatatacaggttgtggtatggtagcagactggtcggcttggccagtatgtaaagagtcaagttccttatgtactggctagatacatacgtggactatgatagagatatacaggttgtggtatggtagcagactggtcggcttggccagtatgtagagtcaagttccttatgtactggctagatacatacgtggacttttgtttggttgttcgcattagtatattcaggttagatatagctagtgtttggttgtttgaataagaacaaagatcaaataaataaataaataaataaatcttcaatatttatataacaaatgtgttctagttttgtttataaaaatgttaagaacatatatctaaaatcagtttagtgattggatatttgaactaagagatatggtaaacaaaaagctaaagagagtatttttggaatcctcctgcatccgctcaaacgcaggtcgcgggcgtatgtagtgagtctgacccgacctctgaatttacatgtgctcggcttggatgcacaagtcactcaaccaaacacgacagcagattgaagatccacgggtgcaggctaggctaggtgcagccaaacagatggagtaggagagtaggaacggcg

SEQ ID NO: 40423 - DNA, 2651 bp, Zea Mays
ctgctccagctcggcttcgccgtattcgcgctacgcatgcttcgaccggagatcgcgttgcctggctcagagccccgcccgcagaccacgtacgtcagtgtaccgtacagcgacttcctggcgagcatagacaaggaccaggtgaagaaggttgaggtggacggggtgcacgtcatgttccgactccgtccagaggttgagtcccaggtccgtgtggagcagacaccatcacagcgcggaacagatgctgtcgtcgataatgctggagtctcgaggagaattgtgttcaccacgactcgtccagtggacataaagacgccatacgagaagatggtggaaaacatggttgaatttgggtcaccggacaagaggtctggcggcacgctcaattctgcgctggtagctcttatttatgtcgtattgattgcagtagttttgcagcgtttgccaataagcttttctcagcattcagccggtcagttgaggaacaggaagaattctaattctggtagagcaaaagtttctgaaagtacagatatagttacatttgctgatgtggctggagtagatgaggcaaaagaagagcttgaagaaattgtggagttcttaaggaacccagaaagatatgttcgtcttggtgctcgccctcctcgtggtgtcttattggtgggtcttccagggactggaaagacacttcttgcaaaagccgtagcaggagaagcagaagtcccgttcataagttgctctgctagtgaatttgttgagctatatgtaggcatgggagcagctcgagtacgtgacctatttgctaaggccaaaaaggaatcaccgtcgattatttttatcgatgagattgatgctgttgcaaaaagccgtgatggtcgatatcgcattgtcagtaatgatgaacgtgagcagacactaaaccaattgctcacggaaatggatggcttcgacaccaattcggctgtcattgtactaggggcaacaaatcgagctgatgttttggatcctgcccttaggcgacctgggagatttgaccgtgtagttatggtttggaagagaatcaattctaaaagttcatgtgagcagaagagagcttccactgagtaaagatgtagatctagccgatattgctgcaatgacaactggttttactggagcagaccttgcaaacttggtaaatgaagctgctttgttggctgggcgattaaataaagaaattgtggaaaagattgacttcatccatgcggttgagcgatctatagctgggatagagaaaaagcatgcaaaattgaagggtaatgaaaaggctgtcgttgcacggcatgaagtaggtcatgcactcgtgggaactgctgtagcgaaccttcttcctggacagccacgtgttgagaaattgagtatattgccaaggtcaggaggtgcattaggctttacatacacccctcccaccacagaggatagatatttactctttgttgatgaactacgtggccgtttagtaacacttctgggtgggagggcagcagaggaagttgttttagcaggacgggtttccactggtgcacttgatgacataagacgtgctactgacatggcctacaaagctgtagcagaatacggtcttaatcagcgcatcgggccaatatcacttgctacactgtcaaatggtgggttagatgactctggtggttctccatggggaagagatcagggccatctagttgatctcgttcagagggaagtaaaagcgcttttacagacggcactggaagtagctctttcagttattcgtgctaatcctgcagttttggaaggcctcggagcatatttagaagagaatgaaaaggttgaaggcgaggaacttgaagagtggctaaagtcagttgttgcatcaaaagagttgacctcttttatcagaggacagcaagagcaagttcttcagctggaagcaggctcctagcgtcaggactcttaaaattaattacttacagaagtcttccagcaattagaacatacaatgcgagttccaaggtatgcaatggaaaccttgatactggggacagatctgtggccatgtggtggattgtatgacctctcccacccactcatgctaagacaaacttgggttgggcgcccacccttcgttcgttgaatcatgagctcgagccttagaggagaattttcagaaaaggaaatctacatgcccgagtgaccatgtaaatatttaccattgcagttcgcggacccatgagtaccaaaaaaaagagatgattcatattgacctgtaacattgtaagatcaacctcaggaatatttgaagcggttagttttcacatgttcatagatcgggtcggtgttacacatgtaaaagattctttttttgccctaggttcttgtcctcaccctgttagaagttattttcctctttacaatatgatcctagagatgatcaataggataattaatgcttatacggactatggttcctgtattgatatactctttccaatatacttcgggcttcaaatccatcattagttgacattaccgttaagcgttatggaaggttttctgccacttgcgcatggaccatcgagaattgttcttcagaatggtgattgctttttcgaaagaatagaaatgcg

SEQ ID NO: 40424 - DNA, 1567 bp, Zea Mays
gaccttgcaaacttggtaaatgaagctgctttgttggctgggcgattaaataaagaaattgtggaaaagattgacttcatccatgcggttgagcgatctatagctgggatagagaaaaagcatgcaaaattgaagggtaatgaaaaggctgtcgttgcacggcatgaagtaggtcatgcactcgtgggaactgctgtagcgaaccttcttcctggacagccacgtgttgaggtttgaacttaagcaattactgatagaacaatctgagagaagatgtaatttgacttactttttcaatgctgaatttaacagaaattgagtatattgccaaggtcaggaggtgcattaggctttacatacacccctcccaccacagaggatagatatttactctttgttgatgaactacgtggccgtttagtaacacttctgggtgggagggcagcagaggaagttgttttagcaggacgggtttccactggtgcacttgatgacataagacgtgctactgacatggcctacaaagctgtagcagaatacggtcttaatcagcgcatcgggccaatatcacttgctacactgtcaaatggtgggttagatgactctggtggttctccatggggaagagatcagggccatctagttgatctcgttcagagggaagtaaaagcgcttttacagacggcactggaagtagctctttcagttattcgtgctaatcctgcagttttggaaggcctcggagcatatttagaagagaatgaaaaggttgaaggcgaggaacttgaagagtggctaaagtcagttgttgcatcaaaagagttgacctcttttatcagaggacagcaagagcaagttcttcagctggaagcaggctcctagcgtcaggactcttaaaattaattacttacagaagtcttccagcaattagaacatacaatgcgagttccaaggtatgcaatggaaaccttgatactggggacagatctgtggccatgtggtggattgtatgacctctcccacccactcatgctaagacaaacttgggttgggcgcccacccttcgttcgttgaatcatgagctcgagccttagaggagaattttcagaaaaggaaatctacatgcccgagtgaccatgtaaatatttaccattgcagttcgcggacccatgagtaccaaaaaaaagagatgattcatattgacctgtaacattgtaagatcaacctcaggaatatttgaagcggttagttttcacatgttcatagatcgggtcggtgttacacatgtaaaagattctttttttgccctaggttcttgtcctcaccctgttagaagttattttcctctttacaatatgatcctagagatgatcaataggataattaatgcttatacggactatggttcctgtattgatatactctttccaatatacttcgggcttcaaatccatcattagttgacattaccgttaagcgttatggaaggttttctgccacttgcgcatggaccatcgagaattgttcttcagaatggtgattgctttttcgaaagaatagaaatgcg

SEQ ID NO: 40425 - DNA, 4307 bp, Zea Mays
agcaaaaccacctcttccgctcaccgcgctgcgccgcttcgtcccccccacctccgtcgatgcccgcgccgccatcaacagaggccgggcggagccgcaccatgacacgcgtgatcatcctcctcgatagcgacaaagaagacgacggcaccggccgccaagccgggcgcgagcttggtggcgccgcgatcgcctccgcgggcgaggcctcgaagctcgtcaaaccagaggtcgtcgacgatgtgggctccaacccggtgcgtcctggggcgctgcctacctcgctacgggtacaaggccatcgcgcgccgtcctcgccgtcgccggtccccgcggcggttcggaagcagcccgagattatcgccatctccgacgaagacaatgacggttcccgattccggcgcgtgaggcgcgtcaaggacgaggcttccgattgggttctttcagcgaaggcgaagcgcgccatggtgtcgggtgtgccccccggaagctccgacgtgaagaggaagcggaagagaggatcgtccggcgctggcgactttcacgcgttggaccggaatttgagcgcttcaggggctggtcgtcgcacgtcgtggatggccgaagacgccgggagctccaggaatgtgagtagtagcgagttaagcagaggaggcgtgggtgaccggtcgggttcgaccaagaaggccaggggtgcaccgggaaagacgaggcgtggagggggtacgagaagagagaggagcactagtgcggcaccggccaacttggttggagggagtgcaacggttgggtcgcggatccggttaaggtcgcgtcagcaggggagagtgcagtgtgctacatactctgctcgagtgtcgtccgaggacacgggggaggacgaaaagcatatgcaggagcagacaagagtggaagatgtggagttcatggaggtggatgatgattatgacgacgtcaacgtggctggcaatgtcatagatcaagagagtgagcaggacgaggctctggaaggaaggagcagtcaggatagccatggctatagcgaggacaaggagggcaaagactctgctgctttgagtgataatgaggaggatgtggggggaaaggaattgttggaagaggaggaggaaggtgccgatcaagaagaaagtcatatcatctacgatggtgaaggagaacaagaagaggacgcatctgaggaggaaacacaggaattggatgaaacaggggaggcgcagccattcaatcctagcaacaccatggcaggtagcactatgaggtcaggaggcgatggcaagcaagtctttaggaggagggtttttgagggcatatatttgcctgagaatccacacaggactgttggcaagggcatccaagggcggacgcgatcacagcgaaaatgcaaggacaagaaactgctgaaacgcggaactttcagtaaaccttacaacattgatattccagactcgacttctgattccgaagaggaaatcgaaccaccagcgccacagcaagggctactgtcgtcaagtgaggaagacaacatgacttttggcaaaaggaagcgcagaagagcagcgataaacaagagatgggacaagaggctgagtgccagtagtgacgaggaggattacggagcatctgccatggatgccaaagagaggcctttccggaggctgaagaaggggctatccaatcttcaggctgccaaggaaggttgcagaaattacgaaggctcaaatcctgggcatgccaggtacagtggtccaaatggcgggaatctagagaacatgtccagtgcacaggatgatatctccttcaaaagaaatgtacatatgattcgaataaagaagcgcggtcgagcagcgaaagccgtctatgatgagctccttgattccttgttttctggctgggaaaatcatataggtaatcctgttcacgcagaggctggaaacagtttgcctctcgtgttctcattcggagatgaggatgcagaagagaacacagaaaatgacaagtatcaagaacaagaagacctgtggatggaatgcggcattgcttttcaatccatgaacattggttccaacggctgtgaagaggatgggaaagaaattcctccagtgaaagtgacttcttgcaatattgggcagcatgaattcattattgacgaacaaataggagttcggtgcaagcactgtcatgttgtcgatctcgaaatcagagatgtactgcctactttggggaaatgttctgcagaaaggggatcagcaatcaaccctgagtttgacaggatgcttaaggaaatgctcaatgtttttgaacagaatgatgtgctggtatcaaatggacatgaactaccatgcaactttggtgatcacaaagctggttcagtctggaatctcattcctggagtcaaggaaactatgttcccacaccagcaggatgcatttgagttcatgtggacgaagctagcaggaggtactacaattgaacagctaaagcacaccataaaatctgatgctggaggtggttgtgtgatttctcatgcacctgggacgggaaagacgcgactggcaatcacatttgttcaatcctaccttgaggttttcccgcactgtagcccggttatcattgctcccagggggatgctagcgacatgggagaaggagttcaggaaatggaaggcgactggtgaagctagggtcctggatgaacggaagctagctaatcacgaaggcatggacggggataaggtgaggaagctgctgctggagaaacccaacttgcttgtccttgacgaagggcacacgccgaggaacaagaagagtctcatctggaaggttcttaaaagggtccacaccgaaaagcggataattctatcggggactctattccagaacaattttgaggaactctacaacaccttgcgccttgtcaggccaaaggatgcagatgcattgcatctagagacggacgagagcaaagatttctggtcttcgttgagactgaatgacatcacaaaggcaaacattaatgaagtgaggaaaaaactggaccctattgtgcacatccatagtggcagatttcttcagaagtctctcccaggactgagagaatccgttgtgattctgaaccctcttctctaccagaaagaagtcatcgcaagtatggagaagactgtggcaatgggtcttgatgcagaatacaaaatctcgcttgcatcaatacatccttccctgcttgccagcgcaaaactgtctatgaaagaggaatctatcttggacaagcctaagctagagagtctacgctccaatccatctggaggggttaagacgaggtttgttttggagattgttcgcctgtgtgaagcgcttaatgaacgggtgctagtgttcagccaataccttgaaccattgtccttgatcatggagcagctgaaagaaaggttcagttgggcagaaggcgaagagatcctgctaatgagcggaaaagttctagttaaaaaacgccaaaccatgatggaggtcttcaataacatgaaaagcaaggccaaggtgatgcttgcatcaacgaaggcatgctgcgaaggcattacgcttgttggggcgtcacgtgtagttctacttgatgtcgtgtggaacccctccgttggaaggcaagcgattggccgggcttacagaattggtcagagaaagattgtgtacacgtacaatctgattgcagaaggaacgacagagaagagaaagtatgacagacaagccaagaaggaacacatgtctaaattgctcttttcaaatgaactggagcgtggaggatgcaacttgcctccagaactgacgttcaatgatagggttttggaagaattgactgcacgtgaagacctaaaaaatttgtttgtaaagatttatgttgacaatcaaactgatggatcacgtggagagatgaagaacaatacatgtttgcagtcctaataatatgaaacgggatggtggaaaacgacgaagggtcctaaaccagatgattatcaagatgctatcactgccaaggaattttactgggtttcttgtgctctaagacctcagtcagattcataagggttataagctagagtcgaaagggatgacctagaactttatctacacagcgtagatgagctgtggctaaacctgcagaaactagatatgttgattgtaatgctcttgtactcgattatttgacaattgcattgcgttcttctttctaattttctattctggtgcatcgatcaatctgacatgcacataatacagttatatactgaagaagag

SEQ ID NO: 40426 - DNA, 647 bp, Zea Mays
agcaaatctcgtgggcgtgtagcgtacgccacctgcgtccgcgccttttccatttccaccccgatcgcattttaccctactccccgccgcctgtccctgcgctagtcgacactcgacaggctcggtttccgccctcctctcccaccgccgcgcaccgagaagatggggaagcggtggatcccgctggaggccaacccggacgtcctgaaccagttcatatgggggctgggagtccacgaggaggatgtgcagttctgcgacgtctacggccttgacgatgagctgctcgctatggtgccccagcccgttctcgccgtcctcttcctctacccgctcacctccctggacgaggagaaagaagaatcaagtgtttctgctgccacatcgacctcagcgggcaaggaattgagcaagaaagtatactttacgaagcagactgttggtaatgcttgtggaacagttggtgttattcatgcaataggaaatgcaacatctcaaatcaagctagttgaggggtcctattttgagaagttctataagcaaacggctgatatggatccagctcagcgtgctgcctttctcgaggaagatgatgagatggaagatgcacattctgttgctgcatctgctggtgacactgatttgtc

SEQ ID NO: 40427 - DNA, 1376 bp, Zea Mays
agcaaatctcgtgggcgtgtagcgtacgccacctgcgtccgcgccttttccatttccaccccgatcgcattttaccctactccccgccgcctgtccctgcgctagtcgacactcgacaggctcggtttccgccctcctctcccaccgccgcgcaccgagaagatggggaagcggtggatcccgctggaggccaacccggacgtcctgaaccagttcatatgggggctgggagtccacgaggaggatgtgcagttctgcgacgtctacggccttgacgatgagctgctcgctatggtgccccagcccgttctcgccgtcctcttcctctacccgctcacctccctggacgaggagaaagaagaatcaagtgtttctgctgccacatcgacctcagcgggcaaggaattgagcaagaaagtatactttacgaagcagactgttggtaatgcttgtggaacagttggtgttattcatgcaataggaaatgcaacatctcaaatcaagctagttgaggggtcctattttgagaagttctataagcaaacggctgatatggatccagctcagcgtgctgcctttctcgaggaagatgatgagatggaagatgcacattctgttgctgcatctgctggtgacactgatgtgaactttatgagcttgatggacgaaaatcacaacccacatcccatggcccttcatcacctgaaaccttgttgcaggatgctgcaaaagtcatcaaagctagaattgcagagaaccctaactcgatgaacttcaacgtcatggctctttcaaagaagtgaagtgtactgtgatggatggattttctttggcagaatacgggcctcttttcctttcgcttccgctgggctgcaccgagtggaaggtttgcatgggcaaacatagggggaaaaaactttatatgacctgagatgtttggttgatgactcgatgtattctcgtgccttcatggagagagaaatgactgttcacgatttcaactttttccggtgtattagtagtcgaatggagacttgcattggaagagtttcactttgctgtatctgaaccattctagcttcctcggcaggttgattccataaagctagcatttctatgttttccgtgcaaacgcatgtagttttctgtagaatgtaacttattaaacggaattggtgacacctggctaacgaatggaaacattatgtgggggattgcatacatttacaaagggtaacaagtaacaacagccaaaaacaccaggacttttttttgtggtcttattcgtatttgtattttctctctgtgttctgtattctatgaatctatgtataggtgctagagacatgaaaaacaaaatgccaacgaaaaaaaga

SEQ ID NO: 40428 - DNA, 2107 bp, Zea Mays
agcaaatctcgtgggcgtgtagcgtacgccacctgcgtccgcgccttttccatttccaccccgatcgcattttaccctactccccgccgcctgtccctgcgctagtcgacactcgacaggctcggtttccgccctcctctcccaccgccgcgcaccgagaagatggggaagcggtggatcccgctggaggccaacccggacgtcctgaaccagttcatatgggggctgggagtccacgaggaggatgtgcagttctgcgacgtctacggccttgacgatgagctgctcgctatggtgccccagcccgttctcgccgtcctcttcctctacccgctcacctccctggacgaggagaaagaagaatcaagtgtttctgctgccacatcgacctcagcgggcaaggaattgagcaagaaagtatactttacgaagcagactgttggtaatgcttgtggaacagttggtgttattcatgcaataggaaatgcaacatctcaaatcaagctaggtaactatgaagatttgcattgagctaatggtgtactgtcttaaattttacaagttgctgttttgagtcactacgagtctatgacctaatatagaaggtcaaacttctgtttcttatgccagttcagctagtttgccctaatgtaactagtaactagtaggcaataggcattcaggtctatgtacaaacagttagtactatttatgatatctggcttcagagtaaatactttgcttggatttatggaacttcagtctgtcctcttgtcttggacactagtcaaacttaaatttttttgacttaatcaactgagtttagcttgatacctgagggcatggttactggccaatcagcatgttttggagacaaactacaatgatactctattcagctccttgtctgttttgccttatgtttccatgatctgtcatcataaattggaaagttatcctattctgatcagatttttttttgcgtaatattattgatgtatacttcatattttcatgaaggtaagtattggcgatttatgacttgtctcagtagctatgcacacttttctctctctgtatgttgtgaaattcaatgtgttttcatgaacacacatgttaaatggagtagtttgaatttaaattacatttgacttgcttgtaacatgacttcatgggtaccttatttgcagttgaggggtcctattttgagaagttctataagcaaacggctgatatggatccagctcagcgtgctgcctttctcgaggaagatgatgagatggaagatgcacattctgttgctgcatctgctggtgacactgatgctaatgttgatgttaatgaacattttgtatgtttctcctgtgttgatggtgaactttatgagcttgatggacgaaaatcacaacccacatcccatggcccttcatcacctgaaaccttgttgcaggatgctgcaaaagtcatcaaagctagaattgcagagaaccctaactcgatgaacttcaacgtcatggctctttcaaagaagtgaagtgtactgtgatggatggattttctttggcagaatacgggcctcttttcctttcgcttccgctgggctgcaccgagtggaaggtttgcatgggcaaacatagggggaaaaaactttatatgacctgagatgtttggttgatgactcgatgtattctcgtgccttcatggagagagaaatgactgttcacgatttcaactttttccggtgtattagtagtcgaatggagacttgcattggaagagtttcactttgctgtatctgaaccattctagcttcctcggcaggttgattccataaagctagcatttctatgttttccgtgcaaacgcatgtagttttctgtagaatgtaacttattaaacggaattggtgacacctggctaacgaatggaaacattatgtgggggattgcatacatttacaaagggtaacaagtaacaacagccaaaaacaccaggacttttttttgtggtcttattcgtatttgtattttctctctgtgttctgtattctatgaatctatgtataggtgctagagacatgaaaaacaaaatgccaacgaaaaaaaga

SEQ ID NO: 40429 - DNA, 1190 bp, Zea Mays
ctgttatctaggtaaccagatattgaattgtattggaaagaaagtaatggtagctgttatctagtactgtgtggaggtgatatattacttaataagcccttcaagcactgatctttatgctgttagtgaatgaactactcaaggaatacctacaatttttagatcaagaattgagcaagaaagtatactttacgaagcagactgttggtaatgcttgtggaacagttggtgttattcatgcaataggaaatgcaacatctcaaatcaagctagttgaggggtcctattttgagaagttctataagcaaacggctgatatggatccagctcagcgtgctgcctttctcgaggaagatgatgagatggaagatgcacattctgttgctgcatctgctggtgacactgatgctaatgttgatgttaatgaacattttgtatgtttctcctgtgttgatggtgaactttatgagcttgatggacgaaaatcacaacccacatcccatggcccttcatcacctgaaaccttgttgcaggatgctgcaaaagtcatcaaagctagaattgcagagaaccctaactcgatgaacttcaacgtcatggctctttcaaagaagtgaagtgtactgtgatggatggattttctttggcagaatacgggcctcttttcctttcgcttccgctgggctgcaccgagtggaaggtttgcatgggcaaacatagggggaaaaaactttatatgacctgagatgtttggttgatgactcgatgtattctcgtgccttcatggagagagaaatgactgttcacgatttcaactttttccggtgtattagtagtcgaatggagacttgcattggaagagtttcactttgctgtatctgaaccattctagcttcctcggcaggttgattccataaagctagcatttctatgttttccgtgcaaacgcatgtagttttctgtagaatgtaacttattaaacggaattggtgacacctggctaacgaatggaaacattatgtgggggattgcatacatttacaaagggtaacaagtaacaacagccaaaaacaccaggacttttttttgtggtcttattcgtatttgtattttctctctgtgttctgtattctatgaatctatgtataggtgctagagacatgaaaaacaaaatgccaacgaaaaaaaga

SEQ ID NO: 40430 - DNA, 1061 bp, Zea Mays
attgtattggaaagaaagtaatggtagctgttatctaggaattgagcaagaaagtatactttacgaagcagactgttggtaatgcttgtggaacagttggtgttattcatgcaataggaaatgcaacatctcaaatcaagctagttgaggggtcctattttgagaagttctataagcaaacggctgatatggatccagctcagcgtgctgcctttctcgaggaagatgatgagatggaagatgcacattctgttgctgcatctgctggtgacactgatgctaatgttgatgttaatgaacattttgtatgtttctcctgtgttgatggtgaactttatgagcttgatggacgaaaatcacaacccacatcccatggcccttcatcacctgaaaccttgttgcaggatgctgcaaaagtcatcaaagctagaattgcagagaaccctaactcgatgaacttcaacgtcatggctctttcaaagaagtgaagtgtactgtgatggatggattttctttggcagaatacgggcctcttttcctttcgcttccgctgggctgcaccgagtggaaggtttgcatgggcaaacatagggggaaaaaactttatatgacctgagatgtttggttgatgactcgatgtattctcgtgccttcatggagagagaaatgactgttcacgatttcaactttttccggtgtattagtagtcgaatggagacttgcattggaagagtttcactttgctgtatctgaaccattctagcttcctcggcaggttgattccataaagctagcatttctatgttttccgtgcaaacgcatgtagttttctgtagaatgtaacttattaaacggaattggtgacacctggctaacgaatggaaacattatgtgggggattgcatacatttacaaagggtaacaagtaacaacagccaaaaacaccaggacttttttttgtggtcttattcgtatttgtattttctctctgtgttctgtattctatgaatctatgtataggtgctagagacatgaaaaacaaaatgccaacgaaaaaaaga

SEQ ID NO: 40431 - DNA, 1277 bp, Zea Mays
atggaccggtggaccggcgtcgtctacgtcccactctccagaggcggacccctcttccgcgtcgctgcctcgctcctcctctcgccagccaaaacgctcgccgttccacgagtcaacgcgatccttttcacgggcgaccgcgtccgcggcacgggcgatccggtgatcgagcggctctctgacgccgcccacctggctggggtcctcgccgggaagctccctggggaggccaacgcgtgggtggtcgacgccgcgcgctttgctgggccgtttgcggtgtaccgagagctcgttccgaccgtcgacgccgctggagaccccaaggggtatgaccccactggcttccccgccgccgccggtgttgccaacatccttgcacgcagcattggtgaggtatagtgtttggtgaattccggcgaagtttgaaacttgcgaccttagttacgcagatacgattttcagtgcaaaacatctttggtgcagctgcaaaaaaaccatcggattgttgcttagtttatcttccgggtgcctattgctgaaccgttctcctctcaaaagatacagaatcaagtcccggggttgtcggcgaaggattcggctggcaaccagcaccctccatcctaccatccaccggctaggactatcatccttggcttcagcaagggtggagtggtggtgaaccagctcgtgacggaactttctcggtggggggcatcaggatcaacgaaccaggcggcggcggccgacgttccacgaccagcagcagcaggtccaggtccaccaccccatccgacccagaacgaccttcttctcctgggggctcctactcggagcagcgacgacctgctgtcaagtatctccgagctccactacgtggacgccggcctcaaccgcgccggagcgtacgtggccgaccgcgcggtgatcgggaggatacgcgagcacgtcgtacgcgccggcgacaagagcctccgcttcgccctccacggtaccccgaggcagtggtgtgatccgagccgcccgtggatccgggaggagaaggacgcgatggtccaggtactcgcggacgaggcccggaggagcgaggggaggcttgtgctgtctgagaagctgtatttcgagggcagacctcgcagcctgctcatgcattttgaggtcttggaagcgatggatatataatgtaatgtaagctgatactcgataggtctgataagcgatggatatataatttgttgtcccctgctgatgcatggcttgccggtgggattgtgtgttag

SEQ ID NO: 40432 - DNA, 1150 bp, Zea Mays
atggaccggtggaccggcgtcgtctacgtcccactctccagaggcggacccctcttccgcgtcgctgcctcgctcctcctctcgccagccaaaacgctcgccactcgcctacggagcctgaactattccgatggaagcaggttccacgagtcaacgcgatccttttcacgggcgaccgcgtccgcggcacgggcgatccggtgatcgagcggctctctgacgccgcccacctggctggggtcctcgccgggaagctccctggggaggccaacgcgtgggtggtcgacgccgcgcgctttgctgggccgtttgcggtgtaccgagagctcgttccgaccgtcgacgccgctggagaccccaaggggtatgaccccactggcttccccgccgccgccggtgttgccaacatccttgcacgcagcattggtgagatacagaatcaagtcccggggttgtcggcgaaggattcggctggcaaccagcaccctccatcctaccatccaccggctaggactatcatccttggcttcagcaagggtggagtggtggtgaaccagctcgtgacggaactttctcggtggggggcatcaggatcaacgaaccaggcggcggcggccgacgttccacgaccagcagcagcaggtccaggtccaccaccccatccgacccagaacgaccttcttctcctgggggctcctactcggagcagcgacgacctgctgtcaagtatctccgagctccactacgtggacgccggcctcaaccgcgccggagcgtacgtggccgaccgcgcggtgatcgggaggatacgcgagcacgtcgtacgcgccggcgacaagagcctccgcttcgccctccacggtaccccgaggcagtggtgtgatccgagccgcccgtggatccgggaggagaaggacgcgatggtccaggtactcgcggacgaggcccggaggagcgaggggaggcttgtgctgtctgagaagctgtatttcgagggcagacctcgcagcctgctcatgcattttgaggtcttggaagcgatggatatataatgtaatgtaagctgatactcgataggtctgataagcgatggatatataatttgttgtcccctgctgatgcatggcttgccggtgggattgtgtgttag

SEQ ID NO: 40433 - DNA, 821 bp, Zea Mays
atggaccggtggaccggcgtcgtctacgtcccactctccagaggcggacccctcttccgcgtcgctgcctcgctcctcctctcgccagccaaaacgctcgccatacagaatcaagtcccggggttgtcggcgaaggattcggctggcaaccagcaccctccatcctaccatccaccggctaggactatcatccttggcttcagcaagggtggagtggtggtgaaccagctcgtgacggaactttctcggtggggggcatcaggatcaacgaaccaggcggcggcggccgacgttccacgaccagcagcagcaggtccaggtccaccaccccatccgacccagaacgaccttcttctcctgggggctcctactcggagcagcgacgacctgctgtcaagtatctccgagctccactacgtggacgccggcctcaaccgcgccggagcgtacgtggccgaccgcgcggtgatcgggaggatacgcgagcacgtcgtacgcgccggcgacaagagcctccgcttcgccctccacggtaccccgaggcagtggtgtgatccgagccgcccgtggatccgggaggagaaggacgcgatggtccaggtactcgcggacgaggcccggaggagcgaggggaggcttgtgctgtctgagaagctgtatttcgagggcagacctcgcagcctgctcatgcattttgaggtcttggaagcgatggatatataatgtaatgtaagctgatactcgataggtctgataagcgatggatatataatttgttgtcccctgctgatgcatggcttgccggtgggattgtgtgttag

SEQ ID NO: 40434 - DNA, 1930 bp, Zea Mays
cggatgtgttgctactcccggtgtttggcggcgctcaatcaccaaaggttctgacaccacgttggactccccttcctcctcgtccgcgacctccgcagggtggctgttgcacttgcacctgcaccgtagtggggattccagcttccaccactgccccccgtccccgtcccggcgccggcagtagctcggaggccgggaccacgctcggtggcgtgtcgtacgtcagcacgcccatcccgacgacgacgcgttcgattcaggcggcgacaaatacctgctggccaagacctatttcgactgccgggagtaccgccgcgccgagcacgtgctgcagaaccagtctggagggaagcggaaaatgctgttaatcaggaactagttgctttggagaaagagctctcaacacaccgaagaactggctctattgattcgtttggactttacttgtatggcattgtcctacatgataaaggatgtgaaggtctaactcgaaagatcttggtagaacctgtcaatagctatccttggaactggagtgcttggtcagagctacaaactttatgcaccagcagtgacattttaaacaaattaaatctgaagaatcgctggatgaaagacttctttcttgctagtgcatatctggaactagagacgcatgaagaagacttctttcttgctagtgcagattctttctttggcttgtcttgcacaatagatgctggaccgcagaccgtcttgctaaaagaggactttcccatcccagtgcgtgtcccctttgtgaccaagaagaggaaacaatacaacatcttttcatctcttgcgtctttgcaagacagttctggtacttcttgttgagcaggtctgggttgcctaatctttcaccggacaacgctttttgcagcctagatgactggtggagcagggctgtggagaagattccccgtgatctccaatcaggagaaggagactgctaaaaatatattgcaagggataaaaatgttacagtcaggatttccatcaatggatattgaccattttgcactgtaaagtccacccgcagataagttggaacattggacagtaagtgtcaagaagtcaatagccaaaaagccaacagccggaagtcaaaagctagcttcgagccaaaatcccaaaactgcagtacaaacaaacaggccctgaagggaatgattctaacgagggctgcccaactgatggaagctcaattgcacatctcgatcgggaattacttccaatcttcggtcacaggctcacagcgtgatgcttattgtttgtatcctcgtcacgagactccatgctgctggatacgatgacctaccgcgcatgatgctggctcgtagttcctggagcttggcaacaaggagaaccaggcgcctacatggcgcgaagatgagcgtcattggaatgagccagacccctaatgcaagtatcaacatagctgtcttctgtgagtagagctctaaatatctgcgggtttggcttccttcaccggacagctatctggatagtgttctccccatggttgcttgcatatataagcttcattggaagaccttgccttgccttgcgtgcaatgtgcatgtcaaattattggttatctgtttatcagcacacttgtccaatgccttacctttgacatttcgtaaaactaagcactgcagattttaaaataaaaggctagagtgtagggcaacggtgtggtagtactttgcacagtgtgcatgatgtgctactggaataaaacaagtctgtttagtgatgatgcgcgatgcaagttgtcattttagcctacgtcaggatcgcgtgctgctggtttctcaccctattaggtttggtttatgtactctagtgtttaccccaattttttttgcatgtattgagctagattagagtgtttaccataattttt

SEQ ID NO: 40435 - DNA, 1935 bp, Zea Mays
cggatgtgttgctactcccggtgtttggcggcgctcaatcaccaaaggttctgacaccacgttggactccccttcctcctcgtccgcgacctccgcagggtggctgttgcacttgcacctgcaccgtagtggggattccagcttccaccactgccccccgtccccgtcccggcgccggcagtagctcggaggccgggaccacgctcggtggcgtgtcgtacgtcagcacgcccatcccgacgacgacgcgttcgattcaggcggcgacaaatacctgctggccaagacctatttcgactgccgggagtaccgccgcgccgagcacgtgctgcagaaccaggtcggtctggagggaagcggaaaatgctgttaatcaggaactagttgctttggagaaagagctctcaacacaccgaagaactggctctattgattcgtttggactttacttgtatggcattgtcctacatgataaaggatgtgaaggtctaactcgaaagatcttggtagaacctgtcaatagctatccttggaactggagtgcttggtcagagctacaaactttatgcaccagcagtgacattttaaacaaattaaatctgaagaatcgctggatgaaagacttctttcttgctagtgcatatctggaactagagacgcatgaagaagacttctttcttgctagtgcagattctttctttggcttgtcttgcacaatagatgctggaccgcagaccgtcttgctaaaagaggactttcccatcccagtgcgtgtcccctttgtgaccaagaagaggaaacaatacaacatcttttcatctcttgcgtctttgcaagacagttctggtacttcttgttgagcaggtctgggttgcctaatctttcaccggacaacgctttttgcagcctagatgactggtggagcagggctgtggagaagattccccgtgatctccaatcaggagaaggagactgctaaaaatatattgcaagggataaaaatgttacagtcaggatttccatcaatggatattgaccattttgcactgtaaagtccacccgcagataagttggaacattggacagtaagtgtcaagaagtcaatagccaaaaagccaacagccggaagtcaaaagctagcttcgagccaaaatcccaaaactgcagtacaaacaaacaggccctgaagggaatgattctaacgagggctgcccaactgatggaagctcaattgcacatctcgatcgggaattacttccaatcttcggtcacaggctcacagcgtgatgcttattgtttgtatcctcgtcacgagactccatgctgctggatacgatgacctaccgcgcatgatgctggctcgtagttcctggagcttggcaacaaggagaaccaggcgcctacatggcgcgaagatgagcgtcattggaatgagccagacccctaatgcaagtatcaacatagctgtcttctgtgagtagagctctaaatatctgcgggtttggcttccttcaccggacagctatctggatagtgttctccccatggttgcttgcatatataagcttcattggaagaccttgccttgccttgcgtgcaatgtgcatgtcaaattattggttatctgtttatcagcacacttgtccaatgccttacctttgacatttcgtaaaactaagcactgcagattttaaaataaaaggctagagtgtagggcaacggtgtggtagtactttgcacagtgtgcatgatgtgctactggaataaaacaagtctgtttagtgatgatgcgcgatgcaagttgtcattttagcctacgtcaggatcgcgtgctgctggtttctcaccctattaggtttggtttatgtactctagtgtttaccccaattttttttgcatgtattgagctagattagagtgtttaccataattttt

SEQ ID NO: 40436 - DNA, 1369 bp, Zea Mays
cggatgtgttgctactcccggtgtttggcggcgctcaatcaccaaaggttctgacaccacgttggactccccttcctcctcgtccgcgacctccgcagggtggctgttgcacttgcacctgcaccgtagtggggattccagcttccaccactgccccccgtccccgtcccggcgccggcagtagctcggaggccgggaccacgctcggtggcgtgtcgtacgtcagcacgcccatcccgacgacgacgcgttcgattcaggcggcgacaaatacctgctggccaagacctatttcgactgccgggagtaccgccgcgccgagcacgtgctgcagaaccagcctagatgactggtggagcagggctgtggagaagattccccgtgatctccaatcaggagaaggagactgctaaaaatatattgcaagggataaaaatgttacagtcaggatttccatcaatggatattgaccattttgcactgtaaagtccacccgcagataagttggaacattggacagtaagtgtcaagaagtcaatagccaaaaagccaacagccggaagtcaaaagctagcttcgagccaaaatcccaaaactgcagtacaaacaaacaggccctgaagggaatgattctaacgagggctgcccaactgatggaagctcaattgcacatctcgatcgggaattacttccaatcttcggtcacaggctcacagcgtgatgcttattgtttgtatcctcgtcacgagactccatgctgctggatacgatgacctaccgcgcatgatgctggctcgtagttcctggagcttggcaacaaggagaaccaggcgcctacatggcgcgaagatgagcgtcattggaatgagccagacccctaatgcaagtatcaacatagctgtcttctgtgagtagagctctaaatatctgcgggtttggcttccttcaccggacagctatctggatagtgttctccccatggttgcttgcatatataagcttcattggaagaccttgccttgccttgcgtgcaatgtgcatgtcaaattattggttatctgtttatcagcacacttgtccaatgccttacctttgacatttcgtaaaactaagcactgcagattttaaaataaaaggctagagtgtagggcaacggtgtggtagtactttgcacagtgtgcatgatgtgctactggaataaaacaagtctgtttagtgatgatgcgcgatgcaagttgtcattttagcctacgtcaggatcgcgtgctgctggtttctcaccctattaggtttggtttatgtactctagtgtttaccccaattttttttgcatgtattgagctagattagagtgtttaccataattttt

SEQ ID NO: 40437 - DNA, 2425 bp, Zea Mays
attaaaatatggtttcctgtgattttacctaaaagactgaacagaacttgattgcgggactaacgagtaataagagttgttccaacttgcagaagtccaatttattatgggttctttatagtgctttgtgctcatgtactttaagctaacagaatggtttgacatttgtaaaacctctggtcatgtattccacacggctattgatttgctatttattgataagttcttagctccacgggcatcagaaataatggaagatgtgaactaattattccttccaactagtagggaattttcactgtgatgatagaatttgatggatatattacattcaagaagttataattatgagggcttaaaactaagtcccttaaatgattggcaatttctattcaatattgatacttgtacatgaaagctatgtcctgccataaattcttgctacgccacatgtaagttataattgctaaatgaaaaattattcatatttgttctagaacaataaaacttctgccagcatcaaaatcttttatgctggctggtaatatttgtgtaatgtgaagatttgtaacatttatgagctaaaactctattattggtacttattttagtttttattgtcaattgtttcttttactgagtgtgcatgttttgggattgtaagggtagtagtatttgtgacattgtctgtaaatttccataatttaatcttttaaatgatttctgtgtgcaatttaatctgcccccttcccttgtccactgactctatgaaagttcgctaatgccccaaggtgttttctgcttggtccatagattaattaatgatctatttgctctgcaattttagtctggagggaagcggaaaatgctgttaatcaggaactagttgctttggagaaagagctctcaacacaccgaagaactggctctattgattcgtttggactttacttgtatggcattgtcctacatgataaaggatgtgaaggtctaactcgaaagatcttggtagaacctgtcaatagctatccttggaactggagtgcttggtcagagctacaaactttatgcaccagcagtgacattttaaacaaattaaatctgaagaatcgctggatgaaagacttctttcttgctagtgcatatctggaactagagacgcatgaagaagacttctttcttgctagtgcagattctttctttggcttgtcttgcacaatagatgctggaccgcagaccgtcttgctaaaagaggactttcccatcccagtgcgtgtcccctttgtgaccaagaagaggaaacaatacaacatcttttcatctcttgcgtctttgcaagacagttctggtacttcttgttgagcaggtctgggttgcctaatctttcaccggacaacgctttttgcagcctagatgactggtggagcagggctgtggagaagattccccgtgatctccaatcaggagaaggagactgctaaaaatatattgcaagggataaaaatgttacagtcaggatttccatcaatggatattgaccattttgcactgtaaagtccacccgcagataagttggaacattggacaaagtcaatagccaaaaagccaacagccggaagtcaaaagctagcttcgagccaaaatcccaaaactgcagtacaaacaaacaggccctgaagggaatgattctaacgagggctgcccaactgatggaagctcaattgcacatctcgatcgggaattacttccaatcttcggtcacaggctcacagcgtgatgcttattgtttgtatcctcgtcacgagactccatgctgctggatacgatgacctaccgcgcatgatgctggctcgtagttcctggagcttggcaacaaggagaaccaggcgcctacatggcgcgaagatgagcgtcattggaatgagccagacccctaatgcaagtatcaacatagctgtcttctgtgagtagagctctaaatatctgcgggtttggcttccttcaccggacagctatctggatagtgttctccccatggttgcttgcatatataagcttcattggaagaccttgccttgccttgcgtgcaatgtgcatgtcaaattattggttatctgtttatcagcacacttgtccaatgccttacctttgacatttcgtaaaactaagcactgcagattttaaaataaaaggctagagtgtagggcaacggtgtggtagtactttgcacagtgtgcatgatgtgctactggaataaaacaagtctgtttagtgatgatgcgcgatgcaagttgtcattttagcctacgtcaggatcgcgtgctgctggtttctcaccctattaggtttggtttatgtactctagtgtttaccccaattttttttgcatgtattgagctagattagagtgtttaccataattttt

SEQ ID NO: 40438 - DNA, 2437 bp, Zea Mays
attaaaatatggtttcctgtgattttacctaaaagactgaacagaacttgattgcgggactaacgagtaataagagttgttccaacttgcagaagtccaatttattatgggttctttatagtgctttgtgctcatgtactttaagctaacagaatggtttgacatttgtaaaacctctggtcatgtattccacacggctattgatttgctatttattgataagttcttagctccacgggcatcagaaataatggaagatgtgaactaattattccttccaactagtagggaattttcactgtgatgatagaatttgatggatatattacattcaagaagttataattatgagggcttaaaactaagtcccttaaatgattggcaatttctattcaatattgatacttgtacatgaaagctatgtcctgccataaattcttgctacgccacatgtaagttataattgctaaatgaaaaattattcatatttgttctagaacaataaaacttctgccagcatcaaaatcttttatgctggctggtaatatttgtgtaatgtgaagatttgtaacatttatgagctaaaactctattattggtacttattttagtttttattgtcaattgtttcttttactgagtgtgcatgttttgggattgtaagggtagtagtatttgtgacattgtctgtaaatttccataatttaatcttttaaatgatttctgtgtgcaatttaatctgcccccttcccttgtccactgactctatgaaagttcgctaatgccccaaggtgttttctgcttggtccatagattaattaatgatctatttgctctgcaattttagtctggagggaagcggaaaatgctgttaatcaggaactagttgctttggagaaagagctctcaacacaccgaagaactggctctattgattcgtttggactttacttgtatggcattgtcctacatgataaaggatgtgaaggtctaactcgaaagatcttggtagaacctgtcaatagctatccttggaactggagtgcttggtcagagctacaaactttatgcaccagcagtgacattttaaacaaattaaatctgaagaatcgctggatgaaagacttctttcttgctagtgcatatctggaactagagacgcatgaagaagacttctttcttgctagtgcagattctttctttggcttgtcttgcacaatagatgctggaccgcagaccgtcttgctaaaagaggactttcccatcccagtgcgtgtcccctttgtgaccaagaagaggaaacaatacaacatcttttcatctcttgcgtctttgcaagacagttctggtacttcttgttgagcaggtctgggttgcctaatctttcaccggacaacgctttttgcagcctagatgactggtggagcagggctgtggagaagattccccgtgatctccaatcaggagaaggagactgctaaaaatatattgcaagggataaaaatgttacagtcaggatttccatcaatggatattgaccattttgcactgtaaagtccacccgcagataagttggaacattggacagtaagtgtcaagaagtcaatagccaaaaagccaacagccggaagtcaaaagctagcttcgagccaaaatcccaaaactgcagtacaaacaaacaggccctgaagggaatgattctaacgagggctgcccaactgatggaagctcaattgcacatctcgatcgggaattacttccaatcttcggtcacaggctcacagcgtgatgcttattgtttgtatcctcgtcacgagactccatgctgctggatacgatgacctaccgcgcatgatgctggctcgtagttcctggagcttggcaacaaggagaaccaggcgcctacatggcgcgaagatgagcgtcattggaatgagccagacccctaatgcaagtatcaacatagctgtcttctgtgagtagagctctaaatatctgcgggtttggcttccttcaccggacagctatctggatagtgttctccccatggttgcttgcatatataagcttcattggaagaccttgccttgccttgcgtgcaatgtgcatgtcaaattattggttatctgtttatcagcacacttgtccaatgccttacctttgacatttcgtaaaactaagcactgcagattttaaaataaaaggctagagtgtagggcaacggtgtggtagtactttgcacagtgtgcatgatgtgctactggaataaaacaagtctgtttagtgatgatgcgcgatgcaagttgtcattttagcctacgtcaggatcgcgtgctgctggtttctcaccctattaggtttggtttatgtactctagtgtttaccccaattttttttgcatgtattgagctagattagagtgtttaccataattttt

SEQ ID NO: 40439 - DNA, 1494 bp, Zea Mays
acacgtgcccgccggctgctccacctgaccagctccggtgtcacactcgccagtcgccacctactccgcaggcatccctatctacaattacacacttccgttgtgccgcagcggcacacttccagtgccgagcaacaagctcgtttccgcatacgcccaaggcgaggcatttcatcgaacataacgaccccccgttccaaaccatgccgctcacgaagctccacccctccctcgccgccgcctccacgctgaccccgaagcatagcctgaacgcaaaccgcgttgtggccctgaccccgtcggcgtcccaccgcagcggcggtctccgggtctccgccgcctcggtggcggcggcgcagcccacaccggcgtcacctgcagcgggcgctgcggcggcactgagccgcgtggacgtgctgtcggaggcgctcccgttcatccagaggttcaagggcaagacggtggtggtcaagtacggtggcgcggcgatgaagtcgccggagctgcaggcgtcggtgatccgcgacctggtcctgctgtcttgcgtcggcctccgccccattctcgtccacggcggcgggcccgagatcaactcctggctggcgcgcgtcggcgtggagcctcagttccgcaacgggctccgcgtcaccgacgcggtcaccatggaggtcgtggagatggtgcttgtgggcaaggtcaacaagcagctcgtgtccctcatcagcctcgcgggtgccaccgccgtcgggctgtgcggcaaggacgcgcgcctcctcaccgcgcggccctcccctgacgccgcctccctcggcttcgtcggcgaagtgacgcgcgtggaccccgccgtactccaccccatcatcgcgtccgggcacatcccggtcatcgccaccgtagcggccgacgaggccgggcaggcttacaacatcaacgccgacaccgccgccggggagatcgcggcagcggtgggagccgagaagcttctgctcctcacggacgtgtccggcatactggcggaccgcgatgatccagggagcctggtgagggaggtggacgtcgccggggtgagacggatggtggccgaggagaaggtcggcggcgggatgattcccaaggtggagtgctgcatccgtgccatcgcccagggggtgcgcaccgccagcatcatcgacggccgcgtcccgcactcgctgctgctcgagatcctcacggacgagggcaccggcaccatgatcaccggataaagctgccttgttatttgtttgcaagagggggtttgtgcgacacattgacatcggttggaattgttttgcacaacgcacccaacggtctgttttttcgcaaacgaaatatgagcttttaaactcaaccaaatataagtgtctttccatgagatatctgagatttatgttgttcaaggaacgaatcaaatcaaagtcagcatgtaactttatttattatacaaataattttattatgctggccatttcaaca

SEQ ID NO: 40440 - DNA, 1573 bp, Zea Mays
attttgattcatgctgtgcatgaaagtttcatgcaacataccatcatgtaaaggtctcctgaaatcttgaactgcctcattattcatgacagcatcccaaacagccttatcgcatgacaaagacataaccattttctgcataatgaacaacgttaacacagtgatggagcgataagatgttgaggaacttgtaagtgacagcgagaccagaaattacaaatgctacatcaaaatatgacagggcactatagcatgtggtataatgtgtcactatctaagtgttgtaaaatacctctgctctcctaaacagccatttagcctgtttaatcactacatgataaccatatgtgtccatttaaccagccattttgattgtttaaacagatgtttagcccgaacaaaagactaaacaataattgacttagcatcaagtgtttaggtgaacaatgaaaatacataaaaggaatatgttcagttaaacctgaacggtgggatccttttgcaacagacgaaaagcatccaaaacactcctatgttcccttgaaagaagagcagttgagttaagaacataggcagcaggttcaatccagtcatctgatcctgatgaattgccagatgaatgtcctgatgcagacagcagtgctgtttgtctgtcagttgtatctgaatccagtccaagaggattctcaaataccctgaaggaaacgataactcgattagatggagcaaaaaatagcaatgcataagatacaaccctttggtatgagttaacgagcaaaggtctactccctctgtcccaaaatagttgtcattatatgattcaaatcttgtcccagaatagttgtcattctaatttcccaatgcacatttttcttttaacaatacctatttatctctatttctcttaatctttgcttgttttatgtgcaccgcacccttcactcctccagaatccacgtgtccaaacctaaaacatcaaccattttgggacagagtgggtactataggttcatttttaaagaaagaaaaaacttgttttcatggtacaaacttgaataagagaaaaaaaggcatttctcgctttatcaaatgatgacacatagtgcaatatgatcagaacaaggtattgcataatacaaaccctggaaagagactttagtctatataaattttttcacttcttttctatctaattagttgtttgttgtgtgtgtgtgccgggggggggggggggggggggagtcagatgtaaattttcttagcatcacaaagctagtcttacgagtcacctggaaagaatgaaccaaagtgagcaagcaatacgattcatagggctggaaaaagttacaagaaaacaaacactccattaccatggttccaattataattcttcatagagctgatctaatgttctataacagtccctacaacacaaagtaccataaggtacacagaacaatcctatgattcaagaaacaacatcaataggaactcattaatgatagtcaatgaattatgcataagaaaaaactgatactgcaactcttaaagttcatgtggatgactatccatg

SEQ ID NO: 40441 - DNA, 1459 bp, Zea Mays
atagggccttccaaccggtcgaacatctcccgtcataatgggctccacggcccatcacccccatgccccgtctccaaggaaagcgaaccattctgatcctgcaacccgtggcgccgccgccgccgcatcgcattgcccggacgccaaaacctagctcctgaactctcctcggctcctcgcccacctctcgctagccgttcccgctctgcagtctccgtggccggacgccgcggcgacatggcatcgacctgtttccgcgccgccgcccgcgtggcctccgccgccggccgctcggcggcggccacccgatcggctccctccgcggcccgtgccgccgccgccgcccaccgcgcctcgtccttctccaggatgccggtggagctcgggtgctgcgcgggattgtcgctgctgccgctgcacagcgcggtggcggcggccaggctgacgtcgcggctgagcacggcgtcgagctgccgtgctctctctcagggtatcctctgttgcacctatcccgggctttaacatcagatgggtctatccgttcgaaggtgataaatcgctggaagacttgctcatgtcatgctgttggactcaaatcatttctatagattagtcatctaaatgaacatctggagcactacacttcatcaccccttcgacaatcgtggctatcttagatttttttcccccaaggttttgagttcatgccttgtgagatatcatttgatgaaaatatgcaaggacggtttgccgacgtctgggctgtattcagccagtacaattctgcgttaaaaggtggttgatgatacctgaggattgtcattttgcgttaaaaggtggttgatgattatgttactatatgtattgcgtatgctttcttttgtttcaaatttttgaataaggtgacccgaacctgaacgtggctcgatctctagtgaacgctttgagcctccgggtttgctttggtatttttcttggttcagttttgcattggattgcttccttgtttatatattttgaaaaaaatacattgtggattcaaattttagccacatggctatatattcaaattccaatgggtaagctacatcacatcacatgcttacaactaggttgaggaaactattaaaatacgcaaggaaaactttgattgatttgtgtgacgaagcactcaaaacacaagtgatttattctagtttggaggtcaaagacctatttcatcggtgttcttcgatttcccccgtacaatcccctttatatccctagtcttgctattacattcaagcttggcctttaccaatgccaaaggcaatttagtcattacacggtcaaaagtacattttttgtcatcatcctcgtgacttcgccgaacgtagtggaccttcggtctgaatagttttcgtaagccaggctggtttcgtcttcgccaccctttgacgtgagtagagatggcaatggg

SEQ ID NO: 40442 - DNA, 3015 bp, Zea Mays
atagggccttccaaccggtcgaacatctcccgtcataatgggctccacggcccatcacccccatgccccgtctccaaggaaagcgaaccattctgatcctgcaacccgtggcgccgccgccgccgcatcgcattgcccggacgccaaaacctagctcctgaactctcctcggctcctcgcccacctctcgctagccgttcccgctctgcagtctccgtggccggacgccgcggcgacatggcatcgacctgtttccgcgccgccgcccgcgtggcctccgccgccggccgctcggcggcggccacccgatcggctccctccgcggcccgtgccgccgccgccgcccaccgcgcctcgtccttctccaggatgccggtggagctcgggtgctgcgcgggattgtcgctgctgccgctgcacagcgcggtggcggcggccaggctgacgtcgcggctgagcacggcgtcgagctgccgtgctctctctcagggtatcctctgttgcacctatcccgggctttaacatcgtaagattattatgctcttgtccgtgtttgctttccatttggttgaacattgcgtccgtgtattttcttttatagtagtttcttagtttactgcgtgcttgtttgatagcagtatgtgtcgaaaacaaatgtcattcattgttgtattgtaacagcgaaatgtcatcctgaccattttaactcgtcaacgatcatgttcaacacaaaaccacttccattttcgtgaaagctgcctgctgctctttaacacacaacacatgaataccttatggtttctgaatggagaagtacatataaacaatgaagccttgaatgctggatgcaaacacctttcattgtacacattaaaaatcttgccttgaacgctggatgtaacttgcaagcactgctctgaactctgaatgcaagtacatataaacattttgatggctatatttaagtggaaatgatcatgtcctttagatggtttctatattctgacgattcttgtgcatatagcctatatagggaaactaatcggttgcccgtctcttaatacagtttctatatttacaatatctatttttttgtagaacacaaacaaatatgtattctagtggttagaagctaagcctgtgagagaaagggttagggttcgaaccctaggctctgttttttttcttttctggcggtgcacgtggtagggaggcgctcgaagaaattctcacttaaatatagtagagaaaatgccgaataatggtgtgactatatggagtaccgtcggatttactagcagtgtttcaccatacattgaaactatatggagtaccggcagatttctttattatctttcccttcatagggatatttttctttgatgggtaggaacaaagatgtagcagattcctagtaaacccctttcatatttcagtctctttgggaggttgtttagtagctcaatacatctcaaatgctgatgctcggtagaaaaaaaatctcacttgttgctttgcagttcaggacaagataatgttttccatgctgtgcgttttttgagagattcgcttattcaaaaaaaattggtgggttgaggtcaattaagttaagacatttggtttctgcaggcactgctgcaggcacatgactttgataaaagatattaccgggagcttgctgttttgcttcatacaatcatgaagaatgagtactttaacactgaaattgtaatggaaggctagtgttatgttatgtacctagcattactagttgcctctgttgaggaataccttgatgcaataatgtagcgtcctttttgaatgttctctacagtaattgatagttcactacttcacttgagtcaatatgtctgtgtacagtgcttgaattatcgtttatgcaagtctgctctttttttttggcatttttgagactcctggttgcatcctggtgtgtgctttcttgtttttttggtattcaacagagatttgatctggttgctgttgtagtttaccgtatggttactcttcttttctcagatgaaaacgatggtacgtgaaacatttgcccagtgtcttaagagatgggtctatccgttcgaaggtgataaatcgctggaagacttgctcatgtcatgctgttggactcaaatcatttctatagattagtcatctaaatgaacatctggagcactacacttcatcaccccttcgacaatcgtggctatcttagatttttttcccccaaggttttgagttcatgccttgtgagatatcatttgatgaaaatatgcaaggacggtttgccgacgtctgggctgtattcagccagtacaattctgcgttaaaaggtggttgatgatacctgaggattgtcattttgcgttaaaaggtggttgatgattatgttactatatgtattgcgtatgctttcttttgtttcaaatttttgaataaggtgacccgaacctgaacgtggctcgatctctagtgaacgctttgagcctccgggtttgctttggtatttttcttggttcagttttgcattggattgcttccttgtttatatattttgaaaaaaatacattgtggattcaaattttagccacatggctatatattcaaattccaatgggtaagctacatcacatcacatgcttacaactaggttgaggaaactattaaaatacgcaaggaaaactttgattgatttgtgtgacgaagcactcaaaacacaagtgatttattctagtttggaggtcaaagacctatttcatcggtgttcttcgatttcccccgtacaatcccctttatatccctagtcttgctattacattcaagcttggcctttaccaatgccaaaggcaatttagtcattacacggtcaaaagtacattttttgtcatcatcctcgtgacttcgccgaacgtagtggaccttcggtctgaatagttttcgtaagccaggctggtttcgtcttcgccaccctttgacgtgagtagagatggcaatggg

SEQ ID NO: 40443 - DNA, 1424 bp, Zea Mays
gctccacggcccatcacccccatgccccgtctccaaggaaagcgaaccattctgatcctgcaacccgtggcgccgccgccgccgcatcgcattgcccggacgccaaaacctagctcctgaactctcctcggctcctcgcccacctctcgctagccgttcccgctctgcagtctccgtggccggacgccgcggcgacatggcatcgacctgtttccgcgccgccgcccgcgtggcctccgccgccggccgctcggcggcggccacccgatcggctccctccgcggcccgtgccgccgccgccgcccaccgcgcctcgtccttctccaggatgccggtggagctcgggtgctgcgcgggattgtcgctgctgccgctgcacagcgcggtggcggcggccaggctgacgtcgcggctgagcacggcgtcgagctgccgtgctctctctcaggatgaaaacgatggtacgtgaaacatttgcccagtgtcttaagagatgggtctatccgttcgaaggtgataaatcgctggaagacttgctcatgtcatgctgttggactcaaatcatttctatagattagtcatctaaatgaacatctggagcactacacttcatcaccccttcgacaatcgtggctatcttagatttttttcccccaaggttttgagttcatgccttgtgagatatcatttgatgaaaatatgcaaggacggtttgccgacgtctgggctgtattcagccagtacaattctgcgttaaaaggtggttgatgatacctgaggattgtcattttgcgttaaaaggtggttgatgattatgttactatatgtattgcgtatgctttcttttgtttcaaatttttgaataaggtgacccgaacctgaacgtggctcgatctctagtgaacgctttgagcctccgggtttgctttggtatttttcttggttcagttttgcattggattgcttccttgtttatatattttgaaaaaaatacattgtggattcaaattttagccacatggctatatattcaaattccaatgggtaagctacatcacatcacatgcttacaactaggttgaggaaactattaaaatacgcaaggaaaactttgattgatttgtgtgacgaagcactcaaaacacaagtgatttattctagtttggaggtcaaagacctatttcatcggtgttcttcgatttcccccgtacaatcccctttatatccctagtcttgctattacattcaagcttggcctttaccaatgccaaaggcaatttagtcattacacggtcaaaagtacattttttgtcatcatcctcgtgacttcgccgaacgtagtggaccttcggtctgaatagttttcgtaagccaggctggtttcgtcttcgccaccctttgacgtgagtagagatggcaatggg

SEQ ID NO: 40444 - DNA, 3152 bp, Zea Mays
ggaaagcgaaccattctgatcctgcaacccgtggcgccgccgccgccgcatcgcattgcccggacgccaaaacctagctcctgaactctcctcggctcctcgcccacctctcgctagccgttcccgctctgcagtctccgtggccggacgccgcggcgacatggcatcgacctgtttccgcgccgccgcccgcgtggcctccgccgccggccgctcggcggcggccacccgatcggctccctccgcggcccgtgccgccgccgccgcccaccgcgcctcgtccttctccaggatgccggtggagctcgggtgctgcgcgggattgtcgctgctgccgctgcacagcgcggtggcggcggccaggctgacgtcgcggctgagcacggcgtcgagctgccgtgctctctctcagggtatcctctgttgcacctatcccgggctttaacatcgtaagattattatgctcttgtccgtgtttgctttccatttggttgaacattgcgtccgtgtattttcttttatagtagtttcttagtttactgcgtgcttgtttgatagcagtatgtgtcgaaaacaaatgtcattcattgttgtattgtaacagcgaaatgtcatcctgaccattttaactcgtcaacgatcatgttcaacacaaaaccacttccattttcgtgaaagctgcctgctgctctttaacacacaacacatgaataccttatggtttctgaatggagaagtacatataaacaatgaagccttgaatgctggatgcaaacacctttcattgtacacattaaaaatcttgccttgaacgctggatgtaacttgcaagcactgctctgaactctgaatgcaagtacatataaacattttgatggctatatttaagtggaaatgatcatgtcctttagatggtttctatattctgacgattcttgtgcatatagcctatatagggaaactaatcggttgcccgtctcttaatacagtttctatatttacaatatctatttttttgtagaacacaaacaaatatgtattctagtggttagaagctaagcctgtgagagaaagggttagggttcgaaccctaggctctgttttttttcttttctggcggtgcacgtggtagggaggcgctcgaagaaattctcacttaaatatagtagagaaaatgccgaataatggtgtgactatatggagtaccgtcggatttactagcagtgtttcaccatacattgaaactatatggagtaccggcagatttctttattatctttcccttcatagggatatttttctttgatgggtaggaacaaagatgtagcagattcctagtaaacccctttcatatttcagtctctttgggaggttgtttagtagctcaatacatctcaaatgctgatgctcggtagaaaaaaaatctcacttgttgctttgcagttcaggacaagataatgttttccatgctgtgcgttttttgagagattcgcttattcaaaaaaaattggtgggttgaggtcaattaagttaagacatttggtttctgcaggcactgctgcaggcacatgactttgataaaagatattaccgggagcttgctgttttgcttcatacaatcatgaagaatgagtactttaacactgaaattgtaatggaaggctagtgttatgttatgtacctagcattactagttgcctctgttgaggaataccttgatgcaataatgtagcgtcctttttgaatgttctctacagtaattgatagttcactacttcacttgagtcaatatgtctgtgtacagtgcttgaattatcgtttatgcaagtctgctctttttttttggcatttttgagactcctggttgcatcctggtgtgtgctttcttgtttttttggtattcaacagagatttgatctggttgctgttgtagtttaccgtatggttactcttcttttctcagatgaaaacgatggtacgtgaaacatttgcccagtgtcttaaggtgggtggtgcttggatgtttggcaaagatgcacactcttgctaccacagcaagcacatgtagtcatagagcttatgatttagagtcaaatcttgtaaagtccttttgcaactgtggggggctaacacaacaactttgtatgcttaaagcttataattaaagaatgattcagtccaatcctctgatgtatgctttatttctttgttttatatagagatgggtctatccgttcgaaggtgataaatcgctggaagacttgctcatgtcatgctgttggactcaaatcatttctatagattagtcatctaaatgaacatctggagcactacacttcatcaccccttcgacaatcgtggctatcttagatttttttcccccaaggttttgagttcatgccttgtgagatatcatttgatgaaaatatgcaaggacggtttgccgacgtctgggctgtattcagccagtacaattctgcgttaaaaggtggttgatgatacctgaggattgtcattttgcgttaaaaggtggttgatgattatgttactatatgtattgcgtatgctttcttttgtttcaaatttttgaataaggtgacccgaacctgaacgtggctcgatctctagtgaacgctttgagcctccgggtttgctttggtatttttcttggttcagttttgcattggattgcttccttgtttatatattttgaaaaaaatacattgtggattcaaattttagccacatggctatatattcaaattccaatgggtaagctacatcacatcacatgcttacaactaggttgaggaaactattaaaatacgcaaggaaaactttgattgatttgtgtgacgaagcactcaaaacacaagtgatttattctagtttggaggtcaaagacctatttcatcggtgttcttcgatttcccccgtacaatcccctttatatccctagtcttgctattacattcaagcttggcctttaccaatgccaaaggcaatttagtcattacacggtcaaaagtacattttttgtcatcatcctcgtgacttcgccgaacgtagtggaccttcggtctgaatagttttcgtaagccaggctggtttcgtcttcgccaccctttgacgtgagtagagatggcaatggg

SEQ ID NO: 40445 - DNA, 1411 bp, Zea Mays
ttctgatcctgcaacccgtggcgccgccgccgccgcatcgcattgcccggacgccaaaacctagctcctgaactctcctcggctcctcgcccacctctcgctagccgttcccgctctgcagtctccgtggccggacgccgcggcgacatggcatcgacctgtttccgcgccgccgcccgcgtggcctccgccgccggccgctcggcggcggccacccgatcggctccctccgcggcccgtgccgccgccgccgcccaccgcgcctcgtccttctccaggatgccggtggagctcgggtgctgcgcgggattgtcgctgctgccgctgcacagcgcggtggcggcggccaggctgacgtcgcggctgagcacggcgtcgagctgccgtgctctctctcagggtatcctctgttgcacctatcccgggctttaacatcatgaaaacgatggtacgtgaaacatttgcccagtgtcttaagagatgggtctatccgttcgaaggtgataaatcgctggaagacttgctcatgtcatgctgttggactcaaatcatttctatagattagtcatctaaatgaacatctggagcactacacttcatcaccccttcgacaatcgtggctatcttagatttttttcccccaaggttttgagttcatgccttgtgagatatcatttgatgaaaatatgcaaggacggtttgccgacgtctgggctgtattcagccagtacaattctgcgttaaaaggtggttgatgatacctgaggattgtcattttgcgttaaaaggtggttgatgattatgttactatatgtattgcgtatgctttcttttgtttcaaatttttgaataaggtgacccgaacctgaacgtggctcgatctctagtgaacgctttgagcctccgggtttgctttggtatttttcttggttcagttttgcattggattgcttccttgtttatatattttgaaaaaaatacattgtggattcaaattttagccacatggctatatattcaaattccaatgggtaagctacatcacatcacatgcttacaactaggttgaggaaactattaaaatacgcaaggaaaactttgattgatttgtgtgacgaagcactcaaaacacaagtgatttattctagtttggaggtcaaagacctatttcatcggtgttcttcgatttcccccgtacaatcccctttatatccctagtcttgctattacattcaagcttggcctttaccaatgccaaaggcaatttagtcattacacggtcaaaagtacattttttgtcatcatcctcgtgacttcgccgaacgtagtggaccttcggtctgaatagttttcgtaagccaggctggtttcgtcttcgccaccctttgacgtgagtagagatggcaatggg

SEQ ID NO: 40446 - DNA, 1805 bp, Zea Mays
gtggcgccgccgccgccgcatcgcattgcccggacgccaaaacctagctcctgaactctcctcggctcctcgcccacctctcgctagccgttcccgctctgcagtctccgtggccggacgccgcggcgacatggcatcgacctgtttccgcgccgccgcccgcgtggcctccgccgccggccgctcggcggcggccacccgatcggctccctccgcggcccgtgccgccgccgccgcccaccgcgcctcgtccttctccaggatgccggtggagctcgggtgctgcgcgggattgtcgctgctgccgctgcacagcgcggtggcggcggccaggctgacgtcgcggctgagcacggcgtcgagctgccgtgctctctctcagggtatcctctgttgcacctatcccgggctttaacatcgcactgctgcaggcacatgactttgataaaagatattaccgggagcttgctgttttgcttcatacaatcatgaagaatgagtactttaacactgaaattgtaatggaaggctagtgttatgttatgtacctagcattactagttgcctctgttgaggaataccttgatgcaataatgtagcgtcctttttgaatgttctctacagtaattgatagttcactacttcacttgagtcaatatgtctgtgtacagtgcttgaattatcgtttatgcaagtctgctctttttttttggcatttttgagactcctggttgcatcctggtgtgtgctttcttgtttttttggtattcaacagagatttgatctggttgctgttgtagtttaccgtatggttactcttcttttctcagatgaaaacgatggtacgtgaaacatttgcccagtgtcttaagagatgggtctatccgttcgaaggtgataaatcgctggaagacttgctcatgtcatgctgttggactcaaatcatttctatagattagtcatctaaatgaacatctggagcactacacttcatcaccccttcgacaatcgtggctatcttagatttttttcccccaaggttttgagttcatgccttgtgagatatcatttgatgaaaatatgcaaggacggtttgccgacgtctgggctgtattcagccagtacaattctgcgttaaaaggtggttgatgatacctgaggattgtcattttgcgttaaaaggtggttgatgattatgttactatatgtattgcgtatgctttcttttgtttcaaatttttgaataaggtgacccgaacctgaacgtggctcgatctctagtgaacgctttgagcctccgggtttgctttggtatttttcttggttcagttttgcattggattgcttccttgtttatatattttgaaaaaaatacattgtggattcaaattttagccacatggctatatattcaaattccaatgggtaagctacatcacatcacatgcttacaactaggttgaggaaactattaaaatacgcaaggaaaactttgattgatttgtgtgacgaagcactcaaaacacaagtgatttattctagtttggaggtcaaagacctatttcatcggtgttcttcgatttcccccgtacaatcccctttatatccctagtcttgctattacattcaagcttggcctttaccaatgccaaaggcaatttagtcattacacggtcaaaagtacattttttgtcatcatcctcgtgacttcgccgaacgtagtggaccttcggtctgaatagttttcgtaagccaggctggtttcgtcttcgccaccctttgacgtgagtagagatggcaatggg

SEQ ID NO: 40447 - DNA, 1448 bp, Zea Mays
acggcacggggggcaacacttttggtagtagtagcgcacacacaccactgcacaaagcacgtcactgctcggcttgccttgtcgtcctctcttccttgcaatggctaccgaaatggtcctgctgtgtcgctttgtggccttcgtggcggctctcgcctgcctcctccgccccggcgcgcccgtcgagctccaccgcaagctctccgggtggtccgacgacgccggcgcgacgtggtacggcgcagccaccggcgctgggagcgacggtggtgcatgcgggtaccagaacgccgtcgaccagccgcctttcgcgtccatgatcgccgccggcagcccgtccatcttcctgaacggcaagggctgcggctcctgctaccaggtgaaatgcaccggccacgcgtcgtgctccggcagcccggtgacggtggtcctcaccgacgagtgccccggcggcgcgtgcctggacgagcccgtgcacttcgacctgagcggcacggcgttcggagccatggcgaagcccggccaggccgaccagctccgcagcgccggacgcctcaggatccagtacacccggttcacgagctccatcgcttattcgcttatacaggatccagaagctcctgatgcgagacttcacacgggagctcaagctcaagagccagaggagcatgcccacctcgccgaacggcagctgcgccgagtacagcagaggggctgccggctggccggctcctctgtgcccctcgcgacttagccggacgctgggctggcccctgcccctggtcgaccggctgctgtgccgcgccgtgcagccgcaaaaagtgcacaagcagaagcaagagaccaagaagcaaaagcaggagtgcagaagtagaaccgcgacggctgacgacgaggcagtgaggtggacggtgatgggcggcgaccggcggctgactgctgtgctgtgcgcctgtgcgggttgctgcggccgggacgggcggaccgcggacggctgtgaggcgcgggtgcggcttcctaggcgcctggcgtcacgtggtgcggctgcaggctgctcgctgcctcgctgctgttaggtgttagatttaattaatgggccgggccgatcaaccagattagcagaagcaggccaacgcccaacaggaagacaggaagtaggcccaagccaatccacaatccgggtacccgcccgaatagtacccgtatcctatccgggattttcgggtactgaccgggtatttgtgattccgtatcctacccgtatccgaggtttagtatccgggtagtacccgtacccgtcccgttaaacaaaatatccgtatccgtatccgaaatttcgtcccgttttcgtacccgtatccggtacccgtcccgggtacccgtcccgttttcatccctagccagcgggtggtgagtggtgacaccgctcggactagtgctgggaattg

SEQ ID NO: 40448 - DNA, 1651 bp, Zea Mays
acggcacggggggcaacacttttggtagtagtagcgcacacacaccactgcacaaagcacgtcactgctcggcttgccttgtcgtcctctcttccttgcaatggctaccgaaatggtcctgctgtgtcgctttgtggccttcgtggcggctctcgcctgcctcctccgccccggcgcgcccgtcgagctccaccgcaagctctccgggtggtccgacgacgccggcgcgacgtggtacggcgcagccaccggcgctgggagcgacggtaagttagacgcacggccggacgctgacggacggacggcgcgcgtgaactttggacccattttttttattccaccggcatgggaaaaaaaagaattcctaacaaatccctccccggggcccggcccgggtacgtgcacgccgttttttttgtttttgttttgttgttgtattgtaggtggtgcatgcgggtaccagaacgccgtcgaccagccgcctttcgcgtccatgatcgccgccggcagcccgtccatcttcctgaacggcaagggctgcggctcctgctaccagtagtaataaacaacaccggcaccgcgctgccgtacgtcgttgtggtaataaattgtgcaggtgaaatgcaccggccacgcgtcgtgctccggcagcccggtgacggtggtcctcaccgacgagtgccccggcggcgcgtgcctggacgagcccgtgcacttcgacctgagcggcacggcgttcggagccatggcgaagcccggccaggccgaccagctccgcagcgccggacgcctcaggatccagtacacccggatccagaagctcctgatgcgagacttcacacgggagctcaagctcaagagccagaggagcatgcccacctcgccgaacggcagctgcgccgagtacagcagaggggctgccggctggccggctcctctgtgcccctcgcgacttagccggacgctgggctggcccctgcccctggtcgaccggctgctgtgccgcgccgtgcagccgcaaaaagtgcacaagcagaagcaagagaccaagaagcaaaagcaggagtgcagaagtagaaccgcgacggctgacgacgaggcagtgaggtggacggtgatgggcggcgaccggcggctgactgctgtgctgtgcgcctgtgcgggttgctgcggccgggacgggcggaccgcggacggctgtgaggcgcgggtgcggcttcctaggcgcctggcgtcacgtggtgcggctgcaggctgctcgctgcctcgctgctgttaggtgttagatttaattaatgggccgggccgatcaaccagattagcagaagcaggccaacgcccaacaggaagacaggaagtaggcccaagccaatccacaatccgggtacccgcccgaatagtacccgtatcctatccgggattttcgggtactgaccgggtatttgtgattccgtatcctacccgtatccgaggtttagtatccgggtagtacccgtacccgtcccgttaaacaaaatatccgtatccgtatccgaaatttcgtcccgttttcgtacccgtatccggtacccgtcccgggtacccgtcccgttttcatccctagccagcgggtggtgagtggtgacaccgctcggactagtgctgggaattg

SEQ ID NO: 40449 - DNA, 1463 bp, Zea Mays
ccatatcaacacaggagcagatgcgtcctgaaaatcggaaagcagttcaagccgtcaaagcagcaaaaatatctctgcttcgatttgcatgagccaagcgataacaacgctatcaccgcgattcaaggtgtaacgaggaaagaaagataaattttgaagaaaggaaaaatcctgagaagaaaataaataggagagagagagaagctctctgttccactcttttctaacttccccgtagctctctctctcgctccctcacgctctctctcctcaccatttttgctcctgccgagagctcgccaagctccgaaaggcgcaagttttcttgccatggggaagaacacatgcaagctctgctcccgccgcttcgccagtccccgcgccctcgccgggcacatgcgctctcattacatggccgcagctaaggagacggcggcgacggcgacggcggcggcggcggcggccgcagcagcggcgaagcagcagatctcttcggcatcatccgcgtcgacctccatcgccgccgccgacgaggaagtcggcttgatgatgaccgcttccaccaacgggctccgggagaatccgaagcgcagccttggcgtggcggatgtcggtttctcggatcgcgagagcgagaccgagtcgaccccgccgcaggccaagcgcgtgaacgccgccggcatctggggcgaacccgaggcgtcgagctcgctgtcagaggtcgcaacgccggaggacgtggcgctatccctcatgatgctctctcgtgactcgtggccgtcgggtgtactcgccgagaaggacggctccgacgacagaagcgacgacggctacgcgccgcccgccccaccccggcgggccccggcgccggtggtggagaagcggacgcagttccagtgcgtcgcgtgcaagaaggtcttccgctcctaccaggcgcttggcggacaccgcgccagcaacgtgcgcggcggcagaggcggctgctgcgcgcctcccgtggctcctccggccccacccccgcagccccagccgccgctgtcgccattgccggagcaccgtgacggaggcgaggacgaggacatgaacgccaagcagcagccgcgcgagtgcccccactgcggccgcgtgttctcggggcaggctctcggggagcacatgcggttccatgtgtgcgcctcgtcgccgcttgccggcaccggcaccggcaccgccaccgcctccaccacctcagccgccactcctgcgtccccgaccaacagtccctccatgatcgatctgaacgtggcgccgcagtccgaggaggtggagcactctgccgtgtcagatccccgcttcaatccaggtgcctgaagctgaagcaggcagatcagcgccgataaaggccctacttcgaggaagttgttgacttcatcattggagtcaattacaacgttgtgatgacaagaaagaacacaccatgtttg

SEQ ID NO: 40450 - DNA, 1247 bp, Zea Mays
aggtggtgttcagagagcagcatggaattctgaattggagaagagcctcgttgatttgttgtttgagcacaatgtacctccatatagggctcaaaatggctagagtccagatgcttggaacaaaattgttactgaattcaacaagaagcatgagtatgtcacattcaacaagattcaaattcaggagaaggagagggaattgaaaagggattacaagatgttgaaagaggctagaaagcaaagtggcgtttcctggaatgagaaacgatgcatgattgttgctgatccaccaatatgggaaaacatcataaaatcatttcctagggccaagaaatttcaaaagaagtctttccctctctttgatgctcttggggaactatatgatgggcacattgctcaagggacctagaacataacatctacacaactaccacaagaatggaacacaatttcaaatgaagaagaacaagtgaacaccacaagaatggatgaggaaggcattattcaacaacaaccacaagaagaggattcaagattggaacaagatgaagatcctatgattgaaaggactgaacagaggtctactgcaacgagaaggtctactgcatcaacaatcaatcaagataaggaagcaaagaggatgaagaaggattctttggaaggacttgttgggagatatctagatctgaaatcaaaacaagttgaggatgagattacacaaatggcgaaaggaaaagaatctgctcaaggtaatgacttctccatcatgagatgcatttctgttcttagatccatgaatgtgacagcagatgagaagataaaagcagctgaggtgttcgacataccaaacaacagagagacatttatcagttttagtgttgatgaaccagaaactgccctcctatggttaagacggaagattgataagctctaagacaggaaatattggtcatatggagacagttctgcacattgttttgagtgctagtatgagctatatatatgttgcatttctccatgtttgggctcagcatgtaatagaactgaaggaaggttgttgcgagacttgtatgacatgtttaaatttctggataaaatctagcatatactaagtctattacatgcttaaatttttgaaaaaatatgtatcgagaattggatggaatgcttaaatttctagagaaatgacatgttctatgtttaaatttctggagaaatgacatgttttatgcttaaatgttgttgat

SEQ ID NO: 40451 - DNA, 1061 bp, Zea Mays
aggtggtgttcagagagcagcatggaattctgaattggagaagagcctcgttgatttgttgtttgagcacaatgtacctccatatagggctcaaaatggctagagtccagatgcttggaacaaaattgttactgaattcaacaagaagcatgagtatgtcacattcaacaagattcaaattcaggagaaggagagggaattgaaaagggattacaagatgttgaaagaggctagaaagcaaagtggcgtttcctggaatgagaaacgatgcatgattgttgctgatccaccaatatgggaaaacatcataaaatcatttcctagggccaagaaatttcaaaagaagtctttccctctctttgatgctcttggggaactatatgatgggcacattgctcaagggacctagaacataacatctacacaactaccacaagaatggaacacaatttcaaatgaagaagaacaagtgaacaccacaagaatggatgaggaaggcattattcaacaacaaccacaagaagaggattcaagattggaacaagatgaagatcctatgattgaaaggactgaacagaggtctactgcaacgagaaggtctactgcatcaacaatcaatcaagataaggaagcaaagaggatgaagaaggattctttggaaggacttgttgggagatatctagatctgaaatcaaaacaagttgaggatgagattacacaaatggcgaaaggaaaagaatctgctcaagacaggaaatattggtcatatggagacagttctgcacattgttttgagtgctagtatgagctatatatatgttgcatttctccatgtttgggctcagcatgtaatagaactgaaggaaggttgttgcgagacttgtatgacatgtttaaatttctggataaaatctagcatatactaagtctattacatgcttaaatttttgaaaaaatatgtatcgagaattggatggaatgcttaaatttctagagaaatgacatgttctatgtttaaatttctggagaaatgacatgttttatgcttaaatgttgttgat

SEQ ID NO: 40452 - DNA, 1644 bp, Zea Mays
cggacttgggtttgggttccccgaatccaaccactcttctgccaaccaacgcgcgaaacggcgaaagggtttgcagttggaggtccggaactccggattagcacgggcgggcaccgccgcggccaatcatcatcatcattactcgccctcctaaacattccttagtttatgccaacccaaactccaccccctcctccagactccagagcccgagcccatccgatccggaacttcttcttcccctaccaaacggatcgagccctgcgctacgctgccaaccgtactacactcgtcagtcgtcatagcctggctttcgtttgtctctctcgtaacttttgcttccgggagcagaaaaacgtcgccggggccctcccccgtcttgggatatttcatcagttttcaggttcttggctcttgggatcggatcttccatattctttggttctcgagactccagaggagaggagggagagagagagagagagagagagagagagagagagagagagagagagagagaggaggaagcgggggtgatcgttgtttcttgatcgccgccatgagtaacacgctgcttcgggtctgcccgtccgacctgaagatgccattcgaggtcaagaagcacagttcggcatgtctcgagctcgtcaacaggaccgatcggtgggtggctttcaaggtcaagacgacgaaccctaggaagtactcggtgcggcctgcctccggcgtcgtgcagcccaggggatcctgcggcatcacaagtgctcacgatgcaagcgcccaaggaggtgcccccggactaccagtgcaaggacaagtttctcgttcagagcgtcgcggcggcggaggggacgacgcacaagggcattgtccctggcatgttcagcaaagcgccaggtaagttggttgaggagttcaagttgagggtggtctatgtccctgccaaccctccgtcaccagtgcccgaggaaacagaggaagatgacggatctcttgattcagatgtggaccatgaagtggggacaccatcgacgtccaactgtgcagcaggacaagggcatacatgtagatcacaagcttcagatgacgagggtgactctacatccaagttaggactggaaagtagatatgcagaggaaaacaagatggttcagaaagacctgatacaggatgcctctatatccgagttagaactggaaagtagatatgcagaggaaaacaagaagatccagaaagagctggatctcctccggaagacacatgcatctcctggggacttctcggcgacgtctgtgctgcttgtcttcttgttatcttcacttgttggatacctgatgttcggaagcaaaacttagcaagttcttagaagcaagataatgacagcacatcattctgcggctccggcacagctctatcgtcttttgtgtattgctccttttagtacaaaatatatatagttaagtagtccacaatacatgacagatactcctcccttgctagtcccgtatgaacagatactcctcccttcttgagtaggtgtttttttctttctaagggctagtttgggagccacaaaaccggagtggattgaattgtctgaaatctccttcttaattaattttaaataaaaagtgaattttaaca

SEQ ID NO: 40453 - DNA, 1724 bp, Zea Mays
gccaaccaacgcgcgaaacggcgaaagggtttgcagttggaggtccggaactccggattagcacgggcgggcaccgccgcggccaatcatcatcatcattactcgccctcctaaacattccttagtttatgccaacccaaactccaccccctcctccagactccagagcccgagcccatccgatccggaacttcttcttcccctaccaaacggatcgagccctgcgctacgctgccaaccgtactacactcgtcagtcgtcatagcctggctttcgtttgtctctctcgtaacttttgcttccgggagcagaaaaacgtcgccggggccctcccccgtcttgggatatttcatcagttttcaggttcttggctcttgggatcggatcttccatattctttggttctcgagactccagaggagaggagggagagagagagagagagagagagagagagagagagagagagagagagagagaggaggaagcgggggtgatcgttgtttcttgatcgccgccatgagtaacacgctgcttcgggtctgcccgtccgacctgaagatgccattcgaggtcaagaagcacagttcggcatgtctcgagctcgtcaacaggaccgatcggtgggtggctttcaaggtgacaaatctgacgaacctcgctccagcgaaagatgcagtcttgtgcatcggagccaggctaaagtgattggttctctctctctctttttttctctctctctctccctgtgtctcgccgaggctgcaggtcaagacgacgaaccctaggaagtactcggtgcggcctgcctccggcgtcgtgcagcccaggggatcctgcggcatcacaatcacgatgcaagcgcccaaggaggtgcccccggactaccagtgcaaggacaagtttctcgttcagagcgtcgcggcggcggaggggacgacgcacaagggcattgtccctggcatgcaaagcgccaggtaagttggttgaggagttcaagttgagggtggtctatgtccctgccaaccctccgtcaccagtgcccgaggaaacagaggaagatgacggatctcttgattcagatgtggaccatgaagtggggacaccatcgacgtccaactgtgcagcaggacaagggcatacatgtagatcacaagcttcagatgacgagggtgactctacatccaagttaggactggaaagtagatatgcagaggaaaacaagatggttcagaaagacctgatacaggatgcctctatatccgagttagaactggaaagtagatatgcagaggaaaacaagaagatccagaaagagctggatctcctccggaagacacatgcatctcctggggacttctcggcgacgtctgtgctgcttgtcttcttgttatcttcacttgttggatacctgatgttcggaagcaaaacttagcaagttcttagaagcaagataatgacagcacatcattctgcggctccggcacagctctatcgtcttttgtgtattgctccttttagtacaaaatatatatagttaagtagtccacaatacatgacagatactcctcccttgctagtcccgtatgaacagatactcctcccttcttgagtaggtgtttttttctttctaagggctagtttgggagccacaaaaccggagtggattgaattgtctgaaatctccttcttaattaattttaaataaaaagtgaattttaaca

SEQ ID NO: 40454 - DNA, 1461 bp, Zea Mays
agtttatgccaacccaaactccaccccctcctccagactccagagcccgagcccatccgatccggaacttcttcttcccctaccaaacggatcgagccctgcgctacgctgccaaccgtactacactcgtcagtcgtcatagcctggctttcgtttgtctctctcgtaacttttgcttccgggagcagaaaaacgtcgccggggccctcccccgtcttgggatatttcatcagttttcaggttcttggctcttgggatcggatcttccatattctttggttctcgagactccagaggagaggagggagagagagagagagagagagagagagagagagagagagagagagagagagaggaggaagcgggggtgatcgttgtttcttgatcgccgccatgagtaacacgctgcttcgggtctgcccgtccgacctgaagatgccattcgaggtcaagaagcacagttcggcatgtctcgagctcgtcaacaggaccgatcggtcaagacgacgaaccctaggaagtactcggtgcggcctgcctccggcgtcgtgcagcccaggggatcctgcggcatcacaatcacgatgcaagcgcccaaggaggtgcccccggactaccagtgcaaggacaagtttctcgttcagagcgtcgcggcggcggaggggacgacgcacaagggcattgtccctggcatgttcagcaaagcgccaggtaagttggttgaggagttcaagttgagggtggtctatgtccctgccaaccctccgtcaccagtgcccgaggaaacagaggaagatgacggatctcttgattcagatgtggaccatgaagtggggacaccatcgacgtccaactgtgcagcaggacaagggcatacatgtagatcacaagcttcagatgacgagggtgactctacatccaagttaggactggaaagtagatatgcagaggaaaacaagatggttcagaaagacctgatacaggatgcctctatatccgagttagaactggaaagtagatatgcagaggaaaacaagaagatccagaaagagctggatctcctccggaagacacatgcatctcctggggacttctcggcgacgtctgtgctgcttgtcttcttgttatcttcacttgttggatacctgatgttcggaagcaaaacttagcaagttcttagaagcaagataatgacagcacatcattctgcggctccggcacagctctatcgtcttttgtgtattgctccttttagtacaaaatatatatagttaagtagtccacaatacatgacagatactcctcccttgctagtcccgtatgaacagatactcctcccttcttgagtaggtgtttttttctttctaagggctagtttgggagccacaaaaccggagtggattgaattgtctgaaatctccttcttaattaattttaaataaaaagtgaattttaaca

SEQ ID NO: 40455 - DNA, 1894 bp, Zea Mays
cccaaactccaccccctcctccagactccagagcccgagcccatccgatccggaacttcttcttcccctaccaaacggatcgagccctgcgctacgctgccaaccgtactacactcgtcagtcgtcatagcctggctttcgtttgtctctctcgtaacttttgcttccgggagcagaaaaacgtcgccggggccctcccccgtcttgggatatttcatcagttttcaggttcttggctcttgggatcggatcttccatattctttggttctcgagactccagaggagaggagggagagagagagagagagagagagagagagagagagagagagagagagagagaggaggaagcgggggtgatcgttgtttcttgatcgccgccatgagtaacacgctgcttcgggtctgcccgtccgacctgaagatgccattcgaggtcaagaagcacagttcggcatgtctcgagctcgtcaacaggaccgatcggtgggtggctttcaaggtcaagacgacgaaccctaggaagtactcggtgcggcctgcctccggcgtcgtgcagcccaggggatcctgcggcatcacaatcacgatgcaagcgcccaaggaggtgcccccggactaccagtgcaaggacaagtttctcgttcagagcgtcgcggcggcggaggggacgacgcacaagggcattgtccctggcatgttcagcaaagcgccaggtaagttggttgaggagttcaagttgagggtggtctatgtccctgccaaccctccgtcaccagtgcccgaggaaacagaggaagatgacggatctcttgattcagatgtggaccatgaagtggggacaccatcgacgtccaactgtgcagcaggacaagggcatacatgtagatcacaagcttcagatgacgaggtgactctagttagtccctcctaaataccgtctgcctttgcgttctctcaaactcaaatatggatcttgtgttgatcacctgttgcatagcatataatctttaaaagttcgtcggtagttctttcttcttttatgatgctattgattcactgaatagtttcggtttcatgaaattctatcataatatctgcccaaatccttcaacccgaaaacaaaagaagagaacaggaaaaaaaactatcataacaacatactcctgttgaattgtaatgtgaatacctctctaattacaattgtttttgtattataatgattccctatattagttccaccatggttatcggcaccattagcccccaggatgttagaatttcaaaatatttgtatactgtctaccctgaacattcactttatccctgacatcttcagggtgactctacatccaagttaggactggaaagtagatatgcagaggaaaacaagatggttcagaaagacctgatacaggatgcctctatatccgagttagaactggaaagtagatatgcagaggaaaacaagaagatccagaaagagctggatctcctccggaagacacatgcatctcctggggacttctcggcgacgtctgtgctgcttgtcttcttgttatcttcacttgttggatacctgatgttcggaagcaaaacttagcaagttcttagaagcaagataatgacagcacatcattctgcggctccggcacagctctatcgtcttttgtgtattgctccttttagtacaaaatatatatagttaagtagtccacaatacatgacagatactcctcccttgctagtcccgtatgaacagatactcctcccttcttgagtaggtgtttttttctttctaagggctagtttgggagccacaaaaccggagtggattgaattgtctgaaatctccttcttaattaattttaaataaaaagtgaattttaaca

SEQ ID NO: 40456 - DNA, 1553 bp, Zea Mays
agcccatccgatccggaacttcttcttcccctaccaaacggatcgagccctgcgctacgctgccaaccgtactacactcgtcagtcgtcatagcctggctttcgtttgtctctctcgtaacttttgcttccgggagcagaaaaacgtcgccggggccctcccccgtcttgggatatttcatcagttttcaggttcttggctcttgggatcggatcttccatattctttggttctcgagactccagaggagaggagggagagagagagagagagagagagagagagagagagagagagagagagagagaggaggaagcgggggtgatcgttgtttcttgatcgccgccatgagtaacacgctgcttcgggtctgcccgtccgacctgaagatgccattcgaggtcaagaagcacagttcggcatgtctcgagctcgtcaacaggaccgatcggtgggtggctttcaaggtgacaaatctgacgaacctcgctccagcgaaagatgcagtcttgtgcatcggagccaggctaaagtgattggttctctctctctctttttttctctctctctctccctgtgtctcgccgaggctgcaggtcaagacgacgaaccctaggaagtactcggtgcggcctgcctccggcgtcgtgcagcccaggggatcctgcggcatcacaatcacgatgcaagcgcccaaggaggtgcccccggactaccagtgcaaggacaagtttctcgttcagagcgtcgcggcggcggaggggacgacgcacaagggcattgtccctggcatgttcagcaaagcgccaggtaagttggttgaggagttcaagttgagggtggtctatgtccctgccaaccctccgtcaccagtgcccgaggaaacagaggaagatgacggatctcttgattcagatgtggaccatgaagtggggacaccatcgacgtccaactgtcaggacaagggcatacatgtagatcacaagcttcagatgacgagggtgactctacatccaagttaggactggaaagtagatatgcagaggaaaacaagatggttcagaaagacctgatacaggatgcctctatatccgagttagaactggaaagtagatatgcagaggaaaacaagaagatccagaaagagctggatctcctccggaagacacatgcatctcctggggacttctcggcgacgtctgtgctgcttgtcttcttgttatcttcacttgttggatacctgatgttcggaagcaaaacttagcaagttcttagaagcaagataatgacagcacatcattctgcggctccggcacagctctatcgtcttttgtgtattgctccttttagtacaaaatatatatagttaagtagtccacaatacatgacagatactcctcccttgctagtcccgtatgaacagatactcctcccttcttgagtaggtgtttttttctttctaagggctagtttgggagccacaaaaccggagtggattgaattgtctgaaatctccttcttaattaattttaaataaaaagtgaattttaaca

SEQ ID NO: 40457 - DNA, 773 bp, Zea Mays
tagcatttggacatgggtccttcctccttccctgatcccgctgcttttcaagatgctagcgggaaagatgtggaccttagcacctataaggggaaggttctgctcatagtcaatgttgcatctcagtgtggcttaaccaattccaactacacagagctgagccagttgtatgagaagtacaaggaccagggttttgagatccttgcattcccatgcaaccagttcggtgggcaggagcctggcactaatgaggagattgtccagtttgcttgtactcgcttcaaggctgagtatccaattttcgacaaggttgatgtcaatggtgacaatactgcacccatttacaagttcctgaagtccagcaaaggtagtctctttggcgataacataaaatggaacttctccaaattcttggttgacaaagaggggcatgttgtggagcggtatgcaccaacaacttccccactgagcatcgagaaggacatcaagaaactactagggagttcttaaaccttgtaattggattcagtagccctaccaaactgctgctttgcatcgagcacctgatgcctcagtagcgttttaataaagttgtttttataaccgagatgttttgtatttcttctgtattccctgctttgtggtaaatggcatgtaataaaaatgatgcaatccacgatttatcttgaaaggttatgtatccaggttggttgttatgagatatttgagaaatgagttttggcatgggggcatatcttgcgtacctgcctacc

SEQ ID NO: 40458 - DNA, 2680 bp, Zea Mays
gtctaaaccgagcacgaacagagagagcctcgcccgccgtctgcaccggccttgaaagagctggagaagcgagccagcacccagcagagcaagaaagccacaaggagatactgaggacgcgaggccaagctcccccgacggcattagagtaggagggaggaggggaagcagagagggacggcccttctcgtcctcgcaccctgtgaaacgcggcccgcgaccgacagcagctcgctcgctgtcatctctcgagatctcaagcagttcgttggttggccattttctttttctttttttgatatacttgctagcttggaagttggtaaaagatgaactcaacacgccgagcttcaaaagcggcaaagtcaacaatcaattaccacaggttttcattagatgagcaccacttatttgagccagatgctttgattaccaaggagcgagatgccaatcatcaatcaaggcaaagttctcaatcttgcagaacatatgcatacagaagattgaccactccccagtttgtatctgcattgtctggaatctggaatcttgttggccagcctgaatcatctggcacagctcaaagatctagtattcatgggatttcgagtagggaagaccctgtgtgctttagcagggaccaacaaggaaatatactgacaccttgctgtgtggaaaactctagtggtctgagatctcaatactgtttctctacaccaaaagaaatttatgaggatcttatttacgtaaagaagaagatgttaacgctgacaccattcaataacattgttggtgcatcatccacatggatgcatatgcattccacaaataaggttgaaggtgcgcattatttgcaatttggaactatatactctgtgcaagctgaaaagatggaaaaaatcgagacttctcagaatagcaaaagaagcatgtgtgaggaaacttgtgctagttccaacaatatggatattagggacaatagctattcaaatcaaacaagacacatgcctaacgagctatttactatctcaaatgaagaagctagcagtacacatgattgtgaaagttctcggcacaatactgaatgcaatctagaaaaaaatcaagaagattctaattttttagcttgcccagtacatgaaatggaaattgccaaagaggtgaggataatgccagggagtcaggttttcagtaaggcgtgcacagatgctcagcttgacaaatcaaagcacatgtcttgtctggtgggtgatgctgttgttcttaattcagcaaatgcagatgaaagtgcttgtagggaggacgtgtgtctgcagctttctctagacaagtgttcacaagagctccaaccaacttttcagcatcgatttgatggtgctgttaccataaacaggcatgctgtggcaggagcattagctgggacagcagtcagtgtttctttgcatccaattgatactgtgaaaacgataattcaggctaacagttatggacagagttcagtctaccatacactaaggcgcacccttattgagagaggtgttctggggttatatggaggacttgctagcaaacttgcttgttctgcaccaatttctgcaatttataccttaacttatgaaacagtgaagggggctcttctgcctgtttttccaaaggaatatcattcaattgcgcattgtgctgctggtggctgctctagtattgcaacatcctttgtttttacacccagtgaatgcataaaacaacaaatgcaagaatgctttagtaggatgcctcaaaaagggtggcattgcttcattatatactggatggggtgctgtcctttgcagaaatatcccacattccatagtgaagttctatgcttatgagagtctgaagcagtctctgttgaaatcagcacctgatagggccaaactcaattctggccaaacgcttttatgtggaggttttgctgggtcaactgctgctctctgtacaacaccgtttgatgttatcaagacacgagtgcaattacaggcactcagccctgtttgcaagtatgatggggtggttcatgcactaaaagaaatttttcggcatgaaggcttgtgtggtctttacaggggtttgactccaaggctggctatgtatatgtctcaaggtgctatattctttacgtcctatgagtttctcagtacattaatgtttcctgaacccgaacaagaggttcatgcgaggagcgtttgatcgtgaaatgagaagatggcacagcaaaatacagaactcggggatagtctgacatgtgatgtgaggggtttgaatccaattttgggtgttgtttacaaagttgtctgttaggaataggatagcattcatacatatttttcggtaatctcaggtctagctaggcgattgaaaattttgtagtagaacctgattttgtattttagtctcgtatatatagagaaacaatggccagttttggtatcctattgttttgtatccacatgtatctgcatacatggccaagtgaatctggaattaaacagcatgggacgcaagactttctattaaaaaaaagatcagttgcagagcgacttcaatgttgtcgtccggcagttctgatgattgtaaagaaaattagtgtttactgaataacatgattatttagattaatgttatttcttaatatgattattta

SEQ ID NO: 40459 - DNA, 2863 bp, Zea Mays
ctaaaccgagcacgaacagagagagcctcgcccgccgtctgcaccggccttgaaagagctggagaagcgagccagcacccagcagagcaagaaagccacaaggagatactgaggacgcgaggccaagctcccccgacggcattagagtaggagggaggaggggaagcagagagggacggcccttctcgtcctcgcaccctgtgaaacgcggcccgcgaccgacagcagctcgctcgctgtcatctctcgagatctcaagcagttcgttggttggccattttctttttctttttttgatatacttgctagcttggaagttggtaaaagatgaactcaacacgccgagcttcaaaagcggcaaagtcaacaatcaattaccacaggttttcattagatgagcaccacttatttgagccagatgctttgattaccaaggagcgagatgccaatcatcaatcaaggcaaagttctcaatcttgcagaacatatgcatacagaagattgaccactccccagtttgtatctgcattgtctggaatctggaatcttgttggccagcctgaatcatctggcacagctcaaagatctagtattcatgggatttcgagtagggaagaccctgtgtgctttagcagggaccaacaaggaaatatactgacaccttgctgtgtggaaaactctagtggtctgagatctcaatactgtttctctacaccaaaagaaatttatgaggatcttatttacgtaaagaagaagatgttaacgctgacaccattcaataacattgttggtgcatcatccacatggatgcatatgcattccacaaataaggttgaaggtgcgcattatttgcaatttggaactatatactctgtgcaagctgaaaagatggaaaaaatcgagacttctcagaatagcaaaagaagcatgtgtgaggaaacttgtgctagttccaacaatatggatattagggacaatagctattcaaatcaaacaagacacatgcctaacgagctatttactatctcaaatgaagaagctagcagtacacatgattgtgaaagttctcggcacaatactgaatgcaatctagaaaaaaatcaagaagattctaattttttagcttgcccagtacatgaaatggaaattgccaaagaggtgaggataatgccagggagtcaggttttcagtaaggcgtgcacagatgctcagcttgacaaatcaaagcacatgtcttgtctggtgggtgatgctgttgttcttaattcagcaaatgcagatgaaagtgcttgtagggaggacgtgtgtctgcagctttctctagacaagtgttcacaagagctccaaccaacttttcagcatcgatttgatggtgctgttaccataaacaggcatgctgtggcaggagcattagctgggacagcagtcagtgtttctttgcatccaattgatactgtgaaaacgataattcaggctaacagttatggacagagttcagtctaccatacactaaggcgcacccttattgagagaggtgttctggggttatatggaggacttgctagcaaacttgcttgttctgcaccaatttctgcaatttataccttaacttatgaaacagtgaagggggctcttctgcctgtttttccaaaggaatatcattcaattgcgcattgtgctgctggtggctgctctagtattgcaacatcctttgtttttacacccagtgaatgcataaaacaacaaatgcaagtgggttcccattatcagaactgctggaatgctttagtaggatgcctcaaaaagggtggcattgcttcattatatactggatggggtgctgtcctttgcagaaatatcccacattccatagtgaagttctatgcttatgagagtctgaagcagtctctgttgaaatcagcacctgatagggccaaactcaattctggccaaacgcataaaaccaaatagtgtcaccctggaagaagacagcaagtgaaggctatccttgtgttggaacttgcacagtgaagtgattgacacaataatgccaagctatgggcttgagtcgttgcatcctggattagctcatacgaattatggatgtgcacaaagcttttatgtggaggttttgctgggtcaactgctgctctctgtacaacaccgtttgatgttatcaagacacgagtgcaattacaggcactcagccctgtttgcaagtatgatggggtggttcatgcactaaaagaaatttttcggcatgaaggcttgtgtggtctttacaggggtttgactccaaggctggctatgtatatgtctcaaggtgctatattctttacgtcctatgagtttctcagtacattaatgtttcctgaacccgaacaagaggttcatgcgaggagcgtttgatcgtgaaatgagaagatggcacagcaaaatacagaactcggggatagtctgacatgtgatgtgaggggtttgaatccaattttgggtgttgtttacaaagttgtctgttaggaataggatagcattcatacatatttttcggtaatctcaggtctagctaggcgattgaaaattttgtagtagaacctgattttgtattttagtctcgtatatatagagaaacaatggccagttttggtatcctattgttttgtatccacatgtatctgcatacatggccaagtgaatctggaattaaacagcatgggacgcaagactttctattaaaaaaaagatcagttgcagagcgacttcaatgttgtcgtccggcagttctgatgattgtaaagaaaattagtgtttactgaataacatgattatttagattaatgttatttcttaatatgattattta

SEQ ID NO: 40460 - DNA, 2808 bp, Zea Mays
ctaaaccgagcacgaacagagagagcctcgcccgccgtctgcaccggccttgaaagagctggagaagcgagccagcacccagcagagcaagaaagccacaaggagatactgaggacgcgaggccaagctcccccgacggcattagagtaggagggaggaggggaagcagagagggacggcccttctcgtcctcgcaccctgtgaaacgcggcccgcgaccgacagcagctcgctcgctgtcatctctcgagatctcaagcagttcgttggttggccattttctttttctttttttgatatacttgctagcttggaagttggtaaaagatgaactcaacacgccgagcttcaaaagcggcaaagtcaacaatcaattaccacaggttttcattagatgagcaccacttatttgagccagatgctttgattaccaaggagcgagatgccaatcatcaatcaaggcaaagttctcaatcttgcagaacatatgcatacagaagattgaccactccccagtttgtatctgcattgtctggaatctggaatcttgttggccagcctgaatcatctggcacagctcaaagatctagtattcatgggatttcgagtagggaagaccctgtgtgctttagcagggaccaacaaggaaatatactgacaccttgctgtgtggaaaactctagtggtctgagatctcaatactgtttctctacaccaaaagaaatttatgaggatcttatttacgtaaagaagaagatgttaacgctgacaccattcaataacattgttggtgcatcatccacatggatgcatatgcattccacaaataaggttgaaggtgcgcattatttgcaatttggaactatatactctgtgcaagctgaaaagatggaaaaaatcgagacttctcagaatagcaaaagaagcatgtgtgaggaaacttgtgctagttccaacaatatggatattagggacaatagctattcaaatcaaacaagacacatgcctaacgagctatttactatctcaaatgaagaagctagcagtacacatgattgtgaaagttctcggcacaatactgaatgcaatctagaaaaaaatcaagaagattctaattttttagcttgcccagtacatgaaatggaaattgccaaagaggtgaggataatgccagggagtcaggttttcagtaaggcgtgcacagatgctcagcttgacaaatcaaagcacatgtcttgtctggtgggtgatgctgttgttcttaattcagcaaatgcagatgaaagtgcttgtagggaggacgtgtgtctgcagctttctctagacaagtgttcacaagagctccaaccaacttttcagcatcgatttgatggtgctgttaccataaacaggcatgctgtggcaggagcattagctgggacagcagtcagtgtttctttgcatccaattgatactgtgaaaacgataattcaggctaacagttatggacagagttcagtctaccatacactaaggcgcacccttattgagagaggtgttctggggttatatggaggacttgctagcaaacttgcttgttctgcaccaatttctgcaatttataccttaacttatgaaacagtgaagggggctcttctgcctgtttttccaaaggaatatcattcaattgcgcattgtgctgctggtggctgctctagtattgcaacatcctttgtttttacacccagtgaatgcataaaacaacaaatgcaagtgggttcccattatcagaactgctggaatgctttagtaggatgcctcaaaaagggtggcattgcttcattatatactggatggggtgctgtcctttgcagaaatatcccacattccatagtgaagttctatgcttatgagagtctgaagcagtctctgttgaaatcagcacctgatagggccaaactcaattctggccaaacggtgcagcattgtgatttttcatacacatctagaatccatatcagccaatgcagctactcaaagcccataccttacatcagtcacttgattgtgcaagttctaagcttttatgtggaggttttgctgggtcaactgctgctctctgtacaacaccgtttgatgttatcaagacacgagtgcaattacaggcactcagccctgtttgcaagtatgatggggtggttcatgcactaaaagaaatttttcggcatgaaggcttgtgtggtctttacaggggtttgactccaaggctggctatgtatatgtctcaaggtgctatattctttacgtcctatgagtttctcagtacattaatgtttcctgaacccgaacaagaggttcatgcgaggagcgtttgatcgtgaaatgagaagatggcacagcaaaatacagaactcggggatagtctgacatgtgatgtgaggggtttgaatccaattttgggtgttgtttacaaagttgtctgttaggaataggatagcattcatacatatttttcggtaatctcaggtctagctaggcgattgaaaattttgtagtagaacctgattttgtattttagtctcgtatatatagagaaacaatggccagttttggtatcctattgttttgtatccacatgtatctgcatacatggccaagtgaatctggaattaaacagcatgggacgcaagactttctattaaaaaaaagatcagttgcagagcgacttcaatgttgtcgtccggcagttctgatgattgtaaagaaaattagtgtttactgaataacatgattatttagattaatgttatttcttaatatgattattta

SEQ ID NO: 40461 - DNA, 2626 bp, Zea Mays
ctaaaccgagcacgaacagagagagcctcgcccgccgtctgcaccggccttgaaagagctggagaagcgagccagcacccagcagagcaagaaagccacaaggagatactgaggacgcgaggccaagctcccccgacggcattagagtaggagggaggaggggaagcagagagggacggcccttctcgtcctcgcaccctgtgaaacgcggcccgcgaccgacagcagctcgctcgctgtcatctctcgagatctcaagcagttcgttggttggccattttctttttctttttttgatatacttgctagcttggaagttggtaaaagatgaactcaacacgccgagcttcaaaagcggcaaagtcaacaatcaattaccacaggttttcattagatgagcaccacttatttgagccagatgctttgattaccaaggagcgagatgccaatcatcaatcaaggcaaagttctcaatcttgcagaacatatgcatacagaagattgaccactccccagtttgtatctgcattgtctggaatctggaatcttgttggccagcctgaatcatctggcacagctcaaagatctagtattcatgggatttcgagtagggaagaccctgtgtgctttagcagggaccaacaaggaaatatactgacaccttgctgtgtggaaaactctagtggtctgagatctcaatactgtttctctacaccaaaagaaatttatgaggatcttatttacgtaaagaagaagatgttaacgctgacaccattcaataacattgttggtgcatcatccacatggatgcatatgcattccacaaataaggttgaaggtgcgcattatttgcaatttggaactatatactctgtgcaagctgaaaagatggaaaaaatcgagacttctcagaatagcaaaagaagcatgtgtgaggaaacttgtgctagttccaacaatatggatattagggacaatagctattcaaatcaaacaagacacatgcctaacgagctatttactatctcaaatgaagaagctagcagtacacatgattgtgaaagttctcggcacaatactgaatgcaatctagaaaaaaatcaagaagattctaattttttagcttgcccagtacatgaaatggaaattgccaaagaggtgaggataatgccagggagtcaggttttcagtaaggcgtgcacagatgctcagcttgacaaatcaaagcacatgtcttgtctggtgggtgatgctgttgttcttaattcagcaaatgcagatgaaagtgcttgtagggaggacgtgtgtctgcagctttctctagacaagtgttcacaagagctccaaccaacttttcagcatcgatttgatggtgctgttaccataaacaggcatgctgtggcaggagcattagctgggacagcagtcagtgtttctttgcatccaattgatactgtgaaaacgataattcaggctaacagttatggacagagttcagtctaccatacactaaggcgcacccttattgagagaggtgttctggggttatatggaggacttgctagcaaacttgcttgttctgcaccaatttctgcaatttataccttaacttatgaaacagtgaagggggctcttctgcctgtttttccaaaggaatatcattcaattgcgcattgtgctgctggtggctgctctagtattgcaacatcctttgtttttacacccagtgaatgcataaaacaacaaatgcaagtgggttcccattatcagaactgctggaatgctttagtaggatgcctcaaaaagggtggcattgcttcattatatactggatggggtgctgtcctttgcagaaatatcccacattccatagtgaagcttttatgtggaggttttgctgggtcaactgctgctctctgtacaacaccgtttgatgttatcaagacacgagtgcaattacaggcactcagccctgtttgcaagtatgatggggtggttcatgcactaaaagaaatttttcggcatgaaggcttgtgtggtctttacaggggtttgactccaaggctggctatgtatatgtctcaaggtgctatattctttacgtcctatgagtttctcagtacattaatgtttcctgaacccgaacaagaggttcatgcgaggagcgtttgatcgtgaaatgagaagatggcacagcaaaatacagaactcggggatagtctgacatgtgatgtgaggggtttgaatccaattttgggtgttgtttacaaagttgtctgttaggaataggatagcattcatacatatttttcggtaatctcaggtctagctaggcgattgaaaattttgtagtagaacctgattttgtattttagtctcgtatatatagagaaacaatggccagttttggtatcctattgttttgtatccacatgtatctgcatacatggccaagtgaatctggaattaaacagcatgggacgcaagactttctattaaaaaaaagatcagttgcagagcgacttcaatgttgtcgtccggcagttctgatgattgtaaagaaaattagtgtttactgaataacatgattatttagattaatgttatttcttaatatgattattta

SEQ ID NO: 40462 - DNA, 2728 bp, Zea Mays
aaaccgagcacgaacagagagagcctcgcccgccgtctgcaccggccttgaaagagctggagaagcgagccagcacccagcagagcaagaaagccacaaggagatactgaggacgcgaggccaagctcccccgacggcattagagtaggagggaggaggggaagcagagagggacggcccttctcgtcctcgcaccctgtgaaacgcggcccgcgaccgacagcagctcgctcgctgtcatctctcgagatctcaagcagttcgttggttggccattttctttttctttttttgatatacttgctagcttggaagttggtaaaagatgaactcaacacgccgagcttcaaaagcggcaaagtcaacaatcaattaccacaggttttcattagatgagcaccacttatttgagccagatgctttgattaccaaggagcgagatgccaatcatcaatcaaggcaaagttctcaatcttgcagaacatatgcatacagaagattgaccactccccagtttgtatctgcattgtctggaatctggaatcttgttggccagcctgaatcatctggcacagctcaaagatctagtattcatgggatttcgagtagggaagaccctgtgtgctttagcagggaccaacaaggaaatatactgacaccttgctgtgtggaaaactctagtggtctgagatctcaatactgtttctctacaccaaaagaaatttatgaggatcttatttacgtaaagaagaagatgttaacgctgacaccattcaataacattgttggtgcatcatccacatggatgcatatgcattccacaaataaggttgaaggtgcgcattatttgcaatttggaactatatactctgtgcaagctgaaaagatggaaaaaatcgagacttctcagaatagcaaaagaagcatgtgtgaggaaacttgtgctagttccaacaatatggatattagggacaatagctattcaaatcaaacaagacacatgcctaacgagctatttactatctcaaatgaagaagctagcagtacacatgattgtgaaagttctcggcacaatactgaatgcaatctagaaaaaaatcaagaagattctaattttttagcttgcccagtacatgaaatggaaattgccaaagaggtgaggataatgccagggagtcaggttttcagtaaggcgtgcacagatgctcagcttgacaaatcaaagcacatgtcttgtctggtgggtgatgctgttgttcttaattcagcaaatgcagatgaaagtgcttgtagggaggacgtgtgtctgcagctttctctagacaagtgttcacaagagctccaaccaacttttcagcatcgatttgatggtgctgttaccataaacaggcatgctgtggcaggagcattagctgggacagcagtcagtgtttctttgcatccaattgatactgtgaaaacgataattcaggctaacagttatggacagagttcagtctaccatacactaaggcgcacccttattgagagaggtgttctggggttatatggaggacttgctagcaaacttgcttgttctgcaccaatttctgcaatttataccttaacttatgaaacagtgaagggggctcttctgcctgtttttccaaaggaatatcattcaattgcgcattgtgctgctggtggctgctctagtattgcaacatcctttgtttttacacccagtgaatgcataaaacaacaaatgcaagtgggttcccattatcagaactgctggaatgctttagtaggatgcctcaaaaagggtggcattgcttcattatatactggatggggtgctgtcctttgcagaaatatcccacattccatagtgaaggtgcagcattgtgatttttcatacacatctagaatccatatcagccaatgcagctactcaaagcccataccttacatcagtcacttgattgtgcaagttctaagcttttatgtggaggttttgctgggtcaactgctgctctctgtacaacaccgtttgatgttatcaagacacgagtgcaattacaggcactcagccctgtttgcaagtatgatggggtggttcatgcactaaaagaaatttttcggcatgaaggcttgtgtggtctttacaggggtttgactccaaggctggctatgtatatgtctcaaggtgctatattctttacgtcctatgagtttctcagtacattaatgtttcctgaacccgaacaagaggttcatgcgaggagcgtttgatcgtgaaatgagaagatggcacagcaaaatacagaactcggggatagtctgacatgtgatgtgaggggtttgaatccaattttgggtgttgtttacaaagttgtctgttaggaataggatagcattcatacatatttttcggtaatctcaggtctagctaggcgattgaaaattttgtagtagaacctgattttgtattttagtctcgtatatatagagaaacaatggccagttttggtatcctattgttttgtatccacatgtatctgcatacatggccaagtgaatctggaattaaacagcatgggacgcaagactttctattaaaaaaaagatcagttgcagagcgacttcaatgttgtcgtccggcagttctgatgattgtaaagaaaattagtgtttactgaataacatgattatttagattaatgttatttcttaatatgattattta

SEQ ID NO: 40463 - DNA, 2730 bp, Zea Mays
aaaccgagcacgaacagagagagcctcgcccgccgtctgcaccggccttgaaagagctggagaagcgagccagcacccagcagagcaagaaagccacaaggagatactgaggacgcgaggccaagctcccccgacggcattagagtaggagggaggaggggaagcagagagggacggcccttctcgtcctcgcaccctgtgaaacgcggcccgcgaccgacagcagctcgctcgctgtcatctctcgagatctcaagcagttcgttggttggccattttctttttctttttttgatatacttgctagcttggaagttggtaaaagatgaactcaacacgccgagcttcaaaagcggcaaagtcaacaatcaattaccacaggttttcattagatgagcaccacttatttgagccagatgctttgattaccaaggagcgagatgccaatcatcaatcaaggcaaagttctcaatcttgcagaacatatgcatacagaagattgaccactccccagtttgtatctgcattgtctggaatctggaatcttgttggccagcctgaatcatctggcacagctcaaagatctagtattcatgggatttcgagtagggaagaccctgtgtgctttagcagggaccaacaaggaaatatactgacaccttgctgtgtggaaaactctagtggtctgagatctcaatactgtttctctacaccaaaagaaatttatgaggatcttatttacgtaaagaagaagatgttaacgctgacaccattcaataacattgttggtgcatcatccacatggatgcatatgcattccacaaataaggttgaaggtgcgcattatttgcaatttggaactatatactctgtgcaagctgaaaagatggaaaaaatcgagacttctcagaatagcaaaagaagcatgtgtgaggaaacttgtgctagttccaacaatatggatattagggacaatagctattcaaatcaaacaagacacatgcctaacgagctatttactatctcaaatgaagaagctagcagtacacatgattgtgaaagttctcggcacaatactgaatgcaatctagaaaaaaatcaagaagattctaattttttagcttgcccagtacatgaaatggaaattgccaaagaggtgaggataatgccagggagtcaggttttcagtaaggcgtgcacagatgctcagcttgacaaatcaaagcacatgtcttgtctggtgggtgatgctgttgttcttaattcagcaaatgcagatgaaagtgcttgtagggaggacgtgtgtctgcagctttctctagacaagtgttcacaagagctccaaccaacttttcagcatcgatttgatggtgctgttaccataaacaggcatgctgtggcaggagcattagctgggacagcagtcagtgtttctttgcatccaattgatactgtgaaaacgataattcaggctaacagttatggacagagttcagtctaccatacactaaggcgcacccttattgagagaggtgttctggggttatatggaggacttgctagcaaacttgcttgttctgcaccaatttctgcaatttataccttaacttatgaaacagtgaagggggctcttctgcctgtttttccaaaggaatatcattcaattgcgcattgtgctgctggtggctgctctagtattgcaacatcctttgtttttacacccagtgaatgcataaaacaacaaatgcaagtgggttcccattatcagaactgctggaatgctttagtaggatgcctcaaaaagggtggcattgcttcattatatactggatggggtgctgtcctttgcagaaatatcccacattccatagtgaagttctatgcttatgagagtctgaagcagtctctgttgaaatcagcacctgatagggccaaactcaattctggccaaacggttagttttttagacttaccttattaagcttttatgtggaggttttgctgggtcaactgctgctctctgtacaacaccgtttgatgttatcaagacacgagtgcaattacaggcactcagccctgtttgcaagtatgatggggtggttcatgcactaaaagaaatttttcggcatgaaggcttgtgtggtctttacaggggtttgactccaaggctggctatgtatatgtctcaaggtgctatattctttacgtcctatgagtttctcagtacattaatgtttcctgaacccgaacaagaggttcatgcgaggagcgtttgatcgtgaaatgagaagatggcacagcaaaatacagaactcggggatagtctgacatgtgatgtgaggggtttgaatccaattttgggtgttgtttacaaagttgtctgttaggaataggatagcattcatacatatttttcggtaatctcaggtctagctaggcgattgaaaattttgtagtagaacctgattttgtattttagtctcgtatatatagagaaacaatggccagttttggtatcctattgttttgtatccacatgtatctgcatacatggccaagtgaatctggaattaaacagcatgggacgcaagactttctattaaaaaaaagatcagttgcagagcgacttcaatgttgtcgtccggcagttctgatgattgtaaagaaaattagtgtttactgaataacatgattatttagattaatgttatttcttaatatgattattta

SEQ ID NO: 40464 - DNA, 4464 bp, Zea Mays
aaaccgagcacgaacagagagagcctcgcccgccgtctgcaccggccttgaaagagctggagaagcgagccagcacccagcagagcaagaaagccacaaggagatactgaggacgcgaggccaagctcccccgacggcattagagtaggagggaggaggggaagcagagagggacggcccttctcgtcctcgcaccctgtgaaacgcggcccgcgaccgacagcagctcgctcgctgtcatctctcgagatctcaagcagttcgttggttggccattttctttttctttttttgatatacttgctagcttggaagttggtaaaagatgaactcaacacgccgagcttcaaaagcggcaaagtcaacaatcaattaccacaggttttcattagatgagcaccacttatttgagccagatgctttgattaccaaggagcgagatgccaatcatcaatcaaggcaaagttctcaatcttgcagaacatatgcatacagaagattgaccactccccagtttgtatctgcattgtctggaatctggaatcttgttggccagcctgaatcatctggcacagctcaaagatctagtattcatgggatttcgagtagggaagaccctgtgtgctttagcagggaccaacaaggaaatatactgacaccttgctgtgtggaaaactctagtggtctgagatctcaatactgtttctctacaccaaaagaaatttatgaggatcttatttacgtaaagaagaagatgttaacgctgacaccattcaataacattgttggtgcatcatccacatggatgcatatgcattccacaaataaggttgaaggtgcgcattatttgcaatttggaactatatactctgtgcaagctgaaaagatggaaaaaatcgagacttctcagaatagcaaaagaagcatgtgtgaggaaacttgtgctagttccaacaatatggatattagggacaatagctattcaaatcaaacaagacacatgcctaacgagctatttactatctcaaatgaagaagctagcagtacacatgattgtgaaagttctcggcacaatactgaatgcaatctagaaaaaaatcaagaagattctaattttttagcttgcccagtacatgaaatggaaattgccaaagaggtgaggataatgccagggagtcaggttttcagtaaggcgtgcacagatgctcagcttgacaaatcaaagcacatgtcttgtctggtgggtgatgctgttgttcttaattcagcaaatgcagatgaaagtgcttgtagggaggacgtgtgtctgcagctttctctagacaagtgttcacaagagctccaaccaacttttcagcatcgatttgatggtgctgttaccataaacaggcatgctgtggcaggagcattagctgggacagcagtcagtgtttctttgcatccaattgatactgtgaaaacgataattcaggctaacagttatggacagagttcagtctaccatacactaaggcgcacccttattgagagaggtgttctggggttatatggaggacttgctagcaaacttgcttgttctgcaccaatttctgcaatttataccttaacttatgaaacagtgaagggggctcttctgcctgtttttccaaaggaatatcattcaattgcgcattgtgctgctggtggctgctctagtattgcaacatcctttgtttttacacccagtgaatgcataaaacaacaaatgcaagtgggttcccattatcagaactgctggaatgctttagtaggatgcctcaaaaagggtggcattgcttcattatatactggatggggtgctgtcctttgcagaaatatcccacattccatagtgaagttctatgcttatgagagtctgaagcagtctctgttgaaatcagcacctgatagggccaaactcaattctggccaaacggttagttttttagacttaccttattaaggtatcattcttatacccacatattgacctgtgtaataactaataagaaatatcaaatgcggaattataagtttaaaaaaaacacaaatattttgtttctgaataactgatactattcccatgcacctgaagcataaaatcaaacagagttaagcacaaatgaaggtcattcttgcattggaactagcgcaatcaagtgactgacataatgcccaagtatgggcttgaatagctgcattggattcatacttcagctgacacgggtcacctattatagttgcgggaaggagcaccatgccaccatcccttcttttttcttcacgctgctgaccttatctacatacttccaggtgcagcattgtgatttttcatacacatctagaatccatatcagccaatgcagctactcaaagcccataccttacatcagtcacttgattgtgcaagttctaaggcaaggatgatcctcacttgttgacttctgtgtttttaattctatttggtttaatacttcaagtggatgagattagcatattcataaacaaacgtccatgtgcttaggcttttaactttgcatttattatttcttacacagacctctaggtgggacatatcccacctaataccctcctataaacatgtgtaagaagtaaaaaatgtgaatttaaaagtttttttcttgaatacgcaggagagctgcgtatcattatattaataggagagaaaaaggcatcaaacccaaaaacaaacatacaaacacacacacgcacccaaagataccctcagcgcacaacataaacaagacaccagcttacacatcctaagcaaaacagatgtttgtgttctgaacaattgatgctaatctcatctcatgtatctgaagcataaaaccaaatagtgtcaccctggaagaagacagcaagtgaaggctatccttgtgttggaacttgcacagtgaagtgattgacacaataatgccaagctatgggcttgagtcgttgcatcctggattagctcatacgaattatggatgtgcacaaaggtcagaacgcttcaccttgaagcctgtagataagattagcaacacaaaaacatctcagcaggaaataaaaagatgttgctcgtccccacaactataaaacgtgacccctgctggctgaagacaaggcagagaagcaagcatagctgagagcacacttgcagtgtgagggctctgcctgctttctctgcggctagcagggttgccttatgttgttgcgagaaggaagaacacccctttatttcctactgaaatatttctacgtgctgctgatcttatctactggcttccagatttatacacatccaaaattattgtcagccaatgcagctactcgagcccataccttgtattacatcagtcacttgattgcacaaacattatttgtgtaactctatttggtttcatgctttaggtgtataaggttagcatccattattcatacacacaaacatctttgtgcctttttaactcttaccttatcatttttattttcttgcattaatatatattagttacaattggagtagaacacatgggcatttctgatactatcctgcattgtttcaatgcttcgaagagaagaaaaaagaaataagaaaccgcaagatctatatgatgatttacctgttctagcatctcaattctcaaatacaacagataaaactaatattgcaccccctttgttacttgcagcttttatgtggaggttttgctgggtcaactgctgctctctgtacaacaccgtttgatgttatcaagacacgagtgcaattacaggcactcagccctgtttgcaagtatgatggggtggttcatgcactaaaagaaatttttcggcatgaaggcttgtgtggtctttacaggggtttgactccaaggctggctatgtatatgtctcaaggtgctatattctttacgtcctatgagtttctcagtacattaatgtttcctgaacccgaacaagaggttcatgcgaggagcgtttgatcgtgaaatgagaagatggcacagcaaaatacagaactcggggatagtctgacatgtgatgtgaggggtttgaatccaattttgggtgttgtttacaaagttgtctgttaggaataggatagcattcatacatatttttcggtaatctcaggtctagctaggcgattgaaaattttgtagtagaacctgattttgtattttagtctcgtatatatagagaaacaatggccagttttggtatcctattgttttgtatccacatgtatctgcatacatggccaagtgaatctggaattaaacagcatgggacgcaagactttctattaaaaaaaagatcagttgcagagcgacttcaatgttgtcgtccggcagttctgatgattgtaaagaaaattagtgtttactgaataacatgattatttagattaatgttatttcttaatatgattattta

SEQ ID NO: 40465 - DNA, 2704 bp, Zea Mays
aaaccgagcacgaacagagagagcctcgcccgccgtctgcaccggccttgaaagagctggagaagcgagccagcacccagcagagcaagaaagccacaaggagatactgaggacgcgaggccaagctcccccgacggcattagagtaggagggaggaggggaagcagagagggacggcccttctcgtcctcgcaccctgtgaaacgcggcccgcgaccgacagcagctcgctcgctgtcatctctcgagatctcaagcagttcgttggttggccattttctttttctttttttgatatacttgctagcttggaagttggtaaaagatgaactcaacacgccgagcttcaaaagcggcaaagtcaacaatcaattaccacaggttttcattagatgagcaccacttatttgagccagatgctttgattaccaaggagcgagatgccaatcatcaatcaaggcaaagttctcaatcttgcagaacatatgcatacagaagattgaccactccccagtttgtatctgcattgtctggaatctggaatcttgttggccagcctgaatcatctggcacagctcaaagatctagtattcatgggatttcgagtagggaagaccctgtgtgctttagcagggaccaacaaggaaatatactgacaccttgctgtgtggaaaactctagtggtctgagatctcaatactgtttctctacaccaaaagaaatttatgaggatcttatttacgtaaagaagaagatgttaacgctgacaccattcaataacattgttggtgcatcatccacatggatgcatatgcattccacaaataaggttgaaggtgcgcattatttgcaatttggaactatatactctgtgcaagctgaaaagatggaaaaaatcgagacttctcagaatagcaaaagaagcatgtgtgaggaaacttgtgctagttccaacaatatggatattagggacaatagctattcaaatcaaacaagacacatgcctaacgagctatttactatctcaaatgaagaagctagcagtacacatgattgtgaaagttctcggcacaatactgaatgcaatctagaaaaaaatcaagaagattctaattttttagcttgcccagtacatgaaatggaaattgccaaagaggtgaggataatgccagggagtcaggttttcagtaaggcgtgcacagatgctcagcttgacaaatcaaagcacatgtcttgtctggtgggtgatgctgttgttcttaattcagcaaatgcagatgaaagtgcttgtagggaggacgtgtgtctgcagctttctctagacaagtgttcacaagagctccaaccaacttttcagcatcgatttgatggtgctgttaccataaacaggcatgctgtggcaggagcattagctgggacagcagtcagtgtttctttgcatccaattgatactgtgaaaacgataattcaggctaacagttatggacagagttcagtctaccatacactaaggcgcacccttattgagagaggtgttctggggttatatggaggacttgctagcaaacttgcttgttctgcaccaatttctgcaatttataccttaacttatgaaacagtgaagggggctcttctgcctgtttttccaaaggaatatcattcaattgcgcattgtgctgctggtggctgctctagtattgcaacatcctttgtttttacacccagtgaatgcataaaacaacaaatgcaagaatgctttagtaggatgcctcaaaaagggtggcattgcttcattatatactggatggggtgctgtcctttgcagaaatatcccacattccatagtgaagttctatgcttatgagagtctgaagcagtctctgttgaaatcagcacctgatagggccaaactcaattctggccaaacggttagttttttagacttaccttattaagcttttatgtggaggttttgctgggtcaactgctgctctctgtacaacaccgtttgatgttatcaagacacgagtgcaattacaggcactcagccctgtttgcaagtatgatggggtggttcatgcactaaaagaaatttttcggcatgaaggcttgtgtggtctttacaggggtttgactccaaggctggctatgtatatgtctcaaggtgctatattctttacgtcctatgagtttctcagtacattaatgtttcctgaacccgaacaagaggttcatgcgaggagcgtttgatcgtgaaatgagaagatggcacagcaaaatacagaactcggggatagtctgacatgtgatgtgaggggtttgaatccaattttgggtgttgtttacaaagttgtctgttaggaataggatagcattcatacatatttttcggtaatctcaggtctagctaggcgattgaaaattttgtagtagaacctgattttgtattttagtctcgtatatatagagaaacaatggccagttttggtatcctattgttttgtatccacatgtatctgcatacatggccaagtgaatctggaattaaacagcatgggacgcaagactttctattaaaaaaaagatcagttgcagagcgacttcaatgttgtcgtccggcagttctgatgattgtaaagaaaattagtgtttactgaataacatgattatttagattaatgttatttcttaatatgattattta

SEQ ID NO: 40466 - DNA, 3394 bp, Zea Mays
aaaccgagcacgaacagagagagcctcgcccgccgtctgcaccggccttgaaagagctggagaagcgagccagcacccagcagagcaagaaagccacaaggagatactgaggacgcgaggccaagctcccccgacggcattagagtaggagggaggaggggaagcagagagggacggcccttctcgtcctcgcaccctgtgaaacgcggcccgcgaccgacagcagctcgctcgctgtcatctctcgagatctcaagcagttcgttggttggccattttctttttctttttttgatatacttgctagcttggaagttggtaaaagatgaactcaacacgccgagcttcaaaagcggcaaagtcaacaatcaattaccacaggttttcattagatgagcaccacttatttgagccagatgctttgattaccaaggagcgagatgccaatcatcaatcaaggcaaagttctcaatcttgcagaacatatgcatacagaagattgaccactccccagtttgtatctgcattgtctggaatctggaatcttgttggccagcctgaatcatctggcacagctcaaagatctagtattcatgggatttcgagtagggaagaccctgtgtgctttagcagggaccaacaaggaaatatactgacaccttgctgtgtggaaaactctagtggtctgagatctcaatactgtttctctacaccaaaagaaatttatgaggatcttatttacgtaaagaagaagatgttaacgctgacaccattcaataacattgttggtgcatcatccacatggatgcatatgcattccacaaataaggttgaaggtgcgcattatttgcaatttggaactatatactctgtgcaagctgaaaagatggaaaaaatcgagacttctcagaatagcaaaagaagcatgtgtgaggaaacttgtgctagttccaacaatatggatattagggacaatagctattcaaatcaaacaagacacatgcctaacgagctatttactatctcaaatgaagaagctagcagtacacatgattgtgaaagttctcggcacaatactgaatgcaatctagaaaaaaatcaagaagattctaattttttagcttgcccagtacatgaaatggaaattgccaaagaggtgaggataatgccagggagtcaggttttcagtaaggcgtgcacagatgctcagcttgacaaatcaaagcacatgtcttgtctggtgggtgatgctgttgttcttaattcagcaaatgcagatgaaagtgcttgtagggaggacgtgtgtctgcagctttctctagacaagtgttcacaagagctccaaccaacttttcagcatcgatttgatggtgctgttaccataaacaggcatgctgtggcaggagcattagctgggacagcagtcagtgtttctttgcatccaattgatactgtgaaaacgataattcaggctaacagttatggacagagttcagtctaccatacactaaggcgcacccttattgagagaggtgttctggggttatatggaggacttgctagcaaacttgcttgttctgcaccaatttctgcaatttataccttaacttatgaaacagtgaagggggctcttctgcctgtttttccaaaggaatatcattcaattgcgcattgtgctgctggtggctgctctagtattgcaacatcctttgtttttacacccagtgaatgcataaaacaacaaatgcaagtgggttcccattatcagaactgctggaatgctttagtaggatgcctcaaaaagggtggcattgcttcattatatactggatggggtgctgtcctttgcagaaatatcccacattccatagtgaagttctatgcttatgagagtctgaagcagtctctgttgaaatcagcacctgatagggccaaactcaattctggccaaacggtgcagcattgtgatttttcatacacatctagaatccatatcagccaatgcagctactcaaagcccataccttacatcagtcacttgattgtgcaagttctaaggcaaggatgatcctcacttgttgacttctgtgtttttaattctatttggtttaatacttcaagtggatgagattagcatattcataaacaaacgtccatgtgcttaggcttttaactttgcatttattatttcttacacagacctctaggtgggacatatcccacctaataccctcctataaacatgtgtaagaagtaaaaaatgtgaatttaaaagtttttttcttgaatacgcaggagagctgcgtatcattatattaataggagagaaaaaggcatcaaacccaaaaacaaacatacaaacacacacacgcacccaaagataccctcagcgcacaacataaacaagacaccagcttacacatcctaagcaaaacagatgtttgtgttctgaacaattgatgctaatctcatctcatgtatctgaagcataaaaccaaatagtgtcaccctggaagaagacagcaagtgaaggctatccttgtgttggaacttgcacagtgaagtgattgacacaataatgccaagctatgggcttgagtcgttgcatcctggattagctcatacgaattatggatgtgcacaaagcttttatgtggaggttttgctgggtcaactgctgctctctgtacaacaccgtttgatgttatcaagacacgagtgcaattacaggcactcagccctgtttgcaagtatgatggggtggttcatgcactaaaagaaatttttcggcatgaaggcttgtgtggtctttacaggggtttgactccaaggctggctatgtatatgtctcaaggtgctatattctttacgtcctatgagtttctcagtacattaatgtttcctgaacccgaacaagaggttcatgcgaggagcgtttgatcgtgaaatgagaagatggcacagcaaaatacagaactcggggatagtctgacatgtgatgtgaggggtttgaatccaattttgggtgttgtttacaaagttgtctgttaggaataggatagcattcatacatatttttcggtaatctcaggtctagctaggcgattgaaaattttgtagtagaacctgattttgtattttagtctcgtatatatagagaaacaatggccagttttggtatcctattgttttgtatccacatgtatctgcatacatggccaagtgaatctggaattaaacagcatgggacgcaagactttctattaaaaaaaagatcagttgcagagcgacttcaatgttgtcgtccggcagttctgatgattgtaaagaaaattagtgtttactgaataacatgattatttagattaatgttatttcttaatatgattattta

SEQ ID NO: 40467 - DNA, 2980 bp, Zea Mays
aaaccgagcacgaacagagagagcctcgcccgccgtctgcaccggccttgaaagagctggagaagcgagccagcacccagcagagcaagaaagccacaaggagatactgaggacgcgaggccaagctcccccgacggcattagagtaggagggaggaggggaagcagagagggacggcccttctcgtcctcgcaccctgtgaaacgcggcccgcgaccgacagcagctcgctcgctgtcatctctcgagatctcaagcagttcgttggttggccattttctttttctttttttgatatacttgctagcttggaagttggtaaaagatgaactcaacacgccgagcttcaaaagcggcaaagtcaacaatcaattaccacaggttttcattagatgagcaccacttatttgagccagatgctttgattaccaaggagcgagatgccaatcatcaatcaaggcaaagttctcaatcttgcagaacatatgcatacagaagattgaccactccccagtttgtatctgcattgtctggaatctggaatcttgttggccagcctgaatcatctggcacagctcaaagatctagtattcatgggatttcgagtagggaagaccctgtgtgctttagcagggaccaacaaggaaatatactgacaccttgctgtgtggaaaactctagtggtctgagatctcaatactgtttctctacaccaaaagaaatttatgaggatcttatttacgtaaagaagaagatgttaacgctgacaccattcaataacattgttggtgcatcatccacatggatgcatatgcattccacaaataaggttgaaggtgcgcattatttgcaatttggaactatatactctgtgcaagctgaaaagatggaaaaaatcgagacttctcagaatagcaaaagaagcatgtgtgaggaaacttgtgctagttccaacaatatggatattagggacaatagctattcaaatcaaacaagacacatgcctaacgagctatttactatctcaaatgaagaagctagcagtacacatgattgtgaaagttctcggcacaatactgaatgcaatctagaaaaaaatcaagaagattctaattttttagcttgcccagtacatgaaatggaaattgccaaagaggtgaggataatgccagggagtcaggttttcagtaaggcgtgcacagatgctcagcttgacaaatcaaagcacatgtcttgtctggtgggtgatgctgttgttcttaattcagcaaatgcagatgaaagtgcttgtagggaggacgtgtgtctgcagctttctctagacaagtgttcacaagagctccaaccaacttttcagcatcgatttgatggtgctgttaccataaacaggcatgctgtggcaggagcattagctgggacagcagtcagtgtttctttgcatccaattgatactgtgaaaacgataattcaggctaacagttatggacagagttcagtctaccatacactaaggcgcacccttattgagagaggtgttctggggttatatggaggacttgctagcaaacttgcttgttctgcaccaatttctgcaatttataccttaacttatgaaacagtgaagggggctcttctgcctgtttttccaaaggaatatcattcaattgcgcattgtgctgctggtggctgctctagtattgcaacatcctttgtttttacacccagtgaatgcataaaacaacaaatgcaagaatgctttagtaggatgcctcaaaaagggtggcattgcttcattatatactggatggggtgctgtcctttgcagaaatatcccacattccatagtgaaggtatcaaatcgaagtacttgcttttgagtccaataaaattcaaaatttctttaatttgataatttgtttctgcctttctggtgtttaaaggacattatcccttttctgaatttatagttctatgcttatgagagtctgaagcagtctctgttgaaatcagcacctgatagggccaaactcaattctggccaaacggttagttttttagacttaccttattaagcataaaaccaaatagtgtcaccctggaagaagacagcaagtgaaggctatccttgtgttggaacttgcacagtgaagtgattgacacaataatgccaagctatgggcttgagtcgttgcatcctggattagctcatacgaattatggatgtgcacaaagcttttatgtggaggttttgctgggtcaactgctgctctctgtacaacaccgtttgatgttatcaagacacgagtgcaattacaggcactcagccctgtttgcaagtatgatggggtggttcatgcactaaaagaaatttttcggcatgaaggcttgtgtggtctttacaggggtttgactccaaggctggctatgtatatgtctcaaggtgctatattctttacgtcctatgagtttctcagtacattaatgtttcctgaacccgaacaagaggttcatgcgaggagcgtttgatcgtgaaatgagaagatggcacagcaaaatacagaactcggggatagtctgacatgtgatgtgaggggtttgaatccaattttgggtgttgtttacaaagttgtctgttaggaataggatagcattcatacatatttttcggtaatctcaggtctagctaggcgattgaaaattttgtagtagaacctgattttgtattttagtctcgtatatatagagaaacaatggccagttttggtatcctattgttttgtatccacatgtatctgcatacatggccaagtgaatctggaattaaacagcatgggacgcaagactttctattaaaaaaaagatcagttgcagagcgacttcaatgttgtcgtccggcagttctgatgattgtaaagaaaattagtgtttactgaataacatgattatttagattaatgttatttcttaatatgattattta

SEQ ID NO: 40468 - DNA, 3745 bp, Zea Mays
aaaccgagcacgaacagagagagcctcgcccgccgtctgcaccggccttgaaagagctggagaagcgagccagcacccagcagagcaagaaagccacaaggagatactgaggacgcgaggccaagctcccccgacggcattagagtaggagggaggaggggaagcagagagggacggcccttctcgtcctcgcaccctgtgaaacgcggcccgcgaccgacagcagctcgctcgctgtcatctctcgagatctcaagcagttcgttggttggccattttctttttctttttttgatatacttgctagcttggaagttggtaaaagatgaactcaacacgccgagcttcaaaagcggcaaagtcaacaatcaattaccacaggttttcattagatgagcaccacttatttgagccagatgctttgattaccaaggagcgagatgccaatcatcaatcaaggcaaagttctcaatcttgcagaacatatgcatacagaagattgaccactccccagtttgtatctgcattgtctggaatctggaatcttgttggccagcctgaatcatctggcacagctcaaagatctagtattcatgggatttcgagtagggaagaccctgtgtgctttagcagggaccaacaaggaaatatactgacaccttgctgtgtggaaaactctagtggtctgagatctcaatactgtttctctacaccaaaagaaatttatgaggatcttatttacgtaaagaagaagatgttaacgctgacaccattcaataacattgttggtgcatcatccacatggatgcatatgcattccacaaataaggttgaaggtgcgcattatttgcaatttggaactatatactctgtgcaagctgaaaagatggaaaaaatcgagacttctcagaatagcaaaagaagcatgtgtgaggaaacttgtgctagttccaacaatatggatattagggacaatagctattcaaatcaaacaagacacatgcctaacgagctatttactatctcaaatgaagaagctagcagtacacatgattgtgaaagttctcggcacaatactgaatgcaatctagaaaaaaatcaagaagattctaattttttagcttgcccagtacatgaaatggaaattgccaaagaggtgaggataatgccagggagtcaggttttcagtaaggcgtgcacagatgctcagcttgacaaatcaaagcacatgtcttgtctggtgggtgatgctgttgttcttaattcagcaaatgcagatgaaagtgcttgtagggaggacgtgtgtctgcagctttctctagacaagtgttcacaagagctccaaccaacttttcagcatcgatttgatggtgctgttaccataaacaggcatgctgtggcaggagcattagctgggacagcagtcagtgtttctttgcatccaattgatactgtgaaaacgataattcaggctaacagttatggacagagttcagtctaccatacactaaggcgcacccttattgagagaggtgttctggggttatatggaggacttgctagcaaacttgcttgttctgcaccaatttctgcaatttataccttaacttatgaaacagtgaagggggctcttctgcctgtttttccaaaggaatatcattcaattgcgcattgtgctgctggtggctgctctagtattgcaacatcctttgtttttacacccagtgaatgcataaaacaacaaatgcaagaatgctttagtaggatgcctcaaaaagggtggcattgcttcattatatactggatggggtgctgtcctttgcagaaatatcccacattccatagtgaagttctatgcttatgagagtctgaagcagtctctgttgaaatcagcacctgatagggccaaactcaattctggccaaacggttagttttttagacttaccttattaaggtatcattcttatacccacatattgacctgtgtaataactaataagaaatatcaaatgcggaattataagtttaaaaaaaacacaaatattttgtttctgaataactgatactattcccatgcacctgaagcataaaatcaaacagagttaagcacaaatgaaggtcattcttgcattggaactagcgcaatcaagtgactgacataatgcccaagtatgggcttgaatagctgcattggattcatacttcagctgacacgggtcacctattatagttgcgggaaggagcaccatgccaccatcccttcttttttcttcacgctgctgaccttatctacatacttccaggtgcagcattgtgatttttcatacacatctagaatccatatcagccaatgcagctactcaaagcccataccttacatcagtcacttgattgtgcaagttctaaggcaaggatgatcctcacttgttgacttctgtgtttttaattctatttggtttaatacttcaagtggatgagattagcatattcataaacaaacgtccatgtgcttaggcttttaactttgcatttattatttcttacacagacctctaggtgggacatatcccacctaataccctcctataaacatgtgtaagaagtaaaaaatgtgaatttaaaagtttttttcttgaatacgcaggagagctgcgtatcattatattaataggagagaaaaaggcatcaaacccaaaaacaaacatacaaacacacacacgcacccaaagataccctcagcgcacaacataaacaagacaccagcttacacatcctaagcaaaacagatgtttgtgttctgaacaattgatgctaatctcatctcatgtatctgaagcataaaaccaaatagtgtcaccctggaagaagacagcaagtgaaggctatccttgtgttggaacttgcacagtgaagtgattgacacaataatgccaagctatgggcttgagtcgttgcatcctggattagctcatacgaattatggatgtgcacaaagcttttatgtggaggttttgctgggtcaactgctgctctctgtacaacaccgtttgatgttatcaagacacgagtgcaattacaggcactcagccctgtttgcaagtatgatggggtggttcatgcactaaaagaaatttttcggcatgaaggcttgtgtggtctttacaggggtttgactccaaggctggctatgtatatgtctcaaggtgctatattctttacgtcctatgagtttctcagtacattaatgtttcctgaacccgaacaagaggttcatgcgaggagcgtttgatcgtgaaatgagaagatggcacagcaaaatacagaactcggggatagtctgacatgtgatgtgaggggtttgaatccaattttgggtgttgtttacaaagttgtctgttaggaataggatagcattcatacatatttttcggtaatctcaggtctagctaggcgattgaaaattttgtagtagaacctgattttgtattttagtctcgtatatatagagaaacaatggccagttttggtatcctattgttttgtatccacatgtatctgcatacatggccaagtgaatctggaattaaacagcatgggacgcaagactttctattaaaaaaaagatcagttgcagagcgacttcaatgttgtcgtccggcagttctgatgattgtaaagaaaattagtgtttactgaataacatgattatttagattaatgttatttcttaatatgattattta

SEQ ID NO: 40469 - DNA, 3210 bp, Zea Mays
aaaccgagcacgaacagagagagcctcgcccgccgtctgcaccggccttgaaagagctggagaagcgagccagcacccagcagagcaagaaagccacaaggagatactgaggacgcgaggccaagctcccccgacggcattagagtaggagggaggaggggaagcagagagggacggcccttctcgtcctcgcaccctgtgaaacgcggcccgcgaccgacagcagctcgctcgctgtcatctctcgagatctcaagcagttcgttggttggccattttctttttctttttttgatatacttgctagcttggaagttggtaaaagatgaactcaacacgccgagcttcaaaagcggcaaagtcaacaatcaattaccacaggttttcattagatgagcaccacttatttgagccagatgctttgattaccaaggagcgagatgccaatcatcaatcaaggcaaagttctcaatcttgcagaacatatgcatacagaagattgaccactccccagtttgtatctgcattgtctggaatctggaatcttgttggccagcctgaatcatctggcacagctcaaagatctagtattcatgggatttcgagtagggaagaccctgtgtgctttagcagggaccaacaaggaaatatactgacaccttgctgtgtggaaaactctagtggtctgagatctcaatactgtttctctacaccaaaagaaatttatgaggatcttatttacgtaaagaagaagatgttaacgctgacaccattcaataacattgttggtgcatcatccacatggatgcatatgcattccacaaataaggttgaaggtgcgcattatttgcaatttggaactatatactctgtgcaagctgaaaagatggaaaaaatcgagacttctcagaatagcaaaagaagcatgtgtgaggaaacttgtgctagttccaacaatatggatattagggacaatagctattcaaatcaaacaagacacatgcctaacgagctatttactatctcaaatgaagaagctagcagtacacatgattgtgaaagttctcggcacaatactgaatgcaatctagaaaaaaatcaagaagattctaattttttagcttgcccagtacatgaaatggaaattgccaaagaggtgaggataatgccagggagtcaggttttcagtaaggcgtgcacagatgctcagcttgacaaatcaaagcacatgtcttgtctggtgggtgatgctgttgttcttaattcagcaaatgcagatgaaagtgcttgtagggaggacgtgtgtctgcagctttctctagacaagtgttcacaagagctccaaccaacttttcagcatcgatttgatggtgctgttaccataaacaggcatgctgtggcaggagcattagctgggacagcagtcagtgtttctttgcatccaattgatactgtgaaaacgataattcaggctaacagttatggacagagttcagtctaccatacactaaggcgcacccttattgagagaggtgttctggggttatatggaggacttgctagcaaacttgcttgttctgcaccaatttctgcaatttataccttaacttatgaaacagtgaagggggctcttctgcctgtttttccaaaggaatatcattcaattgcgcattgtgctgctggtggctgctctagtattgcaacatcctttgtttttacacccagtgaatgcataaaacaacaaatgcaagtgggttcccattatcagaactgctggaatgctttagtaggatgcctcaaaaagggtggcattgcttcattatatactggatggggtgctgtcctttgcagaaatatcccacattccatagtgaaggacattatcccttttctgaatttatagttctatgcttatgagagtctgaagcagtctctgttgaaatcagcacctgatagggccaaactcaattctggccaaacggttagttttttagacttaccttattaaggtatcattcttatacccacatattgacctgtgtaataactaataagaaatatcaaatgcggaattataagtttaaaaaaaacacaaatattttgtttctgaataactgatactattcccatgcacctgaagcataaaatcaaacagagttaagcacaaatgaaggtcattcttgcattggaactagcgcaatcaagtgactgacataatgcccaagtatgggcttgaatagctgcattggattcatacttcagctgacacgggtcacctattatagttgcgggaaggagcaccatgccaccatcccttcttttttcttcacgctgctgaccttatctacatacttccaggtgcagcattgtgatttttcatacacatctagaatccatatcagccaatgcagctactcaaagcccataccttacatcagtcacttgattgtgcaagttctaagcttttatgtggaggttttgctgggtcaactgctgctctctgtacaacaccgtttgatgttatcaagacacgagtgcaattacaggcactcagccctgtttgcaagtatgatggggtggttcatgcactaaaagaaatttttcggcatgaaggcttgtgtggtctttacaggggtttgactccaaggctggctatgtatatgtctcaaggtgctatattctttacgtcctatgagtttctcagtacattaatgtttcctgaacccgaacaagaggttcatgcgaggagcgtttgatcgtgaaatgagaagatggcacagcaaaatacagaactcggggatagtctgacatgtgatgtgaggggtttgaatccaattttgggtgttgtttacaaagttgtctgttaggaataggatagcattcatacatatttttcggtaatctcaggtctagctaggcgattgaaaattttgtagtagaacctgattttgtattttagtctcgtatatatagagaaacaatggccagttttggtatcctattgttttgtatccacatgtatctgcatacatggccaagtgaatctggaattaaacagcatgggacgcaagactttctattaaaaaaaagatcagttgcagagcgacttcaatgttgtcgtccggcagttctgatgattgtaaagaaaattagtgtttactgaataacatgattatttagattaatgttatttcttaatatgattattta

SEQ ID NO: 40470 - DNA, 4087 bp, Zea Mays
aaaccgagcacgaacagagagagcctcgcccgccgtctgcaccggccttgaaagagctggagaagcgagccagcacccagcagagcaagaaagccacaaggagatactgaggacgcgaggccaagctcccccgacggcattagagtaggagggaggaggggaagcagagagggacggcccttctcgtcctcgcaccctgtgaaacgcggcccgcgaccgacagcagctcgctcgctgtcatctctcgagatctcaagcagttcgttggttggccattttctttttctttttttgatatacttgctagcttggaagttggtaaaagatgaactcaacacgccgagcttcaaaagcggcaaagtcaacaatcaattaccacaggttttcattagatgagcaccacttatttgagccagatgctttgattaccaaggagcgagatgccaatcatcaatcaaggcaaagttctcaatcttgcagaacatatgcatacagaagattgaccactccccagtttgtatctgcattgtctggaatctggaatcttgttggccagcctgaatcatctggcacagctcaaagatctagtattcatgggatttcgagtagggaagaccctgtgtgctttagcagggaccaacaaggaaatatactgacaccttgctgtgtggaaaactctagtggtctgagatctcaatactgtttctctacaccaaaagaaatttatgaggatcttatttacgtaaagaagaagatgttaacgctgacaccattcaataacattgttggtgcatcatccacatggatgcatatgcattccacaaataaggttgaaggtgcgcattatttgcaatttggaactatatactctgtgcaagctgaaaagatggaaaaaatcgagacttctcagaatagcaaaagaagcatgtgtgaggaaacttgtgctagttccaacaatatggatattagggacaatagctattcaaatcaaacaagacacatgcctaacgagctatttactatctcaaatgaagaagctagcagtacacatgattgtgaaagttctcggcacaatactgaatgcaatctagaaaaaaatcaagaagattctaattttttagcttgcccagtacatgaaatggaaattgccaaagaggtgaggataatgccagggagtcaggttttcagtaaggcgtgcacagatgctcagcttgacaaatcaaagcacatgtcttgtctggtgggtgatgctgttgttcttaattcagcaaatgcagatgaaagtgcttgtagggaggacgtgtgtctgcagctttctctagacaagtgttcacaagagctccaaccaacttttcagcatcgatttgatggtgctgttaccataaacaggcatgctgtggcaggagcattagctgggacagcagtcagtgtttctttgcatccaattgatactgtgaaaacgataattcaggctaacagttatggacagagttcagtctaccatacactaaggcgcacccttattgagagaggtgttctggggttatatggaggacttgctagcaaacttgcttgttctgcaccaatttctgcaatttataccttaacttatgaaacagtgaagggggctcttctgcctgtttttccaaaggaatatcattcaattgcgcattgtgctgctggtggctgctctagtattgcaacatcctttgtttttacacccagtgaatgcataaaacaacaaatgcaagtgggttcccattatcagaactgctggaatgctttagtaggatgcctcaaaaagggtggcattgcttcattatatactggatggggtgctgtcctttgcagaaatatcccacattccatagtgaagttctatgcttatgagagtctgaagcagtctctgttgaaatcagcacctgatagggccaaactcaattctggccaaacggtgcagcattgtgatttttcatacacatctagaatccatatcagccaatgcagctactcaaagcccataccttacatcagtcacttgattgtgcaagttctaaggcaaggatgatcctcacttgttgacttctgtgtttttaattctatttggtttaatacttcaagtggatgagattagcatattcataaacaaacgtccatgtgcttaggcttttaactttgcatttattatttcttacacagacctctaggtgggacatatcccacctaataccctcctataaacatgtgtaagaagtaaaaaatgtgaatttaaaagtttttttcttgaatacgcaggagagctgcgtatcattatattaataggagagaaaaaggcatcaaacccaaaaacaaacatacaaacacacacacgcacccaaagataccctcagcgcacaacataaacaagacaccagcttacacatcctaagcaaaacagatgtttgtgttctgaacaattgatgctaatctcatctcatgtatctgaagcataaaaccaaatagtgtcaccctggaagaagacagcaagtgaaggctatccttgtgttggaacttgcacagtgaagtgattgacacaataatgccaagctatgggcttgagtcgttgcatcctggattagctcatacgaattatggatgtgcacaaaggtcagaacgcttcaccttgaagcctgtagataagattagcaacacaaaaacatctcagcaggaaataaaaagatgttgctcgtccccacaactataaaacgtgacccctgctggctgaagacaaggcagagaagcaagcatagctgagagcacacttgcagtgtgagggctctgcctgctttctctgcggctagcagggttgccttatgttgttgcgagaaggaagaacacccctttatttcctactgaaatatttctacgtgctgctgatcttatctactggcttccagatttatacacatccaaaattattgtcagccaatgcagctactcgagcccataccttgtattacatcagtcacttgattgcacaaacattatttgtgtaactctatttggtttcatgctttaggtgtataaggttagcatccattattcatacacacaaacatctttgtgcctttttaactcttaccttatcatttttattttcttgcattaatatatattagttacaattggagtagaacacatgggcatttctgatactatcctgcattgtttcaatgcttcgaagagaagaaaaaagaaataagaaaccgcaagatctatatgatgatttacctgttctagcatctcaattctcaaatacaacagataaaactaatattgcaccccctttgttacttgcagcttttatgtggaggttttgctgggtcaactgctgctctctgtacaacaccgtttgatgttatcaagacacgagtgcaattacaggcactcagccctgtttgcaagtatgatggggtggttcatgcactaaaagaaatttttcggcatgaaggcttgtgtggtctttacaggggtttgactccaaggctggctatgtatatgtctcaaggtgctatattctttacgtcctatgagtttctcagtacattaatgtttcctgaacccgaacaagaggttcatgcgaggagcgtttgatcgtgaaatgagaagatggcacagcaaaatacagaactcggggatagtctgacatgtgatgtgaggggtttgaatccaattttgggtgttgtttacaaagttgtctgttaggaataggatagcattcatacatatttttcggtaatctcaggtctagctaggcgattgaaaattttgtagtagaacctgattttgtattttagtctcgtatatatagagaaacaatggccagttttggtatcctattgttttgtatccacatgtatctgcatacatggccaagtgaatctggaattaaacagcatgggacgcaagactttctattaaaaaaaagatcagttgcagagcgacttcaatgttgtcgtccggcagttctgatgattgtaaagaaaattagtgtttactgaataacatgattatttagattaatgttatttcttaatatgattattta

SEQ ID NO: 40471 - DNA, 3368 bp, Zea Mays
aaaccgagcacgaacagagagagcctcgcccgccgtctgcaccggccttgaaagagctggagaagcgagccagcacccagcagagcaagaaagccacaaggagatactgaggacgcgaggccaagctcccccgacggcattagagtaggagggaggaggggaagcagagagggacggcccttctcgtcctcgcaccctgtgaaacgcggcccgcgaccgacagcagctcgctcgctgtcatctctcgagatctcaagcagttcgttggttggccattttctttttctttttttgatatacttgctagcttggaagttggtaaaagatgaactcaacacgccgagcttcaaaagcggcaaagtcaacaatcaattaccacaggttttcattagatgagcaccacttatttgagccagatgctttgattaccaaggagcgagatgccaatcatcaatcaaggcaaagttctcaatcttgcagaacatatgcatacagaagattgaccactccccagtttgtatctgcattgtctggaatctggaatcttgttggccagcctgaatcatctggcacagctcaaagatctagtattcatgggatttcgagtagggaagaccctgtgtgctttagcagggaccaacaaggaaatatactgacaccttgctgtgtggaaaactctagtggtctgagatctcaatactgtttctctacaccaaaagaaatttatgaggatcttatttacgtaaagaagaagatgttaacgctgacaccattcaataacattgttggtgcatcatccacatggatgcatatgcattccacaaataaggttgaaggtgcgcattatttgcaatttggaactatatactctgtgcaagctgaaaagatggaaaaaatcgagacttctcagaatagcaaaagaagcatgtgtgaggaaacttgtgctagttccaacaatatggatattagggacaatagctattcaaatcaaacaagacacatgcctaacgagctatttactatctcaaatgaagaagctagcagtacacatgattgtgaaagttctcggcacaatactgaatgcaatctagaaaaaaatcaagaagattctaattttttagcttgcccagtacatgaaatggaaattgccaaagaggtgaggataatgccagggagtcaggttttcagtaaggcgtgcacagatgctcagcttgacaaatcaaagcacatgtcttgtctggtgggtgatgctgttgttcttaattcagcaaatgcagatgaaagtgcttgtagggaggacgtgtgtctgcagctttctctagacaagtgttcacaagagctccaaccaacttttcagcatcgatttgatggtgctgttaccataaacaggcatgctgtggcaggagcattagctgggacagcagtcagtgtttctttgcatccaattgatactgtgaaaacgataattcaggctaacagttatggacagagttcagtctaccatacactaaggcgcacccttattgagagaggtgttctggggttatatggaggacttgctagcaaacttgcttgttctgcaccaatttctgcaatttataccttaacttatgaaacagtgaagggggctcttctgcctgtttttccaaaggaatatcattcaattgcgcattgtgctgctggtggctgctctagtattgcaacatcctttgtttttacacccagtgaatgcataaaacaacaaatgcaagaatgctttagtaggatgcctcaaaaagggtggcattgcttcattatatactggatggggtgctgtcctttgcagaaatatcccacattccatagtgaagttctatgcttatgagagtctgaagcagtctctgttgaaatcagcacctgatagggccaaactcaattctggccaaacggtgcagcattgtgatttttcatacacatctagaatccatatcagccaatgcagctactcaaagcccataccttacatcagtcacttgattgtgcaagttctaaggcaaggatgatcctcacttgttgacttctgtgtttttaattctatttggtttaatacttcaagtggatgagattagcatattcataaacaaacgtccatgtgcttaggcttttaactttgcatttattatttcttacacagacctctaggtgggacatatcccacctaataccctcctataaacatgtgtaagaagtaaaaaatgtgaatttaaaagtttttttcttgaatacgcaggagagctgcgtatcattatattaataggagagaaaaaggcatcaaacccaaaaacaaacatacaaacacacacacgcacccaaagataccctcagcgcacaacataaacaagacaccagcttacacatcctaagcaaaacagatgtttgtgttctgaacaattgatgctaatctcatctcatgtatctgaagcataaaaccaaatagtgtcaccctggaagaagacagcaagtgaaggctatccttgtgttggaacttgcacagtgaagtgattgacacaataatgccaagctatgggcttgagtcgttgcatcctggattagctcatacgaattatggatgtgcacaaagcttttatgtggaggttttgctgggtcaactgctgctctctgtacaacaccgtttgatgttatcaagacacgagtgcaattacaggcactcagccctgtttgcaagtatgatggggtggttcatgcactaaaagaaatttttcggcatgaaggcttgtgtggtctttacaggggtttgactccaaggctggctatgtatatgtctcaaggtgctatattctttacgtcctatgagtttctcagtacattaatgtttcctgaacccgaacaagaggttcatgcgaggagcgtttgatcgtgaaatgagaagatggcacagcaaaatacagaactcggggatagtctgacatgtgatgtgaggggtttgaatccaattttgggtgttgtttacaaagttgtctgttaggaataggatagcattcatacatatttttcggtaatctcaggtctagctaggcgattgaaaattttgtagtagaacctgattttgtattttagtctcgtatatatagagaaacaatggccagttttggtatcctattgttttgtatccacatgtatctgcatacatggccaagtgaatctggaattaaacagcatgggacgcaagactttctattaaaaaaaagatcagttgcagagcgacttcaatgttgtcgtccggcagttctgatgattgtaaagaaaattagtgtttactgaataacatgattatttagattaatgttatttcttaatatgattattta

SEQ ID NO: 40472 - DNA, 3771 bp, Zea Mays
aaaccgagcacgaacagagagagcctcgcccgccgtctgcaccggccttgaaagagctggagaagcgagccagcacccagcagagcaagaaagccacaaggagatactgaggacgcgaggccaagctcccccgacggcattagagtaggagggaggaggggaagcagagagggacggcccttctcgtcctcgcaccctgtgaaacgcggcccgcgaccgacagcagctcgctcgctgtcatctctcgagatctcaagcagttcgttggttggccattttctttttctttttttgatatacttgctagcttggaagttggtaaaagatgaactcaacacgccgagcttcaaaagcggcaaagtcaacaatcaattaccacaggttttcattagatgagcaccacttatttgagccagatgctttgattaccaaggagcgagatgccaatcatcaatcaaggcaaagttctcaatcttgcagaacatatgcatacagaagattgaccactccccagtttgtatctgcattgtctggaatctggaatcttgttggccagcctgaatcatctggcacagctcaaagatctagtattcatgggatttcgagtagggaagaccctgtgtgctttagcagggaccaacaaggaaatatactgacaccttgctgtgtggaaaactctagtggtctgagatctcaatactgtttctctacaccaaaagaaatttatgaggatcttatttacgtaaagaagaagatgttaacgctgacaccattcaataacattgttggtgcatcatccacatggatgcatatgcattccacaaataaggttgaaggtgcgcattatttgcaatttggaactatatactctgtgcaagctgaaaagatggaaaaaatcgagacttctcagaatagcaaaagaagcatgtgtgaggaaacttgtgctagttccaacaatatggatattagggacaatagctattcaaatcaaacaagacacatgcctaacgagctatttactatctcaaatgaagaagctagcagtacacatgattgtgaaagttctcggcacaatactgaatgcaatctagaaaaaaatcaagaagattctaattttttagcttgcccagtacatgaaatggaaattgccaaagaggtgaggataatgccagggagtcaggttttcagtaaggcgtgcacagatgctcagcttgacaaatcaaagcacatgtcttgtctggtgggtgatgctgttgttcttaattcagcaaatgcagatgaaagtgcttgtagggaggacgtgtgtctgcagctttctctagacaagtgttcacaagagctccaaccaacttttcagcatcgatttgatggtgctgttaccataaacaggcatgctgtggcaggagcattagctgggacagcagtcagtgtttctttgcatccaattgatactgtgaaaacgataattcaggctaacagttatggacagagttcagtctaccatacactaaggcgcacccttattgagagaggtgttctggggttatatggaggacttgctagcaaacttgcttgttctgcaccaatttctgcaatttataccttaacttatgaaacagtgaagggggctcttctgcctgtttttccaaaggaatatcattcaattgcgcattgtgctgctggtggctgctctagtattgcaacatcctttgtttttacacccagtgaatgcataaaacaacaaatgcaagtgggttcccattatcagaactgctggaatgctttagtaggatgcctcaaaaagggtggcattgcttcattatatactggatggggtgctgtcctttgcagaaatatcccacattccatagtgaagttctatgcttatgagagtctgaagcagtctctgttgaaatcagcacctgatagggccaaactcaattctggccaaacggttagttttttagacttaccttattaaggtatcattcttatacccacatattgacctgtgtaataactaataagaaatatcaaatgcggaattataagtttaaaaaaaacacaaatattttgtttctgaataactgatactattcccatgcacctgaagcataaaatcaaacagagttaagcacaaatgaaggtcattcttgcattggaactagcgcaatcaagtgactgacataatgcccaagtatgggcttgaatagctgcattggattcatacttcagctgacacgggtcacctattatagttgcgggaaggagcaccatgccaccatcccttcttttttcttcacgctgctgaccttatctacatacttccaggtgcagcattgtgatttttcatacacatctagaatccatatcagccaatgcagctactcaaagcccataccttacatcagtcacttgattgtgcaagttctaaggcaaggatgatcctcacttgttgacttctgtgtttttaattctatttggtttaatacttcaagtggatgagattagcatattcataaacaaacgtccatgtgcttaggcttttaactttgcatttattatttcttacacagacctctaggtgggacatatcccacctaataccctcctataaacatgtgtaagaagtaaaaaatgtgaatttaaaagtttttttcttgaatacgcaggagagctgcgtatcattatattaataggagagaaaaaggcatcaaacccaaaaacaaacatacaaacacacacacgcacccaaagataccctcagcgcacaacataaacaagacaccagcttacacatcctaagcaaaacagatgtttgtgttctgaacaattgatgctaatctcatctcatgtatctgaagcataaaaccaaatagtgtcaccctggaagaagacagcaagtgaaggctatccttgtgttggaacttgcacagtgaagtgattgacacaataatgccaagctatgggcttgagtcgttgcatcctggattagctcatacgaattatggatgtgcacaaagcttttatgtggaggttttgctgggtcaactgctgctctctgtacaacaccgtttgatgttatcaagacacgagtgcaattacaggcactcagccctgtttgcaagtatgatggggtggttcatgcactaaaagaaatttttcggcatgaaggcttgtgtggtctttacaggggtttgactccaaggctggctatgtatatgtctcaaggtgctatattctttacgtcctatgagtttctcagtacattaatgtttcctgaacccgaacaagaggttcatgcgaggagcgtttgatcgtgaaatgagaagatggcacagcaaaatacagaactcggggatagtctgacatgtgatgtgaggggtttgaatccaattttgggtgttgtttacaaagttgtctgttaggaataggatagcattcatacatatttttcggtaatctcaggtctagctaggcgattgaaaattttgtagtagaacctgattttgtattttagtctcgtatatatagagaaacaatggccagttttggtatcctattgttttgtatccacatgtatctgcatacatggccaagtgaatctggaattaaacagcatgggacgcaagactttctattaaaaaaaagatcagttgcagagcgacttcaatgttgtcgtccggcagttctgatgattgtaaagaaaattagtgtttactgaataacatgattatttagattaatgttatttcttaatatgattattta

SEQ ID NO: 40473 - DNA, 2524 bp, Zea Mays
aaaccgagcacgaacagagagagcctcgcccgccgtctgcaccggccttgaaagagctggagaagcgagccagcacccagcagagcaagaaagccacaaggagatactgaggacgcgaggccaagctcccccgacggcattagagtaggagggaggaggggaagcagagagggacggcccttctcgtcctcgcaccctgtgaaacgcggcccgcgaccgacagcagctcgctcgctgtcatctctcgagatctcaagcagttcgttggttggccattttctttttctttttttgatatacttgctagcttggaagttggtaaaagatgaactcaacacgccgagcttcaaaagcggcaaagtcaacaatcaattaccacaggttttcattagatgagcaccacttatttgagccagatgctttgattaccaaggagcgagatgccaatcatcaatcaaggcaaagttctcaatcttgcagaacatatgcatacagaagattgaccactccccagtttgtatctgcattgtctggaatctggaatcttgttggccagcctgaatcatctggcacagctcaaagatctagtattcatgggatttcgagtagggaagaccctgtgtgctttagcagggaccaacaaggaaatatactgacaccttgctgtgtggaaaactctagtggtctgagatctcaatactgtttctctacaccaaaagaaatttatgaggatcttatttacgtaaagaagaagatgttaacgctgacaccattcaataacattgttggtgcatcatccacatggatgcatatgcattccacaaataaggttgaaggtgcgcattatttgcaatttggaactatatactctgtgcaagctgaaaagatggaaaaaatcgagacttctcagaatagcaaaagaagcatgtgtgaggaaacttgtgctagttccaacaatatggatattagggacaatagctattcaaatcaaacaagacacatgcctaacgagctatttactatctcaaatgaagaagctagcagtacacatgattgtgaaagttctcggcacaatactgaatgcaatctagaaaaaaatcaagaagattctaattttttagcttgcccagtacatgaaatggaaattgccaaagaggtgaggataatgccagggagtcaggttttcagtaaggcgtgcacagatgctcagcttgacaaatcaaagcacatgtcttgtctggtgggtgatgctgttgttcttaattcagcaaatgcagatgaaagtgcttgtagggaggacgtgtgtctgcagctttctctagacaagtgttcacaagagctccaaccaacttttcagcatcgatttgatggtgctgttaccataaacaggcatgctgtggcaggagcattagctgggacagcagtcagtgtttctttgcatccaattgatactgtgaaaacgataattcaggctaacagttatggacagagttcagtctaccatacactaaggcgcacccttattgagagaggtgttctggggttatatggaggacttgctagcaaacttgcttgttctgcaccaatttctgcaatttataccttaacttatgaaacagtgaagggggctcttctgcctgtttttccaaaggaatatcattcaattgcgcattgtgctgctggtggctgctctagtattgcaacatcctttgtttttacacccagtgaatgcataaaacaacaaatgcaagtgggttcccattatcagaactgctgcttttatgtggaggttttgctgggtcaactgctgctctctgtacaacaccgtttgatgttatcaagacacgagtgcaattacaggcactcagccctgtttgcaagtatgatggggtggttcatgcactaaaagaaatttttcggcatgaaggcttgtgtggtctttacaggggtttgactccaaggctggctatgtatatgtctcaaggtgctatattctttacgtcctatgagtttctcagtacattaatgtttcctgaacccgaacaagaggttcatgcgaggagcgtttgatcgtgaaatgagaagatggcacagcaaaatacagaactcggggatagtctgacatgtgatgtgaggggtttgaatccaattttgggtgttgtttacaaagttgtctgttaggaataggatagcattcatacatatttttcggtaatctcaggtctagctaggcgattgaaaattttgtagtagaacctgattttgtattttagtctcgtatatatagagaaacaatggccagttttggtatcctattgttttgtatccacatgtatctgcatacatggccaagtgaatctggaattaaacagcatgggacgcaagactttctattaaaaaaaagatcagttgcagagcgacttcaatgttgtcgtccggcagttctgatgattgtaaagaaaattagtgtttactgaataacatgattatttagattaatgttatttcttaatatgattattta

SEQ ID NO: 40474 - DNA, 4192 bp, Zea Mays
aaaccgagcacgaacagagagagcctcgcccgccgtctgcaccggccttgaaagagctggagaagcgagccagcacccagcagagcaagaaagccacaaggagatactgaggacgcgaggccaagctcccccgacggcattagagtaggagggaggaggggaagcagagagggacggcccttctcgtcctcgcaccctgtgaaacgcggcccgcgaccgacagcagctcgctcgctgtcatctctcgagatctcaagcagttcgttggttggccattttctttttctttttttgatatacttgctagcttggaagttggtaaaagatgaactcaacacgccgagcttcaaaagcggcaaagtcaacaatcaattaccacaggttttcattagatgagcaccacttatttgagccagatgctttgattaccaaggagcgagatgccaatcatcaatcaaggcaaagttctcaatcttgcagaacatatgcatacagaagattgaccactccccagtttgtatctgcattgtctggaatctggaatcttgttggccagcctgaatcatctggcacagctcaaagatctagtattcatgggatttcgagtagggaagaccctgtgtgctttagcagggaccaacaaggaaatatactgacaccttgctgtgtggaaaactctagtggtctgagatctcaatactgtttctctacaccaaaagaaatttatgaggatcttatttacgtaaagaagaagatgttaacgctgacaccattcaataacattgttggtgcatcatccacatggatgcatatgcattccacaaataaggttgaaggtgcgcattatttgcaatttggaactatatactctgtgcaagctgaaaagatggaaaaaatcgagacttctcagaatagcaaaagaagcatgtgtgaggaaacttgtgctagttccaacaatatggatattagggacaatagctattcaaatcaaacaagacacatgcctaacgagctatttactatctcaaatgaagaagctagcagtacacatgattgtgaaagttctcggcacaatactgaatgcaatctagaaaaaaatcaagaagattctaattttttagcttgcccagtacatgaaatggaaattgccaaagaggtgaggataatgccagggagtcaggttttcagtaaggcgtgcacagatgctcagcttgacaaatcaaagcacatgtcttgtctggtgggtgatgctgttgttcttaattcagcaaatgcagatgaaagtgcttgtagggaggacgtgtgtctgcagctttctctagacaagtgttcacaagagctccaaccaacttttcagcatcgatttgatggtgctgttaccataaacaggcatgctgtggcaggagcattagctgggacagcagtcagtgtttctttgcatccaattgatactgtgaaaacgataattcaggctaacagttatggacagagttcagtctaccatacactaaggcgcacccttattgagagaggtgttctggggttatatggaggacttgctagcaaacttgcttgttctgcaccaatttctgcaatttataccttaacttatgaaacagtgaagggggctcttctgcctgtttttccaaaggaatatcattcaattgcgcattgtgctgctggtggctgctctagtattgcaacatcctttgtttttacacccagtgaatgcataaaacaacaaatgcaagtgggttcccattatcagaactgctggaatgctttagtaggatgcctcaaaaagggtggcattgcttcattatatactggatggggtgctgtcctttgcagaaatatcccacattccatagtgaagttctatgcttatgagagtctgaagcagtctctgttgaaatcagcacctgatagggccaaactcaattctggccaaacggttagttttttagacttaccttattaaggtatcattcttatacccacatattgacctgtgtaataactaataagaaatatcaaatgcggaattataagtttaaaaaaaacacaaatattttgtttctgaataactgatactattcccatgcacctgaagcataaaatcaaacagagttaagcacaaatgaaggtcattcttgcattggaactagcgcaatcaagtgactgacataatgcccaagtatgggcttgaatagctgcattggattcatacttcagctgacacgggtcacctattatagttgcgggaaggagcaccatgccaccatcccttcttttttcttcacgctgctgaccttatctacatacttccaggtgcagcattgtgatttttcatacacatctagaatccatatcagccaatgcagctactcaaagcccataccttacatcagtcacttgattgtgcaagttctaaggcaaggatgatcctcacttgttgacttctgtgtttttaattctatttggtttaatacttcaagtggatgagattagcatattcataaacaaacgtccatgtgcttaggcttttaactttgcatttattatttcttacacagacctctaggtgggacatatcccacctaataccctcctataaacatgtgtaagaagtaaaaaatgtgaatttaaaagtttttttcttgaatacgcaggagagctgcgtatcattatattaataggagagaaaaaggcatcaaacccaaaaacaaacatacaaacacacacacgcacccaaagataccctcagcgcacaacataaacaagacaccagcttacacatcctaagcaaaacagatgtttgtgttctgaacaattgatgctaatctcatctcatgtatctgaagcataaaaccaaatagtgtcaccctggaagaagacagcaagtgaaggctatccttgtgttggaacttgcacagtgaagtgattgacacaataatgccaagctatgggcttgagtcgttgcatcctggattagctcatacgaattatggatgtgcacaaaggtcagaacgcttcaccttgaagcctgtagataagattagcaacacaaaaacatctcagcaggaaataaaaagatgttgctcgtccccacaactataaaacgtgacccctgctggctgaagacaaggcagagaagcaagcatagctgagagcacacttgcagtgtgagggctctgcctgctttctctgcggctagcagggttgccttatgttgttgcgagaaggaagaacacccctttatttcctactgaaatatttctacgtgctgctgatcttatctactggcttccagatttatacacatccaaaattattgtcagccaatgcagctactcgagcccataccttgtattacatcagtcacttgattgcacaaacattatttgtgtaactctatttggtttcatgctttaggtgtataagcttttatgtggaggttttgctgggtcaactgctgctctctgtacaacaccgtttgatgttatcaagacacgagtgcaattacaggcactcagccctgtttgcaagtatgatggggtggttcatgcactaaaagaaatttttcggcatgaaggcttgtgtggtctttacaggggtttgactccaaggctggctatgtatatgtctcaaggtgctatattctttacgtcctatgagtttctcagtacattaatgtttcctgaacccgaacaagaggttcatgcgaggagcgtttgatcgtgaaatgagaagatggcacagcaaaatacagaactcggggatagtctgacatgtgatgtgaggggtttgaatccaattttgggtgttgtttacaaagttgtctgttaggaataggatagcattcatacatatttttcggtaatctcaggtctagctaggcgattgaaaattttgtagtagaacctgattttgtattttagtctcgtatatatagagaaacaatggccagttttggtatcctattgttttgtatccacatgtatctgcatacatggccaagtgaatctggaattaaacagcatgggacgcaagactttctattaaaaaaaagatcagttgcagagcgacttcaatgttgtcgtccggcagttctgatgattgtaaagaaaattagtgtttactgaataacatgattatttagattaatgttatttcttaatatgattattta

SEQ ID NO: 40475 - DNA, 2651 bp, Zea Mays
cgccgtctgcaccggccttgaaagagctggagaagcgagccagcacccagcagagcaagaaagccacaaggagatactgaggacgcgaggccaagctcccccgacggcattagagtaggagggaggaggggaagcagagagggacggcccttctcgtcctcgcaccctgtgaaacgcggcccgcgaccgacagcagctcgctcgctgtcatctctcgagatctcaagcagttcgttggttggccattttctttttctttttttgatatacttgctagcttggaagttggtaaaagatgaactcaacacgccgagcttcaaaagcggcaaagtcaacaatcaattaccacaggttttcattagatgagcaccacttatttgagccagatgctttgattaccaaggagcgagatgccaatcatcaatcaaggcaaagttctcaatcttgcagaacatatgcatacagaagattgaccactccccagtttgtatctgcattgtctggaatctggaatcttgttggccagcctgaatcatctggcacagctcaaagatctagtattcatgggatttcgagtagggaagaccctgtgtgctttagcagggaccaacaaggaaatatactgacaccttgctgtgtggaaaactctagtggtctgagatctcaatactgtttctctacaccaaaagaaatttatgaggatcttatttacgtaaagaagaagatgttaacgctgacaccattcaataacattgttggtgcatcatccacatggatgcatatgcattccacaaataaggttgaaggtgcgcattatttgcaatttggaactatatactctgtgcaagctgaaaagatggaaaaaatcgagacttctcagaatagcaaaagaagcatgtgtgaggaaacttgtgctagttccaacaatatggatattagggacaatagctattcaaatcaaacaagacacatgcctaacgagctatttactatctcaaatgaagaagctagcagtacacatgattgtgaaagttctcggcacaatactgaatgcaatctagaaaaaaatcaagaagattctaattttttagcttgcccagtacatgaaatggaaattgccaaagaggtgaggataatgccagggagtcaggttttcagtaaggcgtgcacagatgctcagcttgacaaatcaaagcacatgtcttgtctggtgggtgatgctgttgttcttaattcagcaaatgcagatgaaagtgcttgtagggaggacgtgtgtctgcagctttctctagacaagtgttcacaagagctccaaccaacttttcagcatcgatttgatggtgctgttaccataaacaggcatgctgtggcaggagcattagctgggacagcagtcagtgtttctttgcatccaattgatactgtgaaaacgataattcaggctaacagttatggacagagttcagtctaccatacactaaggcgcacccttattgagagagtaaaggtgttctggggttatatggaggacttgctagcaaacttgcttgttctgcaccaatttctgcaatttataccttaacttatgaaacagtgaagggggctcttctgcctgtttttccaaaggaatatcattcaattgcgcattgtgctgctggtggctgctctagtattgcaacatcctttgtttttacacccagtgaatgcataaaacaacaaatgcaagaatgctttagtaggatgcctcaaaaagggtggcattgcttcattatatactggatggggtgctgtcctttgcagaaatatcccacattccatagtgaagttctatgcttatgagagtctgaagcagtctctgttgaaatcagcacctgatagggccaaactcaattctggccaaacgcttttatgtggaggttttgctgggtcaactgctgctctctgtacaacaccgtttgatgttatcaagacacgagtgcaattacaggcactcagccctgtttgcaagtatgatggggtggttcatgcactaaaagaaatttttcggcatgaaggcttgtgtggtctttacaggggtttgactccaaggctggctatgtatatgtctcaaggtgctatattctttacgtcctatgagtttctcagtacattaatgtttcctgaacccgaacaagaggttcatgcgaggagcgtttgatcgtgaaatgagaagatggcacagcaaaatacagaactcggggatagtctgacatgtgatgtgaggggtttgaatccaattttgggtgttgtttacaaagttgtctgttaggaataggatagcattcatacatatttttcggtaatctcaggtctagctaggcgattgaaaattttgtagtagaacctgattttgtattttagtctcgtatatatagagaaacaatggccagttttggtatcctattgttttgtatccacatgtatctgcatacatggccaagtgaatctggaattaaacagcatgggacgcaagactttctattaaaaaaaagatcagttgcagagcgacttcaatgttgtcgtccggcagttctgatgattgtaaagaaaattagtgtttactgaataacatgattatttagattaatgttatttcttaatatgattattta

SEQ ID NO: 40476 - DNA, 2571 bp, Zea Mays
ttgaaagagctggagaagcgagccagcacccagcagagcaagaaagccacaaggagatactgaggacgcgaggccaagctcccccgacggcattagagtaggagggaggaggggaagcagagagggacggcccttctcgtcctcgcaccctgtgaaacgcggcccgcgaccgacagcagctcgctcgctgtcatctctcgagcttggaagttggtaaaagatgaactcaacacgccgagcttcaaaagcggcaaagtcaacaatcaattaccacaggttttcattagatgagcaccacttatttgagccagatgctttgattaccaaggagcgagatgccaatcatcaatcaaggcaaagttctcaatcttgcagaacatatgcatacagaagattgaccactccccagtttgtatctgcattgtctggaatctggaatcttgttggccagcctgaatcatctggcacagctcaaagatctagtattcatgggatttcgagtagggaagaccctgtgtgctttagcagggaccaacaaggaaatatactgacaccttgctgtgtggaaaactctagtggtctgagatctcaatactgtttctctacaccaaaagaaatttatgaggatcttatttacgtaaagaagaagatgttaacgctgacaccattcaataacattgttggtgcatcatccacatggatgcatatgcattccacaaataaggttgaaggtgcgcattatttgcaatttggaactatatactctgtgcaagctgaaaagatggaaaaaatcgagacttctcagaatagcaaaagaagcatgtgtgaggaaacttgtgctagttccaacaatatggatattagggacaatagctattcaaatcaaacaagacacatgcctaacgagctatttactatctcaaatgaagaagctagcagtacacatgattgtgaaagttctcggcacaatactgaatgcaatctagaaaaaaatcaagaagattctaattttttagcttgcccagtacatgaaatggaaattgccaaagaggtgaggataatgccagggagtcaggttttcagtaaggcgtgcacagatgctcagcttgacaaatcaaagcacatgtcttgtctggtgggtgatgctgttgttcttaattcagcaaatgcagatgaaagtgcttgtagggaggacgtgtgtctgcagctttctctagacaagtgttcacaagagctccaaccaacttttcagcatcgatttgatggtgctgttaccataaacaggcatgctgtggcaggagcattagctgggacagcagtcagtgtttctttgcatccaattgatactgtgaaaacgataattcaggctaacagttatggacagagttcagtctaccatacactaaggcgcacccttattgagagaggtgttctggggttatatggaggacttgctagcaaacttgcttgttctgcaccaatttctgcaatttataccttaacttatgaaacagtgaagggggctcttctgcctgtttttccaaaggaatatcattcaattgcgcattgtgctgctggtggctgctctagtattgcaacatcctttgtttttacacccagtgaatgcataaaacaacaaatgcaagaatgctttagtaggatgcctcaaaaagggtggcattgcttcattatatactggatggggtgctgtcctttgcagaaatatcccacattccatagtgaagttctatgcttatgagagtctgaagcagtctctgttgaaatcagcacctgatagggccaaactcaattctggccaaacgcttttatgtggaggttttgctgggtcaactgctgctctctgtacaacaccgtttgatgttatcaagacacgagtgcaattacaggcactcagccctgtttgcaagtatgatggggtggttcatgcactaaaagaaatttttcggcatgaaggcttgtgtggtctttacaggggtttgactccaaggctggctatgtatatgtctcaaggtgctatattctttacgtcctatgagtttctcagtacattaatgtttcctgaacccgaacaagaggttcatgcgaggagcgtttgatcgtgaaatgagaagatggcacagcaaaatacagaactcggggatagtctgacatgtgatgtgaggggtttgaatccaattttgggtgttgtttacaaagttgtctgttaggaataggatagcattcatacatatttttcggtaatctcaggtctagctaggcgattgaaaattttgtagtagaacctgattttgtattttagtctcgtatatatagagaaacaatggccagttttggtatcctattgttttgtatccacatgtatctgcatacatggccaagtgaatctggaattaaacagcatgggacgcaagactttctattaaaaaaaagatcagttgcagagcgacttcaatgttgtcgtccggcagttctgatgattgtaaagaaaattagtgtttactgaataacatgattatttagattaatgttatttcttaatatgattattta

SEQ ID NO: 40477 - DNA, 2484 bp, Zea Mays
aagcaagttagggtatgctaaagtccatatccaacagcaacaacaagtcaaattaagatctcaagcagttcgttggttggccattttctttttctttttttgatatacttgctagcttggaagttggtaaaagatgaactcaacacgccgagcttcaaaagcggcaaagtcaacaatcaattaccacaggttttcattagatgagcaccacttatttgagccagatgctttgattaccaaggagcgagatgccaatcatcaatcaaggcaaagttctcaatcttgcagaacatatgcatacagaagattgaccactccccagtttgtatctgcattgtctggaatctggaatcttgttggccagcctgaatcatctggcacagctcaaagatctagtattcatgggatttcgagtagggaagaccctgtgtgctttagcagggaccaacaaggaaatatactgacaccttgctgtgtggaaaactctagtggtctgagatctcaatactgtttctctacaccaaaagaaatttatgaggatcttatttacgtaaagaagaagatgttaacgctgacaccattcaataacattgttggtgcatcatccacatggatgcatatgcattccacaaataaggttgaaggtgcgcattatttgcaatttggaactatatactctgtgcaagctgaaaagatggaaaaaatcgagacttctcagaatagcaaaagaagcatgtgtgaggaaacttgtgctagttccaacaatatggatattagggacaatagctattcaaatcaaacaagacacatgcctaacgagctatttactatctcaaatgaagaagctagcagtacacatgattgtgaaagttctcggcacaatactgaatgcaatctagaaaaaaatcaagaagattctaattttttagcttgcccagtacatgaaatggaaattgccaaagaggtgaggataatgccagggagtcaggttttcagtaaggcgtgcacagatgctcagcttgacaaatcaaagcacatgtcttgtctggtgggtgatgctgttgttcttaattcagcaaatgcagatgaaagtgcttgtagggaggacgtgtgtctgcagctttctctagacaagtgttcacaagagctccaaccaacttttcagcatcgatttgatggtgctgttaccataaacaggcatgctgtggcaggagcattagctgggacagcagtcagtgtttctttgcatccaattgatactgtgaaaacgataattcaggctaacagttatggacagagttcagtctaccatacactaaggcgcacccttattgagagaggtgttctggggttatatggaggacttgctagcaaacttgcttgttctgcaccaatttctgcaatttataccttaacttatgaaacagtgaagggggctcttctgcctgtttttccaaaggaatatcattcaattgcgcattgtgctgctggtggctgctctagtattgcaacatcctttgtttttacacccagtgaatgcataaaacaacaaatgcaagaatgctttagtaggatgcctcaaaaagggtggcattgcttcattatatactggatggggtgctgtcctttgcagaaatatcccacattccatagtgaagttctatgcttatgagagtctgaagcagtctctgttgaaatcagcacctgatagggccaaactcaattctggccaaacgcttttatgtggaggttttgctgggtcaactgctgctctctgtacaacaccgtttgatgttatcaagacacgagtgcaattacaggcactcagccctgtttgcaagtatgatggggtggttcatgcactaaaagaaatttttcggcatgaaggcttgtgtggtctttacaggggtttgactccaaggctggctatgtatatgtctcaaggtgctatattctttacgtcctatgagtttctcagtacattaatgtttcctgaacccgaacaagaggttcatgcgaggagcgtttgatcgtgaaatgagaagatggcacagcaaaatacagaactcggggatagtctgacatgtgatgtgaggggtttgaatccaattttgggtgttgtttacaaagttgtctgttaggaataggatagcattcatacatatttttcggtaatctcaggtctagctaggcgattgaaaattttgtagtagaacctgattttgtattttagtctcgtatatatagagaaacaatggccagttttggtatcctattgttttgtatccacatgtatctgcatacatggccaagtgaatctggaattaaacagcatgggacgcaagactttctattaaaaaaaagatcagttgcagagcgacttcaatgttgtcgtccggcagttctgatgattgtaaagaaaattagtgtttactgaataacatgattatttagattaatgttatttcttaatatgattattta

SEQ ID NO: 40478 - DNA, 2871 bp, Zea Mays
ggaaacgcaataaggagatccctccctgctgcttctctgtacgcgttacccccaaacccctcagccatcttggcgccctgcggatggagggcggcagcggcgctgcgcacaggccgtgggatacggcgtcgcagctgcagtacagcttcaggacgtccgtgagcagcctcagcgaggtggaggaggaggaggcgagcccgccaccggtggcggtggaggacagggtcttcgtggccgtccccgaggacgccaagaacggcaagagcaccctgctgtgggcgctggagaacccagccaaggactgcgccggggttgtcgtcgcccacgtccactgccccgcgcagatgatccccatgatgggggcaaaagttcatcacagcacggtgaatccacaacgggtcaacgaatacaggaagaaggtgcgagcggaggtggaggagaaactagatgaatacgtccttgtgtgcagaagacaaaaggtcagctgccagaaagttgtaatcgaaatggatgatgctgtacgagggcttgagcagctcatcactctccatggcgtcgctaagcttgttatgggagcagcagcagacaaacactactccaagaaaatgaaatcactgaaatccaagacggcgctcagactgacggaggtggcggccccatcgtgtaagatatggtttacctgtaaagggcgtctcatatgcaccagggaagcgaacacaactgttcccgccatgccaccaccatcacctgcactcacgagcgcatcaagatcatcagtaagcagcgttgctagccagctgagatcaatgttactcagtcgctcagagagtgacgggtcaagctcgaacggaagtccaaggcatgacctgaccaggtcgcgaacagaggcggggctgctgctgtatccctctcacgaaaccgtcaacatcggtacgccgtctcggctctatgaatcctacggcaggaggccgcctacgacagcatcagtgagttccagcgattcctggaacgaattcgggaggagatcgcagaactcgtggcacgatgatctatcgagaaacgacggtgcggccaccactactgtcgtcgtctccggatcagcgatgcaagaacctgacgacgagaacttctcgtccccttctcatgagctggaaaacccgggcgtcgatgctaacatatacagaagactcacggaggctctgagtgaagctgagcgctgcaggaaagaggcataccaagagtcggccaaacgcctgagagctgaactagacatggcttcggctcttgagaatgtaaacgagctgtatcagcacgaggtaaggcagcgcaaagcgatcgaggaaacgctggcgagacaagcgcaggagatggaggaaatgaagagacagcacggtgtggcatccaaggagctgcacgacgtcaaggagcagagactcgtcctggagcggcaagtaacagagatggcgtctgctgtccaaggctacgaagagaaggtggcagctgctgaaacgctgaacaccgccgagttctcctattctgagctggaacaagcgacccaaggctttgacgaggggctcaagatcggcgagggtggcttcggaagcgtctacagaggcttcctccgcaacacagccgtcgctgtgaagctgctggatccggaaagcatgcaaggcccgtcagagttcaaccaagaggttgctgttctcggtagagtgcggcatccaaacctcgtgacactgataggggcgtgccgggaggcgctcggcctggtgtacgagtacctccccaacgggagcctggaggaccggctggcgtgcaccaacgacacgccgccgctgacatggcaggtgcgcaccaggatcatctgcgagatgtgctcggcgctcatcttcctccactcgaacaggccgcacccggtagtgcacggcgacctcaagccgggcaacatcctgctggacgccaacctggtgagcaaactaggggacttcggcatctgccgcctgctgatgatgagccagtccaccaccactaccaccatgcccgtcgccaccacgaagctgcacaggacgaccaccccgaaggggaccttcgcgtacatggacccggagttcctgtccaccggcgagctcaccccgcggtccgacgtgtactcgctcggcatcatcatcctgcggctgctcacggggcggccgcccaagagcatcgcggaggtggtggaggacgcgctggagcgggggcagctgcacgccgtcctcgacgccgccgcgggggactggccgttcgtgcaggccaaccagctggcgcacatcggcctgcgctgcgcggagatgagccggcgccgccggcctgacctcgcgggggaggtgtggaaggtggtggcgcccctcacgatggccgccgccgggcggcctctgccgttcgcgccgtcgccgctggatgacgcccgcgcgccgtcctacttcgtctgcccgatcttccaggaggtgatgagcgatccccgcatcgccgcggacgggttcacgtacgaggccgaggcgatcacggggtggttcgacagcggccgcgacacgtcgccgatgaccaatctcaagctcgagcactgcgagctcacgccgaacagggcgctccgctccgcgattctcgagtggcggcagcagcagcagcggagataaccatttacgtaccgaagaaagcatgcgatctccgtggctgatgctaacaatctaatttcaactgcacatatgtagcgtttgtaatttgtattccattggtcaaaatttgtttaaattagaaagaaaaataaaagggaaatttcttagtgttgtgcaccggtagaaaagagcttaaagactgcggtatgatataattttt

SEQ ID NO: 40479 - DNA, 4588 bp, Zea Mays
gttaattggcgggtcaatgcagcaagcacgaatagacgcacagtctcgcgtcacccccggtagggtggatacgccacgttccttttcttttgccctcccattttctttcactacagaatacagatacatactcatcatatacaggccggccggatactacggtctacgaggtcacaccaccgatcgagctccagcgcgtttctttttcttcggaccgtaagagagaagcggcaagcaaatggaggagtgggagccgctgcggagcgcacgatgcagccccgccgccaccccaagctccctgctgcaggacgagctggccgcacacgaggtgttcgtcgcggtgcccgaagaggtcagcgacgggaggagcacccttctgtgggcgctgcgcaatctggtcaaggacggatccaagcttgccatagctcatgtccattattgccctgcgccagcgatcgcccagaacaggagtcataccagcatgaaaccagaagaaatcaaggagtacagaaagcagaagcgagcaaaggccgagaagagtctagatgcgtatgtgcagatggcaaaggctgttacatttcaggttgcctgtgcgaaagtaataatcgagacggatgatgtagctgaaggacttgaggagctcatctctcttaataacgtaactgagtttgtcatgggagcagctgcagaccgacacttctctagagaaatgaacacgccaaagtcgatgacagcgctcaagcttttcaagacagcagctccatcatgcaagatgtggtttacttgtaaaggtcatttgatatgtaccagggaagcaaatgaaagccttcctgccatacttgcatcacctgaaaaaagcaacgcgccgctgtcaccggcgcacaacgtttcaagtcaaatgggatcaatggcaaccgagttagaatacaaagaatcaagccacaaaggatacatttcaagctcatcggctgcagcagaaatgacggaatgggattatctttttggaggtgactatcctaaatatacatacgagatgtaattcttgcaaaaaaaaagttatgtagttctttgcctcaaataatttagttaaaatattatgtactcacatataaaattttcatagaatgcctaagagattgaaatttagttgtgaagtcatctaacatgaattttaggcatcagtgactagtgatgcttacaaataaattcaagacattacaacttatgtatgtttgtaatcaattgtattatttacctatgctcaaagtaatatgataaatgaaacctagggtttgcacccaaaccaaccatttttagatagatgccaaaaatcaaagcaaccatttttagatcatggaaaagcacccactctcacatgcgatacatgtctacaaaaaggagaggtttcctatgtgagcaaagtgaagctgctttcagccatgcaaccattttgaaggtagtcacactgattttccactgcgatgataacacagattggagaatgatagtttacgggtcatcaggaactgacgatgctgtcagcttctctgaaactgctgctctaccttcagttattggcgatacacatgaaacaacacaagtggtgcattttacaactcaggaacctgatagcacctacttgttgctagcatcaacatataatcaggaagacgaacccagtgtacatgaagaaaagtatgagaagcttcaagattcatgcattgaagctaagttgttaaaggatgaagctgatgatgatgaatctaacaaaatccggaaagctgaaatggacctgctttcagcacttcaaagagtccagtgtgaccaaaatagcgaaatctccttgcagattaaagagttggaagattcatatattcacgaggtgagccagcgaaaagaaattgagaagacgcttgctagacaaaggttggagattgatgaaatgaggagacaacggtgcacgctatctgataaattacatgattcggataagcataagcttgtacttgaacaacgtataacacaaattaagtcagctgcaaaagatcacgtggaagagattactgaacattttataagacaatcaagtgaggaatctaaaaaacaccaaaaagtcaaaatgggtctgctttcaacacttcaaagagttaaggaggttgagagtttgctacagaatgagaaggcacagcgggaatatatggaggagaaggtatcaagacagagaacagagatcgaagaaacaaggaggcaacgagataaactgtaccatgacttgcaagatttaaaagagcagaagctcaaactggaacaagttggtatgtctgaagaaactaacagaagaagaaaagctgagagagatcggctctcataccttcaaaggattaaagacctggagcaccagcacatacatcaggtgaaaaagcaggaaacaatggaggagacaatgacaagacagaaggaagaaatccaagcatcgaaaagaaagctacatgagacacatggcaaacatatgtctgagataaagtccgccgtgaaggttcatgaagaaaagctcgccgacagcaagcagcttctccaagagctccaagcgaagcatgacaagctactgcgtgagagagacaccgcagctatggaagccaaagagtcacgccaaaagaacaagcaaagagccttagggacgactgaaactgcgaacaccgagttctcgattgtcgagctgcagaaagcaaccagaggattcgatgcggaactcaagatcagcgaagatggatttgcaagcgtctacagaggtttcgtccgcaacacagacgtagcaataaagttgttccattcgcgaagcttaaaagggcaggcaagattttaccaagaggttgctgtcctcagtagggtgaggcatcctaacattgtcacgctggtaggagtatgtcccgacgacttcgcgctggtgtccgaattcctcccaaacggcagtctcgaggattggctctcgtgcaagaaaagcatgccgcctctgacatggaaggcgcgcacaaggatcgtcggggagatatgctcagccttggccttcatccactcacacaagccatatccgatcgttcacggcgatctgaacctgggaaacatcctccttgacgccaatttcgtcagcaagctgggaggcttgggcatctgctgccttcttctaggtggtggtgaagacgacataacggccaccagcctgcgaagccgcccttcagcagcagaccgtagtaagggaacactccgctacacggagcagggcggtggattcaagtcggcagcggagctcatgctgtggtccgacgtgaactcgttcggcgtcaccatccttcgcctactgacagggcgatcgcagcaagggatcggtgagatggtggaggaagcgatggagaaagggaacttgcactcgatcatcgacgcctccgcgggggagtggcctctcgtgcaggccagccagatggcgcatcttttgggcttaggtgcgtcaccctgggctcggggcgccagccagatctcgccggggaggtgtgggaggaggtcgagcaactgatgaaagccgcttgcttgaccgccggggcatcaagatttgcgtcgtcgtcagaagacgatccgcctccatcgtacttcatctgtccgatttttcaggaggtgatgagtgacccccacgtggcagcagatgggttcacatacgaagccgaagcgatcaggggatggctcgacggcgccagcacgtcgccgatgacaaacctgaggcttgcacaccgcatgctcaccccgaacaaggcgctccgttcagcgattctcgagtggcaacagaaacagcacgggagatgagatgatgctttcactgggtgtggatgtggatgtcagcagctcctccagatgcttcatccgtccatcttgtgtccgggcgcagtgcacagggtttttaaaaaccaaaaggggatgtttcttgtgtccggaacacagcgcgcaaaatcaatttaagatgtgtttgaatgtagtagatctaaaaattttagtaaaattagctagctaactgttaactattttactaaaaataactaatagttatgtttagtgttggggtcgtgcttcggtgcgccgaaggtctcacacgaagaagcagcttcggccgaagtcgtctccaagagatggccgaaggtcccttttcatggagcttcggcgttttaaaccgacatagagatagaatgacctttttatacatataggtctgagtcaatgctgtaaactttcgcaaggggcataattgtaatttgtcacaggctgcgacctgtgcctataaatagatgaacagtacctctgtactgttcacgtgaacctgtcatttgctttcgcatcacgcttgtacttttgccttccgcaggaccgaaggtacatttgtaattcaaagtcatttatattcattaatacaagtagagataattctatgacaatatttaaatgtttatttcatattctatgatttatgtgaatgcttcattcttcgttgttatgcttacgaaggtatgtccttcgtaaccttcgtccgagatgctttatatcccga

SEQ ID NO: 40480 - DNA, 3957 bp, Zea Mays
cgcgtttctttttcttcggaccgtaagagagaagcggcaagcaaatggaggagtgggagccgctgcggagcgcacgatgcagccccgccgccaccccaagctccctgctgcaggacgagctggccgcacacgaggtgttcgtcgcggtgcccgaagaggtcagcgacgggaggagcacccttctgtgggcgctgcgcaatctggtcaaggacggatccaagcttgccatagctcatgtccattattgccctgcgccagcgatcgcccagaacaggagtcataccagcatgaaaccagaagaaatcaaggagtacagaaagcagaagcgagcaaaggccgagaagagtctagatgcgtatgtgcagatggcaaaggctgttacatttcaggttgcctgtgcgaaagtaataatcgagacggatgatgtagctgaaggacttgaggagctcatctctcttaataacgtaactgagtttgtcatgggagcagctgcagaccgacacttctctagagaaatgaacacgccaaagtcgatgacagcgctcaagcttttcaagacagcagctccatcatgcaagatgtggtttacttgtaaaggtcatttgatatgtaccagggaagcaaatgaaagccttcctgccatacttgcatcacctgaaaaaagcaacgcgccgctgtcaccggcgcacaacgtttcaagtcaaatgggatcaatggcaaccgagttagaatacaaagaatcaagccacaaaggatacatttcaagctcatcggctgcagcagaaatgacggaatgggattatctttttggagattggagaatgatagtttacgggtcatcaggaactgacgatgctgtcagcttctctgaaactgctgctctaccttcagttattggcgatacacatgaaacaacacaagtggtgcattttacaactcaggaacctgatagcacctacttgttgctagcatcaacatataatcaggaagacgaacccagtgtacatgaagaaaagtatgagaagcttcaagattcatgcattgaagctaagttgttaaaggatgaagctgatgatgatgaatctaacaaaatccggaaagctgaaatggacctgctttcagcacttcaaagaattaaagagttggaagattcatatattcacgaggtgagccagcgaaaagaaattgagaagacgcttgctagacaaaggttggagattgatgaaatgaggagacaacggtgcacgctatctgataaattacatgattcggataagcataagcttgtacttgaacaacgtataacacaaattaagtcagctgcaaaagatcacgtggaagagattactgaacattttataagacaatcaagtgaggaatctaaaaaacaccaaaaagtcaaaatgggtctgctttcaacacttcaaagagtaagtgtgttgtatcaggactttaggagtttacggttcaactagggaagcatgtgatacacaagatgtaaagtattcttatacaggttaaggaggttgagagtttgctacagaatgagaaggcacagcgggaatatatggaggagaaggtatcaagacagagaacagagatcgaagaaacaaggaggcaacgagataaactgtaccatgacttgcaagatttaaaagagcagaagctcaaactggaacaagttgtatgtctgaagaaactaacagaagaagaaaagctgagagagatcggctctcataccttcaaaggattaaagacctggagcaccagcacatacatcaggtgaaaaagcaggaaacaatggaggagacaatgacaagacagaaggaagaaatccaagcatcgaaaagaaagctacatgagacacatggcaaacatatgtctgagataaagtccgccgtgaaggttcatgaagaaaagctcgccgacagcaagcagcttctccaagagctccaagcgaagcatgacaagctactgcgtgagagagacaccgcagctatggaagccaaagagtcacgccaaaagaacaagcaaagagccttagggacgactgaaactgcgaacaccgagttctcgattgtcgagctgcagaaagcaaccagaggattcgatgcggaactcaagatcagcgaagatggatttgcaagcgtctacagaggtttcgtccgcaacacagacgtagcaataaagttgttccattcgcgaagcttaaaagggcaggcaagattttaccaagaggttgctgtcctcagtagggtgaggcatcctaacattgtcacgctggtaggagtatgtcccgacgacttcgcgctggtgtccgaattcctcccaaacggcagtctcgaggattggctctcgtgcaagaaaagcatgccgcctctgacatggaaggcgcgcacaaggatcgtcggggagatatgctcagccttggccttcatccactcacacaagccatatccgatcgttcacggcgatctgaacctgggaaacatcctccttgacgccaatttcgtcagcaagctgggaggcttgggcatctgctgccttcttctaggtggtggtgaagacgacataacggccaccagcctgcgaagccgcccttcagcagcagaccgtagtaagggaacactccgctacacggagcagggcggtggattcaagtcggcagcggagctcatgctgtggtccgacgtgaactcgttcggcgtcaccatccttcgcctactgacagggcgatcgcagcaagggatcggtgagatggtggaggaagcgatggagaaagggaacttgcactcgatcatcgacgcctccgcgggggagtggcctctcgtgcaggccagccagatggcgcatcttttgggcttaggtgcgtcaccctgggctcggggcgccagccagatctcgccggggaggtgtgggaggaggtcgagcaactgatgaaagccgcttgcttgaccgccggggcatcaagatttgcgtcgtcgtcagaagacgatccgcctccatcgtacttcatctgtccgatttttcaggaggtgatgagtgacccccacgtggcagcagatgggttcacatacgaagccgaagcgatcaggggatggctcgacggcgccagcacgtcgccgatgacaaacctgaggcttgcacaccgcatgctcaccccgaacaaggcgctccgttcagcgattctcgagtggcaacagaaacagcacgggagatgagatgatgctttcactgggtgtggatgtggatgtcagcagctcctccagatgcttcatccgtccatcttgtgtccgggcgcagtgcacagggtttttaaaaaccaaaaggggatgtttcttgtgtccggaacacagcgcgcaaaatcaatttaagatgtgtttgaatgtagtagatctaaaaattttagtaaaattagctagctaactgttaactattttactaaaaataactaatagttatgtttagtgttggggtcgtgcttcggtgcgccgaaggtctcacacgaagaagcagcttcggccgaagtcgtctccaagagatggccgaaggtcccttttcatggagcttcggcgttttaaaccgacatagagatagaatgacctttttatacatataggtctgagtcaatgctgtaaactttcgcaaggggcataattgtaatttgtcacaggctgcgacctgtgcctataaatagatgaacagtacctctgtactgttcacgtgaacctgtcatttgctttcgcatcacgcttgtacttttgccttccgcaggaccgaaggtacatttgtaattcaaagtcatttatattcattaatacaagtagagataattctatgacaatatttaaatgtttatttcatattctatgatttatgtgaatgcttcattcttcgttgttatgcttacgaaggtatgtccttcgtaaccttcgtccgagatgctttatatcccga

SEQ ID NO: 40481 - DNA, 4229 bp, Zea Mays
tttttcttcggaccgtaagagagaagcggcaagcaaatggaggagtgggagccgctgcggagcgcacgatgcagccccgccgccaccccaagctccctgctgcaggacgagctggccgcacacgaggtgttcgtcgcggtgcccgaagaggtcagcgacgggaggagcacccttctgtgggcgctgcgcaatctggtcaaggacggatccaagcttgccatagctcatgtccattattgccctgcgccagcgatcgcccagaacaggagtcataccagcatgaaaccagaagaaatcaaggagtacagaaagcagaagcgagcaaaggccgagaagagtctagatgcgtatgtgcagatggcaaaggctgttacatttcaggttgcctgtgcgaaagtaataatcgagacggatgatgtagctgaaggacttgaggagctcatctctcttaataacgtaactgagtttgtcatgggagcagctgcagaccgacacttctctaggtacggatcagactaacaaaatcgctctacttccttaaattggatgcacatcttacttccatgattctgaatgattaaccagaacgtcaccatactctctcacacttgaggacctgggatacttaaacaagttttcttacaagctggttatgtggttgcagtaacagaatactctattttctcttctaacaagaaatggataggaagctatagcatactcagaccaagcaatttcttaagagcataccttgcaatcgcgcattctaacagatgctctcaaactgtagagaaatgaacacgccaaagtcgatgacagcgctcaagcttttcaagacagcagctccatcatgcaagatgtggtttacttgtaaaggtcatttgatatgtaccagggaagcaaatgaaagccttcctgccatacttgcatcacctgaaaaaagcaacgcgccgctgtcaccggcgcacaacgtttcaagtcaaatgggatcaatggcaaccgagttagaatacaaagaatcaagccacaaaggatacatttcaagctcatcggctgcagcagaaatgacggaatgggattatctttttggagattggagaatgatagtttacgggtcatcaggaactgacgatgctgtcagcttctctgaaactgctgctctaccttcagttattggcgatacacatgaaacaacacaagtggtgcattttacaactcaggaacctgatagcacctacttgttgctagcatcaacatataatcaggaagacgaacccagtgtacatgaagaaaagtatgagaagcttcaagattcatgcattgaagctaagttgttaaaggatgaagctgatgatgatgaatctaacaaaatccggaaagctgaaatggacctgctttcagcacttcaaagaattaaagagttggaagattcatatattcacgaggtgagccagcgaaaagaaattgagaagacgcttgctagacaaaggttggagattgatgaaatgaggagacaacggtgcacgctatctgataaattacatgattcggataagcataagcttgtacttgaacaacgtataacacaaattaagtcagctgcaaaagatcacgtggaagagattactgaacattttataagacaatcaagtgaggaatctaaaaaacaccaaaaagtcaaaatgggtctgctttcaacacttcaaagagttaaggaggttgagagtttgctacagaatgagaaggcacagcgggaatatatggaggagaaggtatcaagacagagaacagagatcgaagaaacaaggaggcaacgagataaactgtaccatgacttgcaagatttaaaagagcagaagctcaaactggaacaagttgtaagtttggcagtctattattaagttttaatgtattgttgaacattgttcagaatatatgactgatcttttgaaaagggtatgtctgaagaaactaacagaagaagaaaagctgagagagatcggctctcataccttcaaaggattaaagacctggagcaccagcacatacatcaggtgaaaaagcaggaaacaatggaggagacaatgacaagacagaaggaagaaatccaagcatcgaaaagaaagctacatgagacacatggcaaacatatgtctgagataaagtccgccgtgaaggttcatgaagaaaagctcgccgacagcaagcagcttctccaagagctccaagcgaagcatgacaagctactgcgtgagagagacaccgcagctatggaagccaaagagtcacgccaaaagaacaagcaaagagccttagggacgactgaaactgcgaacaccgagttctcgattgtcgagctgcagaaagcaaccagaggattcgatgcggaactcaagatcagcgaagatggatttgcaagcgtctacagaggtttcgtccgcaacacagacgtagcaataaagttgttccattcgcgaagcttaaaagggcaggcaagattttaccaagaggttgctgtcctcagtagggtgaggcatcctaacattgtcacgctggtaggagtatgtcccgacgacttcgcgctggtgtccgaattcctcccaaacggcagtctcgaggattggctctcgtgcaagaaaagcatgccgcctctgacatggaaggcgcgcacaaggatcgtcggggagatatgctcagccttggccttcatccactcacacaagccatatccgatcgttcacggcgatctgaacctgggaaacatcctccttgacgccaatttcgtcagcaagctgggaggcttgggcatctgctgccttcttctaggtggtggtgaagacgacataacggccaccagcctgcgaagccgcccttcagcagcagaccgtagtaagggaacactccgctacacggagcagggcggtggattcaagtcggcagcggagctcatgctgtggtccgacgtgaactcgttcggcgtcaccatccttcgcctactgacagggcgatcgcagcaagggatcggtgagatggtggaggaagcgatggagaaagggaacttgcactcgatcatcgacgcctccgcgggggagtggcctctcgtgcaggccagccagatggcgcatcttttgggcttaggtgcgtcaccctgggctcggggcgccagccagatctcgccggggaggtgtgggaggaggtcgagcaactgatgaaagccgcttgcttgaccgccggggcatcaagatttgcgtcgtcgtcagaagacgatccgcctccatcgtacttcatctgtccgatttttcaggaggtgatgagtgacccccacgtggcagcagatgggttcacatacgaagccgaagcgatcaggggatggctcgacggcgccagcacgtcgccgatgacaaacctgaggcttgcacaccgcatgctcaccccgaacaaggcgctccgttcagcgattctcgagtggcaacagaaacagcacgggagatgagatgatgctttcactgggtgtggatgtggatgtcagcagctcctccagatgcttcatccgtccatcttgtgtccgggcgcagtgcacagggtttttaaaaaccaaaaggggatgtttcttgtgtccggaacacagcgcgcaaaatcaatttaagatgtgtttgaatgtagtagatctaaaaattttagtaaaattagctagctaactgttaactattttactaaaaataactaatagttatgtttagtgttggggtcgtgcttcggtgcgccgaaggtctcacacgaagaagcagcttcggccgaagtcgtctccaagagatggccgaaggtcccttttcatggagcttcggcgttttaaaccgacatagagatagaatgacctttttatacatataggtctgagtcaatgctgtaaactttcgcaaggggcataattgtaatttgtcacaggctgcgacctgtgcctataaatagatgaacagtacctctgtactgttcacgtgaacctgtcatttgctttcgcatcacgcttgtacttttgccttccgcaggaccgaaggtacatttgtaattcaaagtcatttatattcattaatacaagtagagataattctatgacaatatttaaatgtttatttcatattctatgatttatgtgaatgcttcattcttcgttgttatgcttacgaaggtatgtccttcgtaaccttcgtccgagatgctttatatcccga

SEQ ID NO: 40482 - DNA, 856 bp, Zea Mays
gttcgatatcaacaaacatgtttcccttcaatgccttctcaatcatcatcgttcatcagagaggagtgtaaagattccccgctactacctgtatactggggtgaaatctatctgcacgattccaggcccattgattggaacgcaatcaatgatagcgtctgctgctgctgctggccttttcagttacttgatttttttttattattagttttttggtataaaagaagaggagagtagcaagtaccctgttttgccgctttgccgcagaaacgttttaccctctggctcgactgcttgcttgcctttcaccggcgtcaccaaccgggacgggtctccaggttttggttcaccatgccaaaagaggaggacggcgatccgttagagcttattcggttagctctcaatacacatggattaagtgaggttgaatgtgtttaaatctcaacggcacactgttcctcgtcgaatcgctacaccgtttccgagttttgactgccactcgccggccggccatcttctccacggtcattcacttcgccaagtcaccgaccacacgagctacgcgcagccacgacggagcactggtatggaacgcggtcgcgacttgaacaagccaatcgtgcaacagacctagtgtgacaactagtagtggaggcgatgctagagaggacgcgtatagaaggtgtttgatcgttatgctcaaatcagcgtgcagcaaccctgctctggatgtcctgcttaaaaagcaagagtagccatgtactgatgttaagccctttgtttaatagtataggtttatttgaaaaaatattttgttatagattatgtgatatagaggatgaaatttagaaaacac

SEQ ID NO: 40483 - DNA, 1514 bp, Zea Mays
tccatttatttcctcatttcaaagcttctcgctcgaaccaaaaaaaaagataaaatagattggataagcctggaacgactgcatgtgaggtccgttcccgactcccgtgctcgccacctcctcttccgtaataattccattccagaagtaacagtgtccgtgtcttccttagttccttgctccactcagtcactctccagtctcctcacgacctggctgctcccaagctccgtcctctgctctgcctttatataatccccgagccacaccacctccctcacagtcgcagacacacaccgctgcttcaagaaaccaccgagagcccaaccgcacaggcaggagagagagcagggagccagggacagtagcgtggggccggggagcaaagatggaggggaaggaggaggacgtgcgcctgggcgccaacaagttctcggagcggcagcccatcggcacggcggcgcagggcgccggggccggggacgacgacaaggactacaaggagcccccgccggcgccgctgttcgagcccggggagctcaagtcctggtccttctaccgcgcgggcatcgccgagttcgtcgccaccttcctcttcctctacatcaccgtcctcaccgtcatgggcgtctccaagtccacctccaagtgcgccaccgtcggcatccagggcatcgcctggtccttcggagggatgatcttcgcgctcgtctactgcaccgccggcatctccggaggacacatcaacccagctgtgaccttcgggctgttcttggccaggaagctgtccctgactagggccatcttctacattatcatgcaatgcctgggtgccatctgtggagctggagtggtgaagggcttccagcaggggctttacatgggcaacggcggtggcgccaatgttgtcgcccctggatacaccaagggggacggccttggcgcagagatcgttggcaccttcatcctagtctacaccgtcttctcggccaccgatgccaagaggaacgccagggactcccatgtccccatccttgccccactgccaattgggttcgcggtgttcctggtccaccttgccaccatccccatcaccggcaccggcatcaacccggctaggagccttggcgccgccatcatctacaaccgggatcatgcgtggagcgaccattggatcttctgggtcggccccttcatcggcgccgccctggctgccatctaccaccaggtgatcatcagggccatcccgttcaagagcaggtcttaagctgccgcggactgctcactgctgcactgctctgttatctgaacccagaacttcgtgtactcctgtaccgagctgtgtgtatgtttttttttcttccatcgtgtttgttgcaagggttcccgtctccttttatgcgttgggatcgtggcaagaaagggcagatatcatgtggaaacgtgggtttataactatcagctggatttttcatccaagtggaatcgattcagaattttcttttaaaaaaaaa

SEQ ID NO: 40484 - DNA, 1436 bp, Zea Mays
tccatttatttcctcatttcaaagcttctcgctcgaaccaaaaaaaaagataaaatagattggataagcctggaacgactgcatgtgaggtccgttcccgactcccgtgctcgccacctcctcttccgtaataattccattccagaagtaacagtgtccgtgtcttccttagttccttgctccactcagtcactctccagtctcctcacgacctggctgctcccaagctccgtcctctgctctgcctttatataatccccgagccacaccacctccctcacagtcgcagacacacaccgctgcttcaagaaaccaccgagagcccaaccgcacaggcaggagagagagcagggagccagggacagtagcgtggggccggggagcaaagatggaggggaaggaggaggacgtgcgcctgggcgccaacaagttctcggagcggcagcccatcggcacggcggcgcagggcgccggggccggggacgacgacaaggactacaaggagcccccgccggcgccgctgttcgagcccggggagctcaagtcctggtccttctaccgcgcgggcatcgccgagttcgtcgccaccttcctcttcctctacatcaccgtcctcaccgtcatgggcgtctccaagtccacctccaagtgcgccaccgtcggcatccagggcatcgcctggtccttcggagggatgatcttcgcgctcgtctactgcaccgccggcatctccggaggacacatcaacccagctgtgaccttcgggctgttcttggccaggaagctgtccctgactagggccatcttctacattatcatgcaatgcctgggtgccatctgtggagctggagtggtgaagggcttccagcaggggctttacatgggcaacggcggtggcgccaatgttgtcgcccctggatacaccaagggggacggccttggcgcagagatcgttggcaccttcatcctagtctacaccgtcttctcggccaccgatgccaagaggaacgccagggactcccatgtccccatccttgccccactgccaattgggttcgcggtgttcctggtccaccttgccaccatccccatcaccggcaccggcatcaacccggctaggagccttggcgccgccatcatctaccaccaggtgatcatcagggccatcccgttcaagagcaggtcttaagctgccgcggactgctcactgctgcactgctctgttatctgaacccagaacttcgtgtactcctgtaccgagctgtgtgtatgtttttttttcttccatcgtgtttgttgcaagggttcccgtctccttttatgcgttgggatcgtggcaagaaagggcagatatcatgtggaaacgtgggtttataactatcagctggatttttcatccaagtggaatcgattcagaattttcttttaaaaaaaaa

SEQ ID NO: 40485 - DNA, 1171 bp, Zea Mays
catcactaaacacaactcatctagtcgtatcatgacttcatcgtgtctaagtttaagagacggcatgatcattccggccatacttttcttcgtgtcaggtcatatcttaagctcttattttcatgtgatgtctgggcgtcgaggacacagcgacgtcgaattttcgatcgattcgccacgcacacttgtctgcggacggaacagccgacgcaggcgctgcggacgtgcacagtcaaggaagatgtgccgctgctcgcctgctcttgcggaaaatgaaagtgtcgatgttcttcaaagcgggaaggaaggggtcgatctacgcccacgctgcaccgtaccgtcggctgacagttttatcgatcaataatcaaccggaaccacgagcgtgaaactgaagccaccggggaagagtggggtcggtgctgcatggctgcgtttctatgtcaaaaccccagtacagaaggcaaaagcagcaaagcaggacacagatgccgcctcactgaatcgctgctcagagcttggccggcagcagagcggtggttcatgacttcatgcagtgattgatggaggtctgacgggcctgatggtgctatcagagattgatagcggggaggctacaaaccagaaaaaaagtttagaagagactgaaagtttagaagagactgaagtaaactggtacaatattgaaacttctaagttatattatgtacattttaaattctagaagatgttctagtgaggcggttcaggatgggatgtgtttgccaaacttgaattcacaggtctgccagtctgtagcccgctggttaggctcgttacagagtcatttcacatgctgaatcatacattatacagacatttcacaagaatcagtccattttcacagaagaagaaaaaaacatagcaaattcacaagactagtcgaggccgtgtaggcgtgaagcataccgaattagcacatgcaatgatgcggagtaggaataggagaatatacatgattctgacagaaagacatttccagcgaacccattttttatatacgctttaaacccagaggctacctaaaagatcgtagaaaactaagatcatgcgatactacaacgccttttgtactacttgtgaactccaaataaagtccatcagcgcgtaacagaaagcgacgatggcaggc

SEQ ID NO: 40486 - DNA, 513 bp, Zea Mays
cttcaatcccgtgtgactagatgttagaataccaaaacgtcgttgggggacggttgaagctgaagggtaaagcgctggacgtgaaagatggtggagtaaagaaaaagaagaagtaccagcatgagaagtcgtctcagactgaatctgataagaatagagatgaagagaacccacatcttgactatgaccatctcacaccagcagagcgccgatacatgaaacagaagcagaagatcgacatgcagaagatagccaaagtcgccaacaagtcacacaaggaccgcatgcaggacttcaaccagtacctagctaagctcagcgaccactacgacgtccctaaagttggtcctggctaacatggccaatctagctgtgttacgcacgaacaattgtatgctgtgtgggtctatctagttttctattagcattttatatatcgttttacagttgttgtaaaacgacttgttgccaccagcaaacaatatttattttcaaaggcttgttccaagtatt

SEQ ID NO: 40487 - DNA, 1673 bp, Zea Mays
cccagcaccaatgtgcgcacgcacggcgcacgcgggagcaggggcagtgcccagccatccttggtcgtagcctcgcttgtcagccacttgtagcactgcattgtgggtcccgcacgtcatctctatcccctccctcctataactgctcggctccatttcctccgccgctagatgcgcccacggcttcggcaactgacgctccttcaagcccagtagcaactcccccactacacacaatccacgttgcgcataccgtggcgaccctcctcgtcggggctccgccgtagacgtgcctcgctgaaacaccttgcgcagcacgcccgccgatggtgccttgactgactgcgatccttttccaagcttcgaggaatcgagtatcaagctccggcgaccaagagatcaaaactttacgagttctacgaagttgaatatcctgagcatctgtttggtgaaggttgcctttggtgcaatctatgctcaggtaagaagaaggcgccaaggcggatctctaggagttccacgacttcggtgagttcgaggattaggctagcgacctcccccagtcagctgcctgtggtgggttgtttacgttggctacgtttcaattctgtgtactttgatttatattatgtaaatgactctagtctgtaatattattacttactctttattgtaattcgaagcattttgctatgatgagtcatttatgtaatcgctgtgtacgtgaatttctgatcctggcacgtacatggttcgcattcggtttgccttctgaaaccgggtgtgacatttaccaagcctctagatgagaagaccttttgcaggctgcgtagtgagctaaatgtcttagattcgtggaacttggattgaattgcagcatacatatgtttatgcctttgatcatgttcattctgcattttgttgcttattgtggtgctcaagttgtacaaacattccctggacctcacaagtccttgtgtaagtaatgcacatatttagggggagttgtgttacaacttgaccctttgagactaaccatatgcttgagtttacttgatttagtctcgaaggagaattgaaagggaaaaggtggacttggaccatgaaagacttccactgcactccgatgaaagggcaacttattccaagttcatctcatgaactcttattgccatttgctcttaattgaagattttggtgaggcaatggggttatcgggccaagattgatcccgttttggtgcttgatgccaaagggggagaaaataaaggccaaagcaatagatggatcagctaccacttgagaaattttgaaaatagtagaatagagcttttggtttgtcaaaactcttgcattgtctcttttgtcagaatagagcttttgcattgtcttttttgtcaaaagttggcctcttgtggggagaagtgttgattatgggaaatagggggagtttttgaaatctttgatcaatctcttttggaatgactctctttatgcttcaacatgtgtgtttgacttagagatagagatttgagtttgatttgcaaaaacaaaccaagtggtggcaaaggatgatccatatatgccaaaaatgaatcaaaataaatttgagttttattcgaagtgattttgcacttattctagttgctttatgttgtgttggcataaatcac

SEQ ID NO: 40488 - DNA, 648 bp, Zea Mays
aacatggaagaacataattgtttcccaaatattgcactgcagaaaactcagcctccatcgatgacaaaattgctcattctcttgcaagttcttagcctggaatcaactgctggattagaatcagtgagatgcatgtcacgaactgatctcaaacttgatggatcatttgctgatatgattcttattcctgatattggggttcctgataaaagcagaacttctgcactttttatttcgacaaatcctggacaactgaatttttatgatggtggctatctattttttgtgcaaaactcaaaagagggaaatcctcttcctgaatcacacaaatttccagtcgcaattactacctttgatcccaacataacgatcactggtctttattcgctaaccaaaactgaatttccaaatatttcactgaagaaattttgtgctaggaaaaatgttgggcatttcatatcagagaacatgaaatggcctttgactggtggggttccaaatgagatgtcactgaacgaagatcatgctgttgaaagaatatgaattgcaggctaccaagatggttctgttgctgatgttaatttggatggagctaatgcttctgtatcatctctagccttttgtccattaagcatgactttggctgtt

SEQ ID NO: 40489 - DNA, 3493 bp, Zea Mays
ctctacgttgttccggaacattctgcttcgccgtcccgcgaccgcgagcaccaccgctagcataaaccggcgacgcgctattaatccaacccaaaagtcaggcatcactgcgagccaagtatagcaggcgcggaaaggggccaagggggcgagtggagttgctgcggtgcccgtctatcttcggggagcgtctggggttgccggcggggaggccatggaccggggtcgaagcgagagcggcctgcggtcgcacgggtccggcaaggtctcctctcggccggggtcggggtcgcttgcgttcccagaggagcaaccgatactagccgatcgcgacggcggcgaccgccgagaggttgtcgtgaagatcgatgggagcgggaacgggcacgcgccgttctccttccatggagcggacgcaggtgctgacggtggcggggggaaggcggagaatgcgacctccagcacgaactccacagcgaccacgccgcaggccgagagcaggtcgatgtcgagcgagaccaactatcctatgccaccggccaatgtgtgccggcgggaggggagctacgagttctggaacaatgacggcggcagcgccgaggcgttcagcttccagaaccgtccgccgcaggggccgcactcgtcgtccccttcaatatcgccgccgctgccgccagaagggggcggcatggacccacccgcccggctcaacggcagcttccaccggaagcaggtggcgtccgacggcgagatgtcgctcgacctcgacctggagatggacgagctcgggaggacggccgcgcagctgcgctcgcacccatccttttccagctcgctcgaaagggacgaccgcgtctcgttgcaggagccacaaaagcggcactccgcgtcgtcctgctcattcgattccgacaccggcgacggccgaaagcgccgcggcgacgacggcgaggtcgttcggtgcacgtcctcctctagtgctgcgggagcggggccgttgctgcgagtcaacacgcgctcccggctcatggacccgccgccgcagtcgcagcgggcgccggcacctgccgcgtcttctgtcgtcgacgaggagcgaaaatcttcaggcttgcggactcctacaaagtcgggccgcctcttctccaggcttatgtccggcaacaagtccggtcccattgctggcaagtcaggtcccatggacgacgaggaggacgatccattcgtggacgaagacattcccgatgacttcaagcgtgggaagctggacgctttgacggtcttgcagtggctcggcttgttccttatcatcgcggccttggcatgcagtctcagcataaagatcttgtccacgaagaaggtgctgggtttgcacctctggaagtgggagctcctcgtgttcgtgctcatctgcggccgtctcgtctccggatgggtcatcaggattgccgtcttcggtgtcgaacgcaacttcttgctgaggaagcgcgtgctctactttgtgtatggagtgcgcagcgccgtgcagaacgcgctctggctcggcctggtgctcgcctcttggcacttcttgtttgacgagaatgtccagcaggagacgaactctccagtactgccctatgtgacgaagaggcattgttcaatcaatacgtcatccagacactctctgggccgccactagtagaagaaaaccatgtgcttgaggaggttcatgagctccaacgtgcaggtgcaactataccaaaggagctgcgtgatgcagtaccaaccaaacatgtatctgagcagaggaacattcagttatcaggggtcatgcctgagggacaaggtagcaagcagctgtcgaaagagaaaagggacgggatctctattgatgcacttaacaagctcaaccagcgaaatgtctcagcttggaacatgaagaggctgatgaggattgttcaatttgggacattaacgactatggatgagcagatacaacaggcaagaggtaagggagatgaatcagcaacacagatacgaagtgaatatgaggcaaagatagctgccaagaagatctttagcaatgtagcaaagccaggttccaaattattgattttgaatgtgggaaacatgaaggtacatatacttgtcggacttgatgagattcatgaggcaggaagaggctgttaaagcaatggatctttttgaaggggcacaggagcacagcagggtcagcaagaggtctctcaagaactgggtggtgaatgcatttagagagcgcaaagctcttgcccttacactcaatgatacgaaaactgcagtaaacaagctgaaccagatggctaacgttattgtggggatcattgtgtttgctctctggcttcttatcctgggaatagcaacagcaaatttctttgtctttctcacttcacagattctcctggcagttttcgtgtttgggaatacgttgaagacgctctttgaggcaattgtcttcttgttcgtgatgcatccctttgatgtcggtgaccgctgtgaaattgaaggtgttcagttggttgttgaggaaatgaatctcatgacaacggtgtttctccgatctgataacctgaagatatattatccgaacagtgtactcgcaacaaaaccaattatgaatttctacagaagtcctgatatgggcgaagcaattgacttctccattcatgttgcaactcctgccgagaaactggccctgatgaaggaacggatactgcgctacattgacaacaagaaggaacattggtacccgggcgcgatggttgtactccgggacgtcgatgataccaacaaactgaaagtgtcaatatggctgcgacacacactcaacttccaggacatgggcacgcgtttcgtgaggcgagagctagtgctccaggagatgatcaaagtcctgaaggacctcgaggttgagtatcggatgcttccacttgatgtgaacgttcgcagtgcgcctccaatccagtccacaaggatgcctacaacatggagttattcgtgaagccagtgaccaggaaccggaccatttggccgtggcattccggatgaggacttgctacgttcctccatggatttggtgggtttaagctgcaagatcttgttggcagcgcaaatggcgtgatggtggtgatcttggtagcaaatcgagctagagattagcatattactatattagcatgtagagagctgttagttgtgcctgcactcgtcacttgtgcagaatggatgggatggaacgcatgccggatgcgacagcggcaacgaagatggtgggcggatggcaataatgtagtgctctgttgatctgttgtatacttgtatctgtgagttgtgacgagaaacctgttgtatacggaggtcctgaacttgcagaattcaaattggcaatgtattacagattctccagcctctgcatattatgcggcctctgcatattatgcgggtaaggcttgacacttaaagatacatttcccca

SEQ ID NO: 40490 - DNA, 3489 bp, Zea Mays
ctctacgttgttccggaacattctgcttcgccgtcccgcgaccgcgagcaccaccgctagcataaaccggcgacgcgctattaatccaacccaaaagtcaggcatcactgcgagccaagtatagcaggcgcggaaaggggccaagggggcgagtggagttgctgcggtgcccgtctatcttcggggagcgtctggggttgccggcggggaggccatggaccggggtcgaagcgagagcggcctgcggtcgcacgggtccggcaaggtctcctctcggccggggtcggggtcgcttgcgttcccagaggagcaaccgatactagccgatcgcgacggcggcgaccgccgagaggttgtcgtgaagatcgatgggagcgggaacgggcacgcgccgttctccttccatggagcggacgcaggtgctgacggtggcggggggaaggcggagaatgcgacctccagcacgaactccacagcgaccacgccgcaggccgagagcaggtcgatgtcgagcgagaccaactatcctatgccaccggccaatgtgtgccggcgggaggggagctacgagttctggaacaatgacggcggcagcgccgaggcgttcagcttccagaaccgtccgccgcaggggccgcactcgtcgtccccttcaatatcgccgccgctgccgccagaagggggcggcatggacccacccgcccggctcaacggcagcttccaccggaagcaggtggcgtccgacggcgagatgtcgctcgacctcgacctggagatggacgagctcgggaggacggccgcgcagctgcgctcgcacccatccttttccagctcgctcgaaagggacgaccgcgtctcgttgcaggagccacaaaagcggcactccgcgtcgtcctgctcattcgattccgacaccggcgacggccgaaagcgccgcggcgacgacggcgaggtcgttcggtgcacgtcctcctctagtgctgcgggagcggggccgttgctgcgagtcaacacgcgctcccggctcatggacccgccgccgcagtcgcagcgggcgccggcacctgccgcgtcttctgtcgtcgacgaggagcgaaaatcttcaggcttgcggactcctacaaagtcgggccgcctcttctccaggcttatgtccggcaacaagtccggtcccattgctggcaagtcaggtcccatggacgacgaggaggacgatccattcgtggacgaagacattcccgatgacttcaagcgtgggaagctggacgctttgacggtcttgcagtggctcggcttgttccttatcatcgcggccttggcatgcagtctcagcataaagatcttgtccacgaagaaggtgctgggtttgcacctctggaagtgggagctcctcgtgttcgtgctcatctgcggccgtctcgtctccggatgggtcatcaggattgccgtcttcggtgtcgaacgcaacttcttgctgaggaagcgcgtgctctactttgtgtatggagtgcgcagcgccgtgcagaacgcgctctggctcggcctggtgctcgcctcttggcacttcttgtttgacgagaatgtccagcaggagacgaactctccagtactgccctatgtgacgaaggtactattctgctttcttgttgccacgctcatccgccttgtcaagacattgctgctgaaggtactggcctcctccttccatgtctcgacgtactttgatcggattcaagaggcattgttcaatcaatacgtcatccagacactctctgggccgccactagtagaagaaaaccatgtgcttgaggaggttcatgagctccaacgtgcaggtgcaactataccaaaggagctgcgtgatgcagtaccaaccaaacatgtatctgagcagaggaacattcagttatcaggggtcatgcctgagggacaaggtagcaagcagctgtcgaaagagaaaagggacgggatctctattgatgcacttaacaagctcaaccagcgaaatgtctcagcttggaacatgaagaggctgatgaggattgttcaatttgggacattaacgactatggatgagcagatacaacaggcaagaggtaagggagatgaatcagcaacacagatacgaagtgaatatgaggcaaagatagctgccaagaagatctttagcaatgtagcaaagccaggttccaagtacatatacttgtcggacttgatgagattcatgaggcaggaagaggctgttaaagcaatggatctttttgaaggggcacaggagcacagcagggtcagcaagaggtctctcaagaactgggtggtgaatgcatttagagagcgcaaagctcttgcccttacactcaatgatacgaaaactgcagtaaacaagctgaaccagatggctaacgttattgtggggatcattgtgtttgctctctggcttcttatcctgggaatagcaacagcaaatttctttgtctttctcacttcacagattctcctggcagttttcgtgtttgggaatacgttgaagacgctctttgaggcaattgtcttcttgttcgtgatgcatccctttgatgtcggtgaccgctgtgaaattgaaggtgttcagttggttgttgaggaaatgaatctcatgacaacggtgtttctccgatctgataacctgaagatatattatccgaacagtgtactcgcaacaaaaccaattatgaatttctacagaagtcctgatatgggcgaagcaattgacttctccattcatgttgcaactcctgccgagaaactggccctgatgaaggaacggatactgcgctacattgacaacaagaaggaacattggtacccgggcgcgatggttgtactccgggacgtcgatgataccaacaaactgaaagtgtcaatatggctgcgacacacactcaacttccaggacatgggcacgcgtttcgtgaggcgagagctagtgctccaggagatgatcaaagtcctgaaggacctcgaggttgagtatcggatgcttccacttgatgtgaacgttcgcagtgcgcctccaatccagtccacaaggatgcctacaacatggagttattcgtgaagccagtgaccaggaaccggaccatttggccgtggcattccggatgaggacttgctacgttcctccatggatttggtgggtttaagctgcaagatcttgttggcagcgcaaatggcgtgatggtggtgatcttggtagcaaatcgagctagagattagcatattactatattagcatgtagagagctgttagttgtgcctgcactcgtcacttgtgcagaatggatgggatggaacgcatgccggatgcgacagcggcaacgaagatggtgggcggatggcaataatgtagtgctctgttgatctgttgtatacttgtatctgtgagttgtgacgagaaacctgttgtatacggaggtcctgaacttgcagaattcaaattggcaatgtaat

SEQ ID NO: 40491 - DNA, 722 bp, Zea Mays
atttttacctccttttggctagagaatcaaggtggagaagagaggagcgcagaagtagcacctccactagtagatctataggcatggggagagagaaacaggtagatctgcttgaagccatcgtctcatatcgaatccttcagatctcacacacggagaccaagaaaagcacaattcccatccatctgatctgcatgcccatccctcatccctctcccccctccatggaatcccacaaaagccgcaaccctagctccactccctctataaatagcgcgccccgtaaagcagcacatacattacagtgcagcaagagccgcagcagctgtggtctgtgagtggatcgctcggagcaagcaaaggaactagtagtggcggccatgtgcgcttatcaaagggtggcgcttactgagagttccttggcattctgtccacctcccttcttgacgatcttgcagaaagtttgctttttttgtttgtttggaggtgggcatactgccaatggagctgcgtaggcctccctttgtaaagcccgcatgacataagtaagagctacgttagatttgatcatcacctgtgccggaaacgccttcgttttgctgccttttcttgcgtgtgttcatttgatgggcctgtttgtttgattgatgtcgatcgaggcgtgcccggccggccggttctagcttgttttcttaggctcttagctacatatgatgcagacc

SEQ ID NO: 40492 - DNA, 874 bp, Zea Mays
ccgacactcttaatttaagagtgtcgaggtcccgcagaaaccgacactcttatgtaatttaccctaatccccaatcctcttctaccgtcgcgcgtctcctacccactctgcttgccagtccgcccgccgtctgctcgttttgacctccgctgcgcgcgctccctgtccggcggtgcagaatcacccagcggcgcgcgctccctgtccggtcatggtgggggccggcggcgtagggcttcgggcagccatcggcctcgccaagtcgggcggcgagcggcctcgccaagctggacaccgggcggccatcgctgagccgggcggcctcgccgagccaggcgacctcgccgagccgggcggcctcgccgagctctaagctccgggccgcgcagtgcctcgccgagccaggcggcctcaccaagccggacgccaggcggccatcattgagccgggcggcctcgccgaactccaagctccgagcggcgcagtgcatcacccagatcttccccactcgctcgcacaccgttgcggcacagggttctggctcacatcatgctagtccgcctccggatcagagcacgtttatggacttattgatgaacacaagtggcggcggctccaatgacccaccaacggaatgaattaatatggaggcttgtgtggaacttactatcattgcgttttgtatgaacttgaacttgtttcaaatggatttgaacttctttcttatggatttgaacttgtataaatattgaatatggtgcttgtgttatgatatattgaatatggtgcttgtgttgtgatatattgaatattgtgcttgtattgtgctgttatggaggcttcccatccggggagggagaaaaataaaactgag

SEQ ID NO: 40493 - DNA, 1941 bp, Zea Mays
cactctgcttgccagtccgcccgccgtctgctcgttttgacctccgctgcgcgcgctccctgtccggcggtgcagaatcacccagcggcgcgcgctccctgtccggtcatggtgggggccggcggcgtagggcttcgggcagccatcggcctcgccaagtcgggcggcgagcggcctcgccaagctggacaccgggcggccatcgctgagccgggcggcctcgccgagccaggcgacctcgccgagccgggcggcctcgccgagctctaagctccgggccgcgcagtgcctcgccgagccaggcggcctcaccaagccggacgccaggcggccatcattgagccgggcggcctcgccgaactccaagctccgagcggcgcagtgcatcacccagatcttccccactcgctcgcacaccgttgcggcacagtaaagtatatactttgatggaggtcagcatgtcgagtggttgtgcaaggaaacaaggagtttagatatgccaattaggtatagttcatcgcttatgttacgtcctgactttctcccacttggtctgaatacatttcttagggttcatatattaatgtaatatacggcagcagtccatatctgcaatgcggctgctatagctgcgtgcagaccagatcaaccactctgttctcttcatgtatattgtgccaacgacggaaccgcagataggaacgactctgcaagccttgctgacacaaaagaggagcacacacgaaatttgaaaaaaaatgttcctttttttaattttacatatgctatggcactaagagcatatctgacaaattacttattattctcccccaccactgcttgaaatatgcaatataaagggattgtggatcctccaataggttactcattatacccctctgattacctagaagtttcaaataatcactcaaaatccaccccaaccgtctccttgaaatatatccaccctccttctcctctgtccacttgtgaaggtattggcaaactgttgaggatgacaaagaagagcatccatatttattatgatatagaacagtatcagaaaatgcatcatataaactatttttataatctgcttattttgatgctataagttttggtattctttactataaagttggacaaacctcaaggtagtttgacttaaggtgattctaggagttaatttgtttttggatgaagctaactaagggagcataacgagttagggtttcccttcattaaaatgatctgttgaattctagctatatatatacatactctggtagtccatcatcatgtttatttttcgactccgtctattttaagttctaagcttcgttgtttaagcagttactagaaaacatgcatgtgaccttgtgactattcattcttgtaaccagttgcatccattgcaatttgattactacatgcgaacaatagctataaaggatagatatcaaacttatttaatttggcacatagagattgagaacgaggcgccgctatacaaatgtttattaggttattcgatgttgcagcctatgtatatgtttaattagttactcgataaactaacaaatgtttgtttcttttaaagggttctggctcacatcatgctagtccgcctccggatcagagcacgtttatggacttattgatgaacacaagtggcggcggctccaatgacccaccaacggaatgaattaatatggaggcttgtgtggaacttactatcattgcgttttgtatgaacttgaacttgtttcaaatggatttgaacttctttcttatggatttgaacttgtataaatattgaatatggtgcttgtgttatgatatattgaatatggtgcttgtgttgtgatatattgaatattgtgcttgtattgtgctgttatggaggcttcccatccggggagggagaaaaataaaactgag

SEQ ID NO: 40494 - DNA, 1094 bp, Zea Mays
aaccacgcgtcccgaatgctgcacccacccggtcccgcgaaaaccaaccaccactcccaccaccctccgcctccgcctgcgccacagctgccgattcgaaagccctcgtcctgacccctcgcaaaaccctagctccaaccaccatgaagggcaaggccaacgcctccaagaaggatgaggccaggctccgggccggcggcggcggcgccggaaagcgcaagaaggccgccgcgagcggcaagcccaagcgccctccctccgccttcttcgtcttcatgtctgaattcaggcaggagtaccaggcgcagcaccctggcaacaagagcgttgcggccgtgagcaaggcagcaggggaaaagtggcgctctatgtcagagcaagagaagcaaccctatgtggaccaagctgggcagaagaagcaggactatgagaagactaaggcaaatattgagaagagcacaagctcaaagaaggctaagactgatgacgacgatggctcgaagtccgaggtcgatgatgaggatggcggtagtgacgaggataacgacgacgacgagtaaatagtatttccgctgttgtgaggtgtttatgaaggggatctattagtttcgtgaggttgttagtttagtgcattagcaaagaaaaagccgaatgctgctagctattatgttgcttttcttttgctaatcacttgtgtcacaactttctgtacctgtttcattgactaatctagtgactagtcagttatgggtttaatgtttggttttggttttatatatttctttgttgcattctgtgcggtctacggaagtcatctgtgctgtatgaatgatgaatatctgcttgtggctcgtttcagtttagtgagtttttgttttgtgactcaggttaatttacatgagtttgtttgtgactgttaatttgtgcgtttattggtgcagttagctttcttatatatatgcatggtggaaattctgttgatgatttctgagataaccaagctcacttgtttcatgataaactgctgcaaatttgttgccgttttctgatataatcaaattcacttgttttttcatgaactgctggagatgaat

SEQ ID NO: 40495 - DNA, 2012 bp, Zea Mays
caacaaatgaaaaaatcatgtagcagcctggcagcccatccaaatacaaaagccccaatcgtgtagcagcctgacatttacccatgctgcccagctgcgccctagcttcttcaaccagcgccgtcacgattcaccgttccggccaagcagcaagttgctgggggttcacgaagacgaagcaagcttgcaagcagcaagctgctgcagcctgcaagtctgcgcacggaggccagaggctagaggctgcacgctcccacctcccatggctccgctaaattgatggagcgtttctataaaagaaaagcaccagaaccaaatagtaatgcaattgggggttcacctaaaggtgatatcaattgggaagaggagattaaatatgatccaggactgaggaaattaatagatgagtaccatcctaatcagagagagagggtgagaagaaagtatttgcagaatggaccatcgcaacctcgcacatgcagttttccatgctcagaaattggaggaaatctgagaagatttattctagaatggtttgatgagtttggaagttggcttgaatacagtgaatccaaagacaaagcttattgtttttgttgcttcttgtttagagataagaaagatcctggatatgacgcgtttgttgttactggttggaatggctatcatagaaaagaaaggctaaaattacatgtgggcaatgttggtagcttacacaacaaagcaatgaagaagtgtgatgatctattgaaaacaaaacaacatattaatgttgcatttagaagtcaaagtgaagcgggaaagaaggcatatttgactcatctaaatgggtccattaatgtcgctaggatattagtgaagcaaggcttgtcttttcggggtcatgatgaatctgagaagtcttacaacaaaggaaattttagggaatttcgtgattacacaacagagcaaaatccagaattgcgtaaggtaacaggtaaaaatgcatcagctaatagtcttttagtggctcctgaaatccagagggatattgttaagtgctttgcaaatgaaatattgcattctattcttgaggaacttggagctgatgttttttccttgctagttgatgagtctagagatgtttcttggaaagaacaaatggctattgttttgcggtatgttgatcaatgtggaattgtcaaagagagatttgttggtttggtttatgttgcagaaacaacatcatttccctcaagtcttctattgatgtcatgtttgcaaaacttaaactaagcttaaagcaagtcagaggccaaggctatgatggtgccagtaatatgagaggtgaatttaatggattgcaatcactaatcatgagagaaagtccctcagcttattatgttcattgctttgctcaccaacttcaattagtccttatcacagttgttagaaagcatgaaggtgttagtgaattctttacaaagatctatgacttgttgactgttgtgggtggctcagctaagaggagagacttgattagagatatcaatcatgagcatttgagtaaagcgctaggttgtggacaacttgaaactgggataggtgaaagggaaatgtgcccttgggccatttctaagtattttggtgattgagtgccaacataagtggacttatggtaatatatgcaaagtgatggacaaagtgcaaatcaagtctaaaggtatgtttctagacttggtacattgttttggagactaatgttttgtgtctaagtgctggaaacaggagaaatcaaattggaaaagagatggctttgttcagccacagtcagctcggtctgggtgcaccggactgtccggtggtgcaccggacagtgtccggtgcgcctttctggcgactgtcaactggctgctcttgggaggcgatcaacggcgtacggctataaatcaccggactgtccggtggtgcaccggactgtccgatgagccattcacaggcgaagtcgtcgctctcgggaagtgattaacggc

SEQ ID NO: 40496 - DNA, 1934 bp, Zea Mays
ctgcgccctagcttcttcaaccagcgccgtcacgattcaccgttccggccaagcagcaagttgctgggggttcacgaagacgaagcaagcttgcaagcagcaagctgctgcagcctgcaagtctgcgcacggaggccagaggctagaggctgcacgctcccacctcccatggctccggtgcgtgatagattgactaaattgatggagcgtttctataaaagaaaagcaccagaaccaaatagtaatgcaattgggggttcacctaaaggtgatatcaattgggaagaggagattaaatatgatccaggactgaggaaattaatagatgagtaccatcctaatcagagagagagggtgagaagaaagtatttgcagaatggaccatcgcaacctcgcacatgcagttttccatgctcagaaattggaggaaatctgagaagatttattctagaatggtttgatgagtttggaagttggcttgaatacagtgaatccaaagacaaagcttattgtttttgttgcttcttgtttagagataagaaagatcctggatatgacgcgtttgttgttactggttggaatggctatcatagaaaagaaaggctaaaattacatgtgggcaatgttggtagcttacacaacaaagcaatgaagaagtgtgatgatctattgaaaacaaaacaacatattaatgttgcatttagaagtcaaagtgaagcgggaaagaaggcatatttgactcatctaaatgggtccattaatgtcgctaggatattagtgaagcaaggcttgtcttttcggggtcatgatgaatctgagaagtcttacaacaaaggaaattttagggaatttcgtgattacacaacagagcaaaatccagaattgcgtaaggtaacaggtaaaaatgcatcagctaatagtcttttagtggctcctgaaatccagagggatattgttaagtgctttgcaaatgaaatattgcattctattcttgaggaacttggagctgatgttttttccttgctagttgatgagtctagagatgtttcttggaaagaacaaatggctattgttttgcggtatgttgatcaatgtggaattgtcaaagagagatttgttggtttggtttatgttgcagaaacaacatcatttccctcaagtcttctattgatgtcatgtttgcaaaacttaaactaagcttaaagcaagtcagaggccaaggctatgatggtgccagtaatatgagaggtgaatttaatggattgcaatcactaatcatgagagaaagtccctcagcttattatgttcattgctttgctcaccaacttcaattagtccttatcacagttgttagaaagcatgaaggtgttagtgaattctttacaaagatctatgacttgttgactgttgtgggtggctcagctaagaggagagacttgattagagatatcaatcatgagcatttgagtaaagcgctaggttgtggacaacttgaaactgggataggtgaaagggaaatgtgcccttgggccatttctaagtattttggtgattgagtgccaacataagtggacttatggtaatatatgcaaagtgatggacaaagtgcaaatcaagtctaaaggtatgtttctagacttggtacattgttttggagactaatgttttgtgtctaagtgctggaaacaggagaaatcaaattggaaaagagatggctttgttcagccacagtcagctcggtctgggtgcaccggactgtccggtggtgcaccggacagtgtccggtgcgcctttctggcgactgtcaactggctgctcttgggaggcgatcaacggcgtacggctataaatcaccggactgtccggtggtgcaccggactgtccgatgagccattcacaggcgaagtcgtcgctctcgggaagtgattaacggc

SEQ ID NO: 40497 - DNA, 1170 bp, Zea Mays
acaggccgaaacagagcccggcccacgagagcccagaatcactcgcctccctccatctctgacccagtcctccctgaccgcctgacgacgtcgtgttttcttccttccccggtctcattccacgcgcccgctcctcttcgccctcgtcttcctccatcccacggtcccacctgtccctctcaccgcctcgttattttttcgcccccatctttgaacgccgggactccaactccaccgttcctccctcttcgttccctccgatcccgcccctataaatccagtcgcctcagccgccacagcgggccgcaagcacgtaaccacacagctcactgctgctcccgtcttcccgtgtcctgtcgtgctcccgtcgccgggggcggaagggttcgcgaggccggcgggcggttagggatttctccggagtcccgcgatggcgaagctgtacgtgcaggcgttcccgcccgcggatctgaacaagaacaccgagtggttcatgtatccgggcgtctggacgacctacatcctcattgtcttcttctcctggctcctcgtcctctccgtcttcggctgcacccctggcaccgcgtggaccgtcgtcaacctcttccacttcgcgatcacataccactttttccattggaagaaaggaacaccttttgctgatgaccagggaatgtacaacgcattgacttggtgggagcaaatggataatggcaaacagcttactcgtaataggaagttcctcattgttgttcctgttgtcctctctgcacaccacagactaccaacaacctatgctcttcctcaatacccttgccgtcagtgtgcttgtggtcgcgaaactaccgaatatgcacaaggtccggattttcggaataaatgccgagaactgagcaacgtcatccttcgccagacatttaccctatatgcgcttttcagaacggttttgtgtgttcccccccccttctagtgcctttagttgggctcatcagagcaccagtgttgaaaaagttgttagcaggatgggccttggtcgctgtatagagagatgctcggaggcgtgctgtacatctgatgtgcacggattctgtacactcttaatgttgctatatatacggtttgttgcaagcatctgtcggttgctatatgtacagtgtggttcttgcagag

SEQ ID NO: 40498 - DNA, 1364 bp, Zea Mays
catctttgtcaagtgtcaacgtctaacgctcggcaaagataacggccctctgctatagacggtcatttaccgagtgctgcggttcgctgagtgtttgacacggtctatgccgagtgttctactatcggtaaatatggtcgttaccgagagcgagtagaattttgtcgagcgtctaacaaaaagcactcagcaaagtcgcgagtactcggaaaagagccgaatttcggtagtacgtgaggggaatgtcttgtgggcccgccagattaagaatggcttccgtgcggtgaaggttgctgtaacagtccatccactgaagaagacacagacacgggccaccagaggctgccatatatatacgtgaaaatggtaaagtgagtgagagaataatttgatggcaactttctggtgcgggcagttgaactttgcaagtgaatgatcaacgtacgtactagctaagaaaacaacagggctggcagtattcatctcaatatattaccttgacatgagaggtcatgagagagggcaaagagcataatggcctgcacaaggtagcccttgcagttgtagaagatggcttattaacatatgataataatagtaccatgtggacagcagacagcgcaggtgcaaaagcatggtgtttgccatacatacatattccttcattctccttttctccacgacgacggccctagctagctcctagtgcttttcatggctggaagattcttggtttcgtgatgatggcccagcagatatggcgtctcctcagagctatacaaatggagagatcggccggccggtctacgtacagagacgacggatgtcacaaataacataaaatacagacacaaagtattatatatctccgttccaaaatatatctagtttttttatctctatcctgaatcaaaattttctgactttaatcaaatctattaaagaaaaacggcatctgctagtttcagtaaatccttcattaaatatgtaatggaagtttgtttaaatatatatatgtattaatagtgtatttgttatcttcatatattaaaaaaaacttgattttggcttagacaaagttaaagggcactacaatttagaacagggcaatatataaggcctaaaagctggatgagacgacataggtggtgtttggttattacctagtactacagattttgagaagttggatactgcacaaaaattcaatgcatatcccattatcgatgatttatggccctgtttgtttcctaccttatttttagaatctcattataaaccaaacatctcatgaaatttgcattggattttgtgctagaatctcacaatctctctataacctgataatgagatttgtattggat

SEQ ID NO: 40499 - DNA, 1891 bp, Zea Mays
gagggcgcagcagctggcggtgggtttggattcgcggcgtttccagccatgagcatctcctccatgggcttgcctagccctagcggcccctggtgatgcacacatattgctcatgttagatgttactaccgcagaacttaatgatggatcctatctagctaggggaagcaagaacatggagaatgaagagaatgatagcacatagcagtcttagcagaggggggttatgagcgtggaggtctctttggattcttatggcgcaactgcagcgcagtgcaacaaaagaaccaaacaaatggatacaaagtgagattgaaaggcaaattaaaaggtgaaaaaaagggcaagcaaaagatgagagagaagcacaacacagcaccacgtacgtaaaactccactttgtttgtgctcttgtagggttgcgcttgtggcgtagtagcacctctaatcactccatcacccaagacatggccgctcttttgatgcaaggcgtggagagagtaaagctactactctcctccatatgagaaaaaggagggataaaagggaagagagagctcggaaaggaggggatggataagatagaaagaaaggtaggaacaaagggagggggaaaaaaagggggcggcccggccgtgtgtgtgcgctcctttcaaggattaaaagggaggagacaagcagggaggattaaaggccccccagctcgaagccaatggagctagaagagcttgacggcacgcgcgcatgcacagagaggagatgacggtgtgctcgcgtagatctacacaaagaatataaaaggctcggcatggcggtatcccaagaacacgaaatcatgcccacacactcactcctatatctactactataagaaagcaagctccaggaccaaggcagatcagccagagaggcgaagaaccgctagagtaaccaagaacaagacaccaagatccaagccggcaggcgagagatctgctcgtactcatggctcccggccccgatgcacgctgcagctagcgcgcgccttgtttggttcgatcgagacggccgtgcagatcggcttacctgatgccactgcgccgcatccatgcatgcaaggatcccaatcccgctcctcgccagagcgactctgtctcccgtgccgcgcgcgcgcgcttgccagacgagctcgggacgacggcgcgacgaggggggaggacgacgacgaggagcctactggagccggatggggacgggcggcggcggaggcggagcggaggaatgtcccgtggatggcctgagtagtggaattgctcccggctccttccctagctagtctcttctccttcatatgtcatgtagatagtgcgattctttttcgcaaatatttttttatgcgtctgccacgctagctggaggaacagcaaggaaaattggtgccccctggcaatttttttttttttggaaatgcgtcgaaattcgtccgtgtaggcttcggctacagtcggtgacgacagcagtcgatggacagcgagactgcgagaggggcagctagccgcgaagcagccctggaggaatggaggatgatggtccgcgtggggcctcgcacgtgcgtagggacccgtgccacgtgccagcaaccaagcggtgtgtttttggtttcagagactctctccagcgtccagcgacattatctaaatttcgtttagtctgataactctatttttttctcaatatctacattgtcaaaacaatacacaactaccttatttattcatttttattttaacgttcaacttgtatgcaacgtgtggcattgtaattgaagaattttttttttggtaacaatcatattaatacaatttgaacttatgtatgtaacgcaaaacaaaaaactgtaacatttttctaa

SEQ ID NO: 40500 - DNA, 2493 bp, Zea Mays
ggttaggtatgctactagcagcagactcgggccacacgcccacacggggacggaggggacagaaaaggatcaaacgaaggaaaggaaaggacccagtctctttaaaaggccctcgagaaaaatctccgcgtcaccaccaagcacgtccccgttccattacaacaaaagatcgtgctagtttaagcgcggattgatggcagagctgctgtagatttggagcattttggggttggttttttgcgatttgaggatcgaatcgggctgggtggtgcgaattggaggattcttcccgaatcgagaaggtgtaggccaaattcgcaaggaagctgcagctatccgcgtgagaaggctgcctctcacaaattctcggtcggtgccatcccggcggtggactgcttttgggcttcttcgaagatggggacggggtcgagcatcctgggcgcggatggagagtggggggagacgtccctcggcgacatgccggagagctgcgtggcggcggtactcctctacctcgacccgccggagatctgccaggtggcccgtctcaacagcgccttccgcggcgccgcctcggcggactgcgtctgggccgccaagcttcccgccaactaccgttaccttgcggccctagccgcggccgccgatgacgagggctgtggcgatggagatgccagcggcaagcgcttgaccaagaaggagatttacgctcgtctgtgccgatccactttctttgatgccggcagaaaggaattctggattctgaagaacaagggagccctttgcatgagtatatcatcaaaggcaatgactattaccgggatagatgatcggaggtactggagccacctcgctacagaggaatcaagattccatactgttgcctatctccagcagatttggtggctcgaggtagatggggagcttgagttctgctttcctgctggtgcctacagccttttttttcatcttcacctgggtcgaccctataggcgcatgggtcgttggctttgtggaactgagcatgttcatggttgggatgtcacgcccacacggttccagctcacgacctctgatgagcagcaggcgacatccgaatattatctgcatctacatgaacaagggggctggaagctttaccatgttggtgattttgtcatatcaaattccgatgagcccatgaaactcaagttctcaatgatgcagatcgattgcacacatatgaaaggcggcttgtgcgttgactccgtgtttatatatcctaaagggtacaagcctgagaaggcgaacatagtctgcacctagttcggcaaagttggccttgtacctctcctgcatgatgaaacaagaggcaattcaaatgtggatggctagcctttttcctggcgatccttacctgaaagcccattgtacattctttttgttttttcccttcattctggtagttttgcatgaatgtaaggtctttcttgtttttttttgggtagtgttagttaaacaggtggagaataggggatttagaaacaggtcaagtgaagtaagtcttgagtcattgaggcggtagattgccatacagcaataataatgttcggcgagctggattgattttttttctctccctgtcctgaggccagaaaacattcagtatctgttatcatcggtgtcttcagaggctaaaagtccattttgtgtagactgacgcgtgtggtctgttttgaatacaatgtgtgattgatatgttacaaggcgattctttcagttcgcaatttgacagttacagctcgtaaaagtttggcgcagtaacagtgattgactttgacagttacagtttgttggcgtagtaacagtgattgactgattggtgctggttttatgggttctcttctcatcccggcgtagtagctgattggtgctggttttatggtttgtcttcctcataccatcaggaggcagcgacacaacattaccactggcctggaagtgaatggattagcagccgagagtttgatcagaaattcaggtgttgttacaggaatggtaaggggatcccttgcctgctgcaacggttgggaacagaatacactatactgttgggggaatgtttcgtagccgaagatcctaaaaaggacaccttcgaaaggtcttctcagaagcaagcgccgaagatattatctataaagcttcggcacaaagacagatctcaagatgaagggtcgaaccgacttaaagatgaattgacttaaagacccatgatgttttgtgtcattattgtagtcgattgtaaagggcataaatgtaattttgcacaggttgcatcctgtgtctataaataggtgaacagtatcccggcactgttcacgcaatcctgtaattgctaacgcattgtactggaatcattttctgtcagagacgaaggtataaatgtacctaaatattatttcaacatttaaatttatattatgagatgtataaataatgtgatttatatttcct

SEQ ID NO: 40501 - DNA, 2494 bp, Zea Mays
ggttaggtatgctactagcagcagactcgggccacacgcccacacggggacggaggggacagaaaaggatcaaacgaaggaaaggaaaggacccagtctctttaaaaggccctcgagaaaaatctccgcgtcaccaccaagcacgtccccgttccattacaacaaaagatcgtgctagtttaagcgcggattgatggcagagctgctgtagatttggagcattttggggttggttttttgcgatttgaggatcgaatcgggctgggtggtgcgaattggaggattcttcccgaatcgagaaggtgtaggccaaattcgcaaggaagctgcagctatccgcgagaaagtggttctgaaggcctcgggcttctcatccccaattcgatccgttcccgagacggtgattgggtcatagatggggacggggtcgagcatcctgggcgcggatggagagtggggggagacgtccctcggcgacatgccggagagctgcgtggcggcggtactcctctacctcgacccgccggagatctgccaggtggcccgtctcaacagcgccttccgcggcgccgcctcggcggactgcgtctgggccgccaagcttcccgccaactaccgttaccttgcggccctagccgcggccgccgatgacgagggctgtggcgatggagatgccagcggcaagcgcttgaccaagaaggagatttacgctcgtctgtgccgatccactttctttgatgccggcagaaaggaattctggattctgaagaacaagggagccctttgcatgagtatatcatcaaaggcaatgactattaccgggatagatgatcggaggtactggagccacctcgctacagaggaatcaagattccatactgttgcctatctccagcagatttggtggctcgaggtagatggggagcttgagttctgctttcctgctggtgcctacagccttttttttcatcttcacctgggtcgaccctataggcgcatgggtcgttggctttgtggaactgagcatgttcatggttgggatgtcacgcccacacggttccagctcacgacctctgatgagcagcaggcgacatccgaatattatctgcatctacatgaacaagggggctggaagctttaccatgttggtgattttgtcatatcaaattccgatgagcccatgaaactcaagttctcaatgatgcagatcgattgcacacatatgaaaggcggcttgtgcgttgactccgtgtttatatatcctaaagggtacaagcctgagaaggcgaacatagtctgcacctagttcggcaaagttggccttgtacctctcctgcatgatgaaacaagaggcaattcaaatgtggatggctagcctttttcctggcgatccttacctgaaagcccattgtacattctttttgttttttcccttcattctggtagttttgcatgaatgtaaggtctttcttgtttttttttgggtagtgttagttaaacaggtggagaataggggatttagaaacaggtcaagtgaagtaagtcttgagtcattgaggcggtagattgccatacagcaataataatgttcggcgagctggattgattttttttctctccctgtcctgaggccagaaaacattcagtatctgttatcatcggtgtcttcagaggctaaaagtccattttgtgtagactgacgcgtgtggtctgttttgaatacaatgtgtgattgatatgttacaaggcgattctttcagttcgcaatttgacagttacagctcgtaaaagtttggcgcagtaacagtgattgactttgacagttacagtttgttggcgtagtaacagtgattgactgattggtgctggttttatgggttctcttctcatcccggcgtagtagctgattggtgctggttttatggtttgtcttcctcataccatcaggaggcagcgacacaacattaccactggcctggaagtgaatggattagcagccgagagtttgatcagaaattcaggtgttgttacaggaatggtaaggggatcccttgcctgctgcaacggttgggaacagaatacactatactgttgggggaatgtttcgtagccgaagatcctaaaaaggacaccttcgaaaggtcttctcagaagcaagcgccgaagatattatctataaagcttcggcacaaagacagatctcaagatgaagggtcgaaccgacttaaagatgaattgacttaaagacccatgatgttttgtgtcattattgtagtcgattgtaaagggcataaatgtaattttgcacaggttgcatcctgtgtctataaataggtgaacagtatcccggcactgttcacgcaatcctgtaattgctaacgcattgtactggaatcattttctgtcagagacgaaggtataaatgtacctaaatattatttcaacatttaaatttatattatgagatgtataaataatgtgatttatatttcct

SEQ ID NO: 40502 - DNA, 2533 bp, Zea Mays
cacacgcccacacggggacggaggggacagaaaaggatcaaacgaaggaaaggaaaggacccagtctctttaaaaggccctcgagaaaaatctccgcgtcaccaccaagcacgtccccgttccattacaacaaaagatcgtgctaagctgctgtagatttggagcattttggggttggttttttgcgatttgaggatcgaatcgggctgggtggtgcgaattggaggattcttcccgaatcgagaaggtgtaggccaaattcgcaaggaagctgcagctatccgcgtgagaaggctgcctctcacaaattctcggtcggtgccatcccggcggtggactgcttttgggcttcttcgaaggttcgtatcttttggctcaggagaaagtggttctgaaggcctcgggcttctcatccccaattcgatccgttcccgagacggtgattgggtcatagatggggacggggtcgagcatcctgggcgcggatggagagtggggggagacgtccctcggcgacatgccggagagctgcgtggcggcggtactcctctacctcgacccgccggagatctgccaggtggcccgtctcaacagcgccttccgcggcgccgcctcggcggactgcgtctgggccgccaagcttcccgccaactaccgttaccttgcggccctagccgcggccgccgatgacgagggctgtggcgatggagatgccagcggcaagcgcttgaccaagaaggagatttacgctcgtctgtgccgatccactttctttgatgccggcagaaaggaattctggattctgaagaacaagggagccctttgcatgagtatatcatcaaaggcaatgactattaccgggatagatgatcggaggtactggagccacctcgctacagaggaatcaagattccatactgttgcctatctccagcagatttggtggctcgaggtagatggggagcttgagttctgctttcctgctggtgcctacagccttttttttcatcttcacctgggtcgaccctataggcgcatgggtcgttggctttgtggaactgagcatgttcatggttgggatgtcacgcccacacggttccagctcacgacctctgatgagcagcaggcgacatccgaatattatctgcatctacatgaacaagggggctggaagctttaccatgttggtgattttgtcatatcaaattccgatgagcccatgaaactcaagttctcaatgatgcagatcgattgcacacatatgaaaggcggcttgtgcgttgactccgtgtttatatatcctaaagggtacaagcctgagaaggcgaacatagtctgcacctagttcggcaaagttggccttgtacctctcctgcatgatgaaacaagaggcaattcaaatgtggatggctagcctttttcctggcgatccttacctgaaagcccattgtacattctttttgttttttcccttcattctggtagttttgcatgaatgtaaggtctttcttgtttttttttgggtagtgttagttaaacaggtggagaataggggatttagaaacaggtcaagtgaagtaagtcttgagtcattgaggcggtagattgccatacagcaataataatgttcggcgagctggattgattttttttctctccctgtcctgaggccagaaaacattcagtatctgttatcatcggtgtcttcagaggctaaaagtccattttgtgtagactgacgcgtgtggtctgttttgaatacaatgtgtgattgatatgttacaaggcgattctttcagttcgcaatttgacagttacagctcgtaaaagtttggcgcagtaacagtgattgactttgacagttacagtttgttggcgtagtaacagtgattgactgattggtgctggttttatgggttctcttctcatcccggcgtagtagctgattggtgctggttttatggtttgtcttcctcataccatcaggaggcagcgacacaacattaccactggcctggaagtgaatggattagcagccgagagtttgatcagaaattcaggtgttgttacaggaatggtaaggggatcccttgcctgctgcaacggttgggaacagaatacactatactgttgggggaatgtttcgtagccgaagatcctaaaaaggacaccttcgaaaggtcttctcagaagcaagcgccgaagatattatctataaagcttcggcacaaagacagatctcaagatgaagggtcgaaccgacttaaagatgaattgacttaaagacccatgatgttttgtgtcattattgtagtcgattgtaaagggcataaatgtaattttgcacaggttgcatcctgtgtctataaataggtgaacagtatcccggcactgttcacgcaatcctgtaattgctaacgcattgtactggaatcattttctgtcagagacgaaggtataaatgtacctaaatattatttcaacatttaaatttatattatgagatgtataaataatgtgatttatatttcct

SEQ ID NO: 40503 - DNA, 1242 bp, Zea Mays
cggcctcgagaaagtgatgacgaagaaaacaaacaggggcaacagcaacatcgaaacgataaggtcatgaccagcgaagggaatttctacctcacgcttcagagcagcatcggctgctgcttttcaccgccgctgcagtgtcacggtgcgccgtgcacgcactcccaatggcacccggcggcggcggcggcatcagagccccttcgccagacctcccagtcccagcccggcaaaagttcgcaaactcgacgagaagaccacgggcttattccgctgccagtgcgctaccgagactcccacggcctcagtcgatcagacgcggagccgtggtggtagtggtagcatgcgcccgcggaagcgagcagcaatcctctccggccgtcgcggcaaaggtgcggcccgagcccggcacgctcagcgtcgagttccggacgcgggacggctgccggctcggcatcgccaggtacccggacttcgcgtacaacgcgcagggcggccgcggcgtgggcgccgggcgcgggtcgaagagcggggaggatgatggcattggcacggtactcgtcgacttcgacgtggcgaccctgtacatcccgcccatgtccggcgcgacgaccaggttcctcggcctgccgctaccgccgtacctcaagatcgatatcttgcccgaggcactgggcggaaccatcgatcgagccactggtcagatcgaggttctgcttctcggttgggagcgtctacaaagcgccgccactgttcgtcgagacaacactgacctccgaggagtcgaggggagccataagatccggcaccggagaaagaatggacgaagaaggcagatgcaggctggttggggtggccgtcgtcgacccaattgatgacctcttcatgaacacatttctcagcctgcccaccgagtgcattgcttacttgagcgccaccatttccatagccgctgcgagatgaacgtctttattgctggcttacattgaaaatataatgcgcgcgccgatttctttttcttgtaaagattagccaaggctcggccatatcgcttcagttcatattggaaacctgaagtacactactatcgatcatcgcttggccattgatgttgttggggtgtaccatgtctcataagctaaggagccctcgtgtgtaaaagaggccaaaataatatgttcagggacatatgtataaacatctagtggtttaattatataatattataatgctaacgaacac

SEQ ID NO: 40504 - DNA, 751 bp, Zea Mays
gccacacacagtaacagtagtgaaccctgccccttttcccggtctctccactgatattccgctcctgtccctgtcctccccggacggagctaatagagccggctctgctcatcattatatcgtcgcgcacaaatgcgaagcctagcagcacttgtgtccggcggccttgtgttcgtgggggatgtgtggcatattagctagctgataagcggccggccgaagagcaagcgcagtgagaagaagaagctcggatcggaggaggtcggcatggggaggggacgcgtcgagctgaagcggatcgagaacaagatcaaccgccaggtcaccttctccaagcgccgcaacggcctgctcaagaaggcctacgagctctccgtgctctgcgacgccgaggtcgcgctcatcatcttctccggccgcggcaagctctacgagttcggcagcgccggcgtaactaaaactttagaaaggtatcaacattgctgctacaatgctcaagattccaacaatggtgcactctctgaatctcagagctggtaccaggaaatatcaaaactgagggcaaaattcgaggccttgcagcgcactcagagacacttgcttggggaggaccttggcccactgagtgtgaaggaattgcagcagctagagaaacagctagaatgtgctttgtcacagacgcaacttatgatggagcaagtggaagagcttcgcagaacgattcagccgttcaccttaatgtctaaagtat

SEQ ID NO: 40505 - DNA, 1377 bp, Zea Mays
agtgaaccctgccccttttcccggtctctccactgatattccgctcctgtccctgtcctccccggacggagctaatagagccggctctgctcatcattatatcgtcgcgcacaaatgcgaagcctagcagcacttgtgtccggcggccttgtgttcgtgggggatgtgtggcatattagctagctgataagcggccggccgaagagcaagcgcagtgagaagaagaagctcggatcggaggaggtcggcatggggaggggacgcgtcgagctgaagcggatcgagaacaagatcaaccgccaggtcaccttctccaagcgccgcaacggcctgctcaagaaggcctacgagctctccgtgctctgcgacgccgaggtcgcgctcatcatcttctccggccgcggcaagctctacgagttcggcagcgccggcgtaactaaaactttagaaaggtatcaacattgctgctacaatgctcaagattccaacaatggtgcactctctgaatctcagagctggtaccaggaaatatcaaaactgagggcaaaattcgaggccttgcagcgcactcagagacacttgcttggggaggaccttggcccactgagtgtgaaggaattgcagcagctagagaaacagctagaatgtgctttgtcacaggcaagacagagaaagacgcaacttatgatggagcaagtggaagagcttcgcagaacgattcagccgttcaccttaatgtctaaagtattcgccacattctcatggactgcgcaggagcgtcacctgggagaaatgaacaggcaactcaaacacaagctcgaagctgaaggctgtagcaactacacaaccttgcagcatgccgcctgctggccagctcccggcggcaccatcgtggagcatgacggcgccacctatcaagtgcatccgcctgcccactcagttgctatggactgtgaacccactctgcaaatcgggtaccctcatcaccagtttccgccccctgaggcagccaataatatcccaaggagcgctgccacaggcgagaacaacttcatgctgggatgggttctttgagttcttctgttaatccatccatcagatggatccatgttgaaaccaataaaaggcattcagtgctatatatatcatatgcatatccgtgctcaagtgcttgatttgccacgacgttggattgtatcgttctgtgtgtaatagctaatttagaacggcacatctattctatgtggttgtggtgtggcacttatactgtttattcatttggaccatgaatcggggtagtttgtaaaaacacatctatatatgctgccggtgcatagaattcaaagttatctgcaccgtaattattatatgctccat

SEQ ID NO: 40506 - DNA, 1256 bp, Zea Mays
ctctccactgatattccgctcctgtccctgtcctccccggacggagctaatagagccggctctgctcatcattatatcgtcgcgcacaaatgcgaagcctagcagcacttgtgtccggcggccttgtgttcgtgggggatgtgtggcatattagctagctgataagcggccggccgaagagcaagcgcagtgagaagaagaagctcggatcggaggaggtcggcatggggaggggacgcgtcgagctgaagcggatcgagaacaagatcaaccgccaggtcaccttctccaagcgccgcaacggcctgctcaagaaggcctacgagctctccgtgctctgcgacgccgaggtcgcgctcatcatcttctccggccgcggcaagctctacgagttcggcagcgccggcgtaactaaaactttagaaaggtatcaacattgctgctacaatgctcaagattccaacaatggtgcactctctgaatctcagagctggtaccaggaaatatcaaaactgagggcaaaattcgaggccttgcagcgcactcagagacacttgcttggggaggaccttggcccactgagtgtgaaggaattgcagcagctagagaaacagctagaatgtgctttgtcacaggcaagacagagaaagacgcaacttatgatggagcaagtggaagagcttcgcagaacggagcgtcacctgggagaaatgaacaggcaactcaaacacaagcatgccgcctgctggccagctcccggcggcaccatcgtggagcatgacggcgccacctatcaagtgcatccgcctgcccactcagttgctatggactgtgaacccactctgcaaatcgggtaccctcatcaccagtttccgccccctgaggcagccaataatatcccaaggagcgctgccacaggcgagaacaacttcatgctgggatgggttctttgagttcttctgttaatccatccatcagatggatccatgttgaaaccaataaaaggcattcagtgctatatatatcatatgcatatccgtgctcaagtgcttgatttgccacgacgttggattgtatcgttctgtgtgtaatagctaatttagaacggcacatctattctatgtggttgtggtgtggcacttatactgtttattcatttggaccatgaatcggggtagtttgtaaaaacacatctatatatgctgccggtgcatagaattcaaagttatctgcaccgtaattattatatgctccat

SEQ ID NO: 40507 - DNA, 994 bp, Zea Mays
atgtcgaggcccttcccggccaacagatatcttttcccggagaacaatatttgctcgtggcgcatatatccccgtccctggcctcgcgtattgggagacgccgtgctgctttggaatgggcgaactgcgatcggtgtcgctctcgtgcaacttaccgtgaacgtcggcctcctatcgctcgcggcagtatttatacgcttcgtcccagctgcactcctccaccgccgcccatcgatccaagccggcggtcggcttggacggtggctggaaaatgcttcgcttttggaggacgcagaggagcaccacctcgtcgaacgcgttgtcggtcgtggagatgaacgtgcacatggactgcgacggctgcgagaagcgagagtgagctcggtggagatcgacatggatcggcagaaggtgacagtgacagggtacgtggaccggcgggaggcgctgcgcgcggcgcggcggaccggcagggcggcggagttctggccgtggccgtacgacggcgagtactacccgttcgcgatccagtacctggaggacaacacgtacatggccaccaacaagtactaccgccacggctacaacgaccccacgatcggatcctacccctgccacgccttcacgcatgtcctcgacgacgacgcgctcgccgtcttccacgacgacaatgtccacgcctgcgccgtgatgtgatgtacgtgatgcgaagaagaagaagaagaagaagacagtatgcgcgtagtactcactgctggtatgtggtattcacatgtaaaacctgatttcactacgacctcgaagaaaggagagttaattccatcttctcgcaaaagagagagatcatgcatgttaaaaattatcagctctcgtcaggccgccgttaacaaattgctgctgtgaacaagcagctcaaataaagtcttgctctgaacaccgcacaaaaaattgggtgctgtgatttttttctttttacttgtgctgttgtgcaaag

SEQ ID NO: 40508 - DNA, 1022 bp, Zea Mays
atgtcgaggcccttcccggccaacagatatcttttcccggagaacaatatttgctcgtggcgcatatatccccgtccctggcctcgcgtattgggagacgccgtgctgctttggaatgggcgaactgcgatcggtgtcgctctcgtgcaacttaccgtgaacgtcggcctcctatcgctcgcggcagtatttatacgcttcgtcccagctgcactcctccaccgccgcccatcgatccaagccggcggtcggcttggacggtggctggaaaatgcttcgcttttggaggacgcagaggagcaccacctcgtcgaacgcgttgtcggtcgtggagatgaacgtgcacatggactgcgacggctgcgagaagcgagtgaggaaggccatgtcccagctggaaggagtgagctcggtggagatcgacatggatcggcagaaggtgacagtgacagggtacgtggaccggcgggaggcgctgcgcgcggcgcggcggaccggcagggcggcggagttctggccgtggccgtacgacggcgagtactacccgttcgcgatccagtacctggaggacaacacgtacatggccaccaacaagtactaccgccacggctacaacgaccccacgatcggatcctacccctgccacgccttcacgcatgtcctcgacgacgacgcgctcgccgtcttccacgacgacaatgtccacgcctgcgccgtgatgtgatgtacgtgatgcgaagaagaagaagaagaagaagacagtatgcgcgtagtactcactgctggtatgtggtattcacatgtaaaacctgatttcactacgacctcgaagaaaggagagttaattccatcttctcgcaaaagagagagatcatgcatgttaaaaattatcagctctcgtcaggccgccgttaacaaattgctgctgtgaacaagcagctcaaataaagtcttgctctgaacaccgcacaaaaaattgggtgctgtgatttttttctttttacttgtgctgttgtgcaaag

SEQ ID NO: 40509 - DNA, 1868 bp, Zea Mays
caaaacccagtccgtccggggaacgttaggaaaaaaactcgagagattcaaacctcccaaagcccccgcccccatcgccgtcatggactgtgccccgccgcgcggggcgtcattcgacgccgtcggccagcggtggctcgccgtattcgccttccaggccgcgttctcggccgccgcttcggcgctccacctcacggtgtccccgcgcggccgccgccacccgctcctcggcgtcccaaccggcctcctccttgggttccatccgttcctcgcttgcgccgccacggggatgctcgcgctcgcgctcctcctctccgtgtccccacacccgcggcctaccccgctgccgcggcgcgcgctcgcaaccgccctcttcgccgcggccggcgcgctttgcgtgggagccgcggcggccatgctacccgaggacgccgggtgggcggccgtcgctgggcttgggttccgaggcgccgtgcttggggccatcttcgccgcgcgctattttggccgtcggaggtggttgctccaatttcccgtcgtgcaggttgtacatacaaggaggtgcagttttgctccgcctcagagcactgctgctgcagacactaatcccactgaatttatcctagaatctttggaacaaagtgatccacgatcattgatacaatatcttgcataccaagatttgtgtgtggcatctgagtgtaatttggaaccatggcgcagagctgctttctttgaggaatctggtgaaacttataaaagaatcgtgacaacttgtttgaagccacttgaggagtttacttcaaaaattgctgaatcccttgaagatttttctagtgataagccagaattgatgctacaacagtccaaactctttagtgcatttgatgatttccagatatgcgcatggtgtgctcggacattgactgggttaactgcgtgctcacgccaggaggatcggtatggtgttgctcaactcactggctgcaatgctgctgtgatgacaacgttgctgtctgccctagtagcaattgagacatgcttaggaaagaaaacaaacccacagcctgtgcactcattgggtcctgaaaacattaggtgggttaacttctccacaggacgaaaaggcactggagttgcaattgcatgcacacaaaaaggcggcctacacaagaaagcttataccatggcagatgttcttcggacttctgtatatcagatagtttcagcattcatcgatgacctacgagctaatgcaaaaccatccagcttggagaagaactggatcagtgaagggagaaaacctgtatatggttcacaagccgtgttggttcagaagttgattctgtttattgagtaccgtgcagtatgaacttggttcatgtctctcagatccttacctccatatcagatcatacttggtagtcatgggtttttgaacttggttcaagaaccattgatttccaccagagcctatgaagatggatcctaaaattacttctgtattcctttgggctgctgcactgctgaaggcagtgacgctctcggattggataaccattatgcacccaggccttgtttctattctggtttatccactcaggcctttgtttctattctgatttgtagtctggaagttgaatagagttacctgtatgttgtatcatggagagggaatctgaaatacttatgatttttttatatccacttatcagatttatgacaaactgttagtactgcttagctgcacctatttggtggaatttcgtggtgaaaaggttcggggtgatgatctcctggaataggttccagttgttctttcccagtttacccaatagcaatatcagcctagtcttgaaacttcttcc

SEQ ID NO: 40510 - DNA, 2071 bp, Zea Mays
atttcttgtttcacttgtgaaccggaaactgatcagatgggggtatgaactgaaaactgatcagatgggagtatgaactgaacacagatcagatgggtgtatgcgtgcctgctctgttgtatacttctgaaactgaccagatgggggtatgaactgaaaactgatcagatgggagtatgaactgaacacggatcagatgggtgtatgcgtgcctgctctgttgtatacttctggtgaatgaccatagataaacagtactctcgttacaagactagaaatttgggccagatgatttattgaacttggattagcagtctagcatagggatgcaattattccagtagttgctatgatcaaatatgcatacagttgatattccttctctttatgttccctggatgcgtttccccacttagatctgctctaattcagtgaattgataactgatacatgatggctatttgtccaaatcattattggacgtgtgtgcgccactaactgaagcagtgcgcacgacgacgccgtggccgaaactaaggagggggtgggagcggggacaggggagcggtggccactgcggccagcggtgtggtcactgcggccggggcggtggacgaggcgcggaggagcgacctttattctatggattgaagatgggtgtcctaccatctggagaaagagctctaaagttatcaattgaccactggtgtttctctctgtttggaaataaatcatcattttgttcaggttgtacatacaaggaggtgcagttttgctccgcctcagagcactgctgctgcagacactaatcccactgaatttatcctagaatctttggaacaaagtgatccacgatcattgatacaatatcttgcataccaagatttgtgtgtggcatctgagtgtaatttggaaccatggcgcagagctgctttctttgaggaatctggtgaaacttataaaagaatcgtgacaacttgtttgaagccacttgaggagtttacttcaaaaattgctgaatcccttgaagatttttctagtgataagccagaattgatgctacaacagtccaaactctttagtgcatttgatgatttccagatatgcgcatggtgtgctcggacattgactgggttaactgcgtgctcacgccaggaggatcggtatggtgttgctcaactcactggctgcaatgctgctgtgatgacaacgttgctgtctgccctagtagcaattgagacatgcttaggaaagaaaacaaacccacagcctgtgcactcattgggtcctgaaaacattaggtgggttaacttctccacaggacgaaaaggcactggagttgcaattgcatgcacacaaaaaggcggcctacacaagaaagcttataccatggcagatgttcttcggacttctgtatatcagatagtttcagcattcatcgatgacctacgagctaatgcaaaaccatccagcttggagaagaactggatcagtgaagggagaaaacctgtatatggttcacaagccgtgttggttcagaagttgattctgtttattgagtaccgtgcagtatgaacttggttcatgtctctcagatccttacctccatatcagatcatacttggtagtcatgggtttttgaacttggttcaagaaccattgatttccaccagagcctatgaagatggatcctaaaattacttctgtattcctttgggctgctgcactgctgaaggcagtgacgctctcggattggataaccattatgcacccaggccttgtttctattctggtttatccactcaggcctttgtttctattctgatttgtagtctggaagttgaatagagttacctgtatgttgtatcatggagagggaatctgaaatacttatgatttttttatatccacttatcagatttatgacaaactgttagtactgcttagctgcacctatttggtggaatttcgtggtgaaaaggttcggggtgatgatctcctggaataggttccagttgttctttcccagtttacccaatagcaatatcagcctagtcttgaaacttcttcc

SEQ ID NO: 40511 - DNA, 1599 bp, Zea Mays
gaacacagatcagatgggtgtatgcgtgcctgctctgttgtatacttctgcgacctttattctatggattgaagatgggtgtcctaccatctggagaaagagctctaaagttatcaatgcaggccttctttctttcccttttcatgattttctttcttccttggcaattcagaacgggaggttctattggaagccaaatacttactgagatcagcatttttatagtgaccactggtgtttctctctgtttggaaataaatcatcattttgttcaggttgtacatacaaggaggtgcagttttgctccgcctcagagcactgctgctgcagacactaatcccactgaatttatcctagaatctttggaacaaagtgatccacgatcattgatacaatatcttgcataccaagatttgtgtgtggcatctgagtgtaatttggaaccatggcgcagagctgctttctttgaggaatctggtgaaacttataaaagaatcgtgacaacttgtttgaagccacttgaggagtttacttcaaaaattgctgaatcccttgaagatttttctagtgataagccagaattgatgctacaacagtccaaactctttagtgcatttgatgatttccagatatgcgcatggtgtgctcggacattgactgggttaactgcgtgctcacgccaggaggatcggtatggtgttgctcaactcactggctgcaatgctgctgtgatgacaacgttgctgtctgccctagtagcaattgagacatgcttaggaaagaaaacaaacccacagcctgtgcactcattgggtcctgaaaacattaggtgggttaacttctccacaggacgaaaaggcactggagttgcaattgcatgcacacaaaaaggcggcctacacaagaaagcttataccatggcagatgttcttcggacttctgtatatcagatagtttcagcattcatcgatgacctacgagctaatgcaaaaccatccagcttggagaagaactggatcagtgaagggagaaaacctgtatatggttcacaagccgtgttggttcagaagttgattctgtttattgagtaccgtgcagtatgaacttggttcatgtctctcagatccttacctccatatcagatcatacttggtagtcatgggtttttgaacttggttcaagaaccattgatttccaccagagcctatgaagatggatcctaaaattacttctgtattcctttgggctgctgcactgctgaaggcagtgacgctctcggattggataaccattatgcacccaggccttgtttctattctggtttatccactcaggcctttgtttctattctgatttgtagtctggaagttgaatagagttacctgtatgttgtatcatggagagggaatctgaaatacttatgatttttttatatccacttatcagatttatgacaaactgttagtactgcttagctgcacctatttggtggaatttcgtggtgaaaaggttcggggtgatgatctcctggaataggttccagttgttctttcccagtttacccaatagcaatatcagcctagtcttgaaacttcttcc

SEQ ID NO: 40512 - DNA, 1593 bp, Zea Mays
aagaagaccatgcggcagaaaccttcctgacacgcctgcacggacgacctttattctatggattgaagatgggtgtcctaccatctggagaaagagctctaaagttatcaatgcaggccttctttctttcccttttcatgattttctttcttccttggcaattcagaacgggaggttctattggaagccaaatacttactgagatcagcatttttatagtgaccactggtgtttctctctgtttggaaataaatcatcattttgttcaggttgtacatacaaggaggtgcagttttgctccgcctcagagcactgctgctgcagacactaatcccactgaatttatcctagaatctttggaacaaagtgatccacgatcattgatacaatatcttgcataccaagatttgtgtgtggcatctgagtgtaatttggaaccatggcgcagagctgctttctttgaggaatctggtgaaacttataaaagaatcgtgacaacttgtttgaagccacttgaggagtttacttcaaaaattgctgaatcccttgaagatttttctagtgataagccagaattgatgctacaacagtccaaactctttagtgcatttgatgatttccagatatgcgcatggtgtgctcggacattgactgggttaactgcgtgctcacgccaggaggatcggtatggtgttgctcaactcactggctgcaatgctgctgtgatgacaacgttgctgtctgccctagtagcaattgagacatgcttaggaaagaaaacaaacccacagcctgtgcactcattgggtcctgaaaacattaggtgggttaacttctccacaggacgaaaaggcactggagttgcaattgcatgcacacaaaaaggcggcctacacaagaaagcttataccatggcagatgttcttcggacttctgtatatcagatagtttcagcattcatcgatgacctacgagctaatgcaaaaccatccagcttggagaagaactggatcagtgaagggagaaaacctgtatatggttcacaagccgtgttggttcagaagttgattctgtttattgagtaccgtgcagtatgaacttggttcatgtctctcagatccttacctccatatcagatcatacttggtagtcatgggtttttgaacttggttcaagaaccattgatttccaccagagcctatgaagatggatcctaaaattacttctgtattcctttgggctgctgcactgctgaaggcagtgacgctctcggattggataaccattatgcacccaggccttgtttctattctggtttatccactcaggcctttgtttctattctgatttgtagtctggaagttgaatagagttacctgtatgttgtatcatggagagggaatctgaaatacttatgatttttttatatccacttatcagatttatgacaaactgttagtactgcttagctgcacctatttggtggaatttcgtggtgaaaaggttcggggtgatgatctcctggaataggttccagttgttctttcccagtttacccaatagcaatatcagcctagtcttgaaacttcttcc

SEQ ID NO: 40513 - DNA, 1014 bp, Zea Mays
gtttgaagcactctcttcgcatttgcgtggaaagacttccctcgatatgcgcatggtgtgctcggacattgactgggttaactgcgtgctcacgccaggaggatcggtatggtgttgctcaactcactggctgcaatgctgctgtgatgacaacgttgctgtctgccctagtagcaattgagacatgcttaggaaagaaaacaaacccacagcctgtgcactcattgggtcctgaaaacattaggtgggttaacttctccacaggacgaaaaggcactggagttgcaattgcatgcacacaaaaaggcggcctacacaagaaagcttataccatggcagatgttcttcggacttctgtatatcagatagtttcagcattcatcgatgacctacgagctaatgcaaaaccatccagcttggagaagaactggatcagtgaagggagaaaacctgtatatggttcacaagccgtgttggttcagaagttgattctgtttattgagtaccgtgcagtatgaacttggttcatgtctctcagatccttacctccatatcagatcatacttggtagtcatgggtttttgaacttggttcaagaaccattgatttccaccagagcctatgaagatggatcctaaaattacttctgtattcctttgggctgctgcactgctgaaggcagtgacgctctcggattggataaccattatgcacccaggccttgtttctattctggtttatccactcaggcctttgtttctattctgatttgtagtctggaagttgaatagagttacctgtatgttgtatcatggagagggaatctgaaatacttatgatttttttatatccacttatcagatttatgacaaactgttagtactgcttagctgcacctatttggtggaatttcgtggtgaaaaggttcggggtgatgatctcctggaataggttccagttgttctttcccagtttacccaatagcaatatcagcctagtcttgaaacttcttcc

SEQ ID NO: 40514 - DNA, 4218 bp, Zea Mays
tgcaaccgccaaccgcgacagatcctgcaatactatgccaggaaaaaaaaagttactaaaaaaagagagggttggaaccacagttgtgcacctgtgcttccgctgcgcacggagatgtcctctgtctgtctgtgctgcgtggcatgtgaaccactgaaccctctgcgtgactgcatctcctctgttaagcgcgcatagctagaaatcgctgccaccgtttcccgttcctgctcccttgaatcgcgcagctcgcctcagcccagcccaccgtcctcaagctctctacactacaccctcctctctctcttcacctcaccccaactctctctttacctcctgctcgcttccattctttccttgcagttgcagcgctctttccgtcacacttcactgccatcttttgctccatcgatccatcccactgctgatcaaaggaggcctggactcggacttcgctcaagcctcacggtgatgccgcctttccgtccgcttgatcttttctagctgcctgcctacgcctacgcctacccgcaatggccgggggcttcgagtggagcagctctgcaagcacaaccagaggagtcgagctccagcagtccattgtcgctctcaagaaaggcgcacatctcctgaaatgtgggaagagagggaagcccaaattctgcactgtcaggctgtcttatgatgagagagcactaatatggtactccaaagagaggggaaaacgtttgagcttgaattcagtgtccagtgtagttctcggacagaagactacaaaacttttgcgtctacattggccagaaaaggaatctcactccttgtcaattatatacaagaacggtgaatcctcacttgacttggtctgcaaagatagggatcaagctgaatgctggtacttaggccttacagccgtaatatcagcaccatgcacccctttacttctgattgattcaacaaacagccgtcggataaacagctgcacgaatagccctcctagctatattcagcaaaggagtaggctttttgctgtgcatgatggaagaaatttcccaaaggtaaattcgctatatggcagtcctaggttgatacagaacaagtatctgcgtaacaatttggattgctccgaaccattcttttctccaagacagagagcatggtcagaactagatttctacttggaaaagattagtcccgaattggtagatcgagtaaaaaataatttgagagacataaaatctgcagaaataattaacgaccaaagaattatgcaaatacctaagctcaaacaatctgagggatccaatgcagcagcagattctctgaaggacatttttgtctggggtgatgctctgggtcgtatgtcagatcatggacatgtatcagcaagcaatatatcacttccaaggttattgaaatcgtcagagattcttgatgtgcagagcattgcctgtggagagaaacacgcagcaatagttactaagcagggtcaggtattctcttggggtgaggaaaatggagggagactgggacacaagacaagtgacagtgtctctgaccctaaaatcatcgactcactttcctccacgcctgtgaagactattgcatttggggcaaagttcacctgtgcagtttcagtttcaggagaactttatgagtggggtgaagggattgacagcctagggttcgggaccaatcagtgtcaaagaagcccatggttcccgcataaattgatcagaacttcagatggcatatctgtggcgaagattgcatgtggtcagtggcacacagctatagtatcctccacaggtaagctgttcacatatggacatggagcatttggtgttcttggacatggtgacacacgtagttttgttcagccgaaagaagtggagtccttgagagggttaagagtcaagtccgtcgcatgtggaccatggcacaccgctgctattgtggaaacatcaggaacactcaagagcaatgctcctggtgggaagctgttcacatggggtgacgcaggcggagagaagctgggccatactgacaaaaagtcaaagcttgtaccaactcgtgtcgaatcgctcgttgattgtgattttactcaggtgtcatgtggtatttcattaacagctgtgctaaccataacgggtgttgtatttaccattggaagcaaggaccatgggcaattagggaatcctcgatctgacactgacagcgcatgtatttgtatggttgaagggccacttaagactgagtttgtcaaagatatatcctgcggaagttcccatgtcgcagtcttggcaatgaatggaaaagtgtttacctggggcaaaggcacagaagggcaacttggtttaggggattacgttgacaggagctccccaactctagtggaggccctggaagataaacaagtggacagtatagtttgttcttccaattccactgctgcaatttgcgtgcacggggaaatctcaagcaaggatcaatctgtgtgcagcagttgcaggttggcatttcggtttacaaggaagaagcacaactgctacaactgtggttccatggtctgcaattcttgcagcagcaacaaggttcatagggctgcccttgcaccagacaagagcaaaagatgccgcgtctgtgatgcttgtttcaacgagctgaataaaacagccgagcacggtaaaatgagctgtggatcaaagatccaaaaagaaccgtcttatttagcagaaacaaggacatacacaccaaagttatcacggatgctgaaggaagcaaatttcatcatggagaaaatgggttcctccgcacaaagtcccggccagagaaatcaggaacccgccactccgaatcaaatgcaaaaggaaaggtggggacaggtagaatgccccgatcgattcaaatgcgcaagagacaacattccacatcgtttgacaccaaagaagcagacaattgatgattatcctatgaggagaatggctgatccagtctcacaaaagactgctgcccctttaacacaaactactagtgataggaggaaagaacaagatttgatagaaaagatactgctggaggaggtgaaacagcttcaagcacaggtaaccacgctagcagaagaatgccggcacaggagcctgaaagttcggttgtacaaacggaaacttgaggaaacctggttgatagtgagggacgaggccacgaagtgcgaagctgcagaagagattataaaggttttaacgaatcagaggaacgctttgtcaaacaaacttttagatggtctggaactagatggttccagtatcgtgcctaacccacccgacaaagctcttgccacctgcaaaaccccaccgctaaacagcatcagggatcaacacaacgcagaggcagaggaagttttggatacgcgatccacagcgtcttccaacaccgtcgcggtggatgactcagctgcgcatcagaacggcagatctagagcctccagtagcagcagaggctactacgacgatgggggaacagatagcacagctgctcctactgactccaacggggtcatcgagcaaattgagcgtggtgtgtacattacagtcgttacgtcccccagcggtaagaagggaatcaagcgcatccggttcagccggaagcatttcggggaggccgaggcacagaaatggtgggagcggaatgagagcagggtattcgcgaagtacgacagcgtggaatacctggcagcgtaatctcgataaggaagatgtacaggagtagccagtagttcttttgtctcagtgtctgcctgcatattgttcagtaaagtcgtaggatagatgagatagaagggaccatgatagcttccttttcctagcgaggagataaactgcataataccatgtcctcgttgtggattaacttagggccatagttgactcgataacgattcaattctacacgactgggggtttgtgttcgatgggaacaacaattatatcacacttcgaataattatcattccattagcatcaaatgataatttcagcaccgaacaacatgttatggataaaaattgaaaaatgagaatttatgataataccattaaatccggatggctatgttagatatacattggataacggtatggatactggatatccatacccaccaaaaaaatatcacggatacattattatatccataaccgtacctgcggatactaaattcaac

SEQ ID NO: 40515 - DNA, 4073 bp, Zea Mays
accctctgcgtgactgcatctcctctgttaagcgcgcatagctagaaatcgctgccaccgtttcccgttcctgctcccttgaatcgcgcagctcgcctcagcccagcccaccgtcctcaagctctctacactacaccctcctctctctcttcacctcaccccaactctctctttacctcctgctcgcttccattctttccttgcagttgcagcgctctttccgtcacacttcactgccatcttttgctccatcgatccatcccactgctgatcaaaggaggcctggactcggacttcgctcaagcctcacggtgatgccgcctttccgtccgcttgatcttttctagctgcctgcctacgcctacgcctacccgcaatggccgggggcttcgagtggagcagctctgcaagcacaaccagaggagtcgagctccagcaggatgagagagcactaatatggtactccaaagagaggggaaaacgtttgagcttgaattcagtgtccagtgtagttctcggacagaagactgtatgcaactttccctttccaaacatatgctattggatcttagtagtaacacattatggttggaagacactgattttctgagaattcaatattctgcagacaaaacttttgcgtctacattggccagaaaaggaatctcactccttgtcaattatatacaagaacggtgaatcctcacttgacttggtctgcaaagatagggatcaagctgaatgctggtacttaggccttacagccgtaatatcagcaccatgcacccctttacttctgattgattcaacaaacagccgtcggataaacagctgcacgaatagccctcctagctatattcagcaaaggagtaggctttttgctgtgcatgatggaagaaatttcccaaaggtaaattcgctatatggcagtcctaggttgatacagaacaagtatctgcgtaacaatttggattgctccgaaccattcttttctccaagacagagagcatggtcagaactagatttctacttggaaaagattagtcccgaattggtagatcgagtaaaaaataatttgagagacataaaatctgcagaaataattaacgaccaaagaattatgcaaatacctaagctcaaacaatctgagggatccaatgcagcagcagattctctgaaggacatttttgtctggggtgatgctctgggtcgtatgtcagatcatggacatgtatcagcaagcaatatatcacttccaaggttattgaaatcgtcagagattcttgatgtgcagagcattgcctgtggagagaaacacgcagcaatagttactaagcagggtcaggtattctcttggggtgaggaaaatggagggagactgggacacaagacaagtgacagtgtctctgaccctaaaatcatcgactcactttcctccacgcctgtgaagactattgcatttggggcaaagttcacctgtgcagtttcagtttcaggagaactttatgagtggggtgaagggattgacagcctagggttcgggaccaatcagtgtcaaagaagcccatggttcccgcataaattgatcagaacttcagatggcatatctgtggcgaagattgcatgtggtcagtggcacacagctatagtatcctccacaggtaagctgttcacatatggacatggagcatttggtgttcttggacatggtgacacacgtagttttgttcagccgaaagaagtggagtccttgagagggttaagagtcaagtccgtcgcatgtggaccatggcacaccgctgctattgtggaaacatcaggaacactcaagagcaatgctcctggtgggaagctgttcacatggggtgacgcaggcggagagaagctgggccatactgacaaaaagtcaaagcttgtaccaactcgtgtcgaatcgctcgttgattgtgattttactcaggtgtcatgtggtatttcattaacagctgtgctaaccataacgggtgttgtatttaccattggaagcaaggaccatgggcaattagggaatcctcgatctgacactgacagcgcatgtatttgtatggttgaagggccacttaagactgagtttgtcaaagatatatcctgcggaagttcccatgtcgcagtcttggcaatgaatggaaaagtgtttacctggggcaaaggcacagaagggcaacttggtttaggggattacgttgacaggagctccccaactctagtggaggccctggaagataaacaagtggacagtatagtttgttcttccaattccactgctgcaatttgcgtgcacggggaaatctcaagcaaggatcaatctgtgtgcagcagttgcaggttggcatttcggtttacaaggaagaagcacaactgctacaactgtggttccatggtctgcaattcttgcagcagcaacaaggttcatagggctgcccttgcaccagacaagagcaaaagatgccgcgtctgtgatgcttgtttcaacgagctgaataaaacagccgagcacggtaaaatgagctgtggatcaaagatccaaaaagaaccgtcttatttagcagaaacaaggacatacacaccaaagttatcacggatgctgaaggaagcaaatttcatcatggagaaaatgggttcctccgcacaaagtcccggccagagaaatcaggaacccgccactccgaatcaaatgcaaaaggaaaggtggggacaggtagaatgccccgatcgattcaaatgcgcaagagacaacattccacatcgtttgacaccaaagaagcagacaattgatgattatcctatgaggagaatggctgatccagtctcacaaaagactgctgcccctttaacacaaactactagtgataggaggaaagaacaagatttgatagaaaagatactgctggaggaggtgaaacagcttcaagcacaggtaaccacgctagcagaagaatgccggcacaggagcctgaaagttcggttgtacaaacggaaacttgaggaaacctggttgatagtgagggacgaggccacgaagtgcgaagctgcagaagagattataaaggttttaacgaatcagaggaacgctttgtcaaacaaacttttagatggtctggaactagatggttccagtatcgtgcctaacccacccgacaaagctcttgccacctgcaaaaccccaccgctaaacagcatcagggatcaacacaacgcagaggcagaggaagttttggatacgcgatccacagcgtcttccaacaccgtcgcggtggatgactcagctgcgcatcagaacggcagatctagagcctccagtagcagcagaggctactacgacgatgggggaacagatagcacagctgctcctactgactccaacggggtcatcgagcaaattgagcgtggtgtgtacattacagtcgttacgtcccccagcggtaagaagggaatcaagcgcatccggttcagccggaagcatttcggggaggccgaggcacagaaatggtgggagcggaatgagagcagggtattcgcgaagtacgacagcgtggaatacctggcagcgtaatctcgataaggaagatgtacaggagtagccagtagttcttttgtctcagtgtctgcctgcatattgttcagtaaagtcgtaggatagatgagatagaagggaccatgatagcttccttttcctagcgaggagataaactgcataataccatgtcctcgttgtggattaacttagggccatagttgactcgataacgattcaattctacacgactgggggtttgtgttcgatgggaacaacaattatatcacacttcgaataattatcattccattagcatcaaatgataatttcagcaccgaacaacatgttatggataaaaattgaaaaatgagaatttatgataataccattaaatccggatggctatgttagatatacattggataacggtatggatactggatatccatacccaccaaaaaaatatcacggatacattattatatccataaccgtacctgcggatactaaattcaac

SEQ ID NO: 40516 - DNA, 4079 bp, Zea Mays
accctctgcgtgactgcatctcctctgttaagcgcgcatagctagaaatcgctgccaccgtttcccgttcctgctcccttgaatcgcgcagctcgcctcagcccagcccaccgtcctcaagctctctacactacaccctcctctctctcttcacctcaccccaactctctctttacctcctgctcgcttccattctttccttgcagttgcagcgctctttccgtcacacttcactgccatcttttgctccatcgatccatcccactgctgatcaaaggaggcctggactcggacttcgctcaagcctcacggtgatgccgcctttccgtccgcttgatcttttctagctgcctgcctacgcctacgcctacccgcaatggccgggggcttcgagtggagcagctctgcaagcacaaccagaggagtcgagctccagcagcttgttccttcctaacagtccattgtcgctctcaagaaaggcgcacatctcctgaaatgtgggaagagagggaagcccaaattctgcactgtcaggctgtcttatgatgagagagcactaatatggtactccaaagagaggggaaaacgtttgagcttgaattcagtgtccagtgtagttctcggacagaagactacaaaacttttgcgtctacattggccagaaaaggaatctcactccttgtcaattatatacaagaacggtgaatcctcacttgacttggtctgcaaagatagggatcaagctgaatgctggtacttaggccttacagccgtaatatcagcaccatgcacccctttacttctgattgattcaacaaacagccgtcggataaacagctgcacgaatagccctcctagctatattcagcaaaggagtaggctttttgctgtgcatgatggaagaaatttcccaaaggtaaattcgctatatggcagtcctaggttgatacagaacaagtatctgcgtaacaatttggattgctccgaaccattcttttctccaagacagagagcatggtcagaactagatttctacttggaaaagattagtcccgaattggtagatcgagtaaaaaataatttgagagacataaaatctgcagaaataattaacgaccaaagaattatgcaaatacctaagctcaaacaatctgagggatccaatgcagcagcagattctctgaaggacatttttgtctggggtgatgctctgggtcgtatgtcagatcatggacatgtatcagcaagcaatatatcacttccaaggttattgaaatcgtcagagattcttgatgtgcagagcattgcctgtggagagaaacacgcagcaatagttactaagcagggtcaggtattctcttggggtgaggaaaatggagggagactgggacacaagacaagtgacagtgtctctgaccctaaaatcatcgactcactttcctccacgcctgtgaagactattgcatttggggcaaagttcacctgtgcagtttcagtttcaggagaactttatgagtggggtgaagggattgacagcctagggttcgggaccaatcagtgtcaaagaagcccatggttcccgcataaattgatcagaacttcagatggcatatctgtggcgaagattgcatgtggtcagtggcacacagctatagtatcctccacaggtaagctgttcacatatggacatggagcatttggtgttcttggacatggtgacacacgtagttttgttcagccgaaagaagtggagtccttgagagggttaagagtcaagtccgtcgcatgtggaccatggcacaccgctgctattgtggaaacatcaggaacactcaagagcaatgctcctggtgggaagctgttcacatggggtgacgcaggcggagagaagctgggccatactgacaaaaagtcaaagcttgtaccaactcgtgtcgaatcgctcgttgattgtgattttactcaggtgtcatgtggtatttcattaacagctgtgctaaccataacgggtgttgtatttaccattggaagcaaggaccatgggcaattagggaatcctcgatctgacactgacagcgcatgtatttgtatggttgaagggccacttaagactgagtttgtcaaagatatatcctgcggaagttcccatgtcgcagtcttggcaatgaatggaaaagtgtttacctggggcaaaggcacagaagggcaacttggtttaggggattacgttgacaggagctccccaactctagtggaggccctggaagataaacaagtggacagtatagtttgttcttccaattccactgctgcaatttgcgtgcacggggaaatctcaagcaaggatcaatctgtgtgcagcagttgcaggttggcatttcggtttacaaggaagaagcacaactgctacaactgtggttccatggtctgcaattcttgcagcagcaacaaggttcatagggctgcccttgcaccagacaagagcaaaagatgccgcgtctgtgatgcttgtttcaacgagctgaataaaacagccgagcacggtaaaatgagctgtggatcaaagatccaaaaagaaccgtcttatttagcagaaacaaggacatacacaccaaagttatcacggatgctgaaggaagcaaatttcatcatggagaaaatgggttcctccgcacaaagtcccggccagagaaatcaggaacccgccactccgaatcaaatgcaaaaggaaaggtggggacaggtagaatgccccgatcgattcaaatgcgcaagagacaacattccacatcgtttgacaccaaagaagcagacaattgatgattatcctatgaggagaatggctgatccagtctcacaaaagactgctgcccctttaacacaaactactagtgataggaggaaagaacaagatttgatagaaaagatactgctggaggaggtgaaacagcttcaagcacaggtaaccacgctagcagaagaatgccggcacaggagcctgaaagttcggttgtacaaacggaaacttgaggaaacctggttgatagtgagggacgaggccacgaagtgcgaagctgcagaagagattataaaggttttaacgaatcagaggaacgctttgtcaaacaaacttttagatggtctggaactagatggttccagtatcgtgcctaacccacccgacaaagctcttgccacctgcaaaaccccaccgctaaacagcatcagggatcaacacaacgcagaggcagaggaagttttggatacgcgatccacagcgtcttccaacaccgtcgcggtggatgactcagctgcgcatcagaacggcagatctagagcctccagtagcagcagaggctactacgacgatgggggaacagatagcacagctgctcctactgactccaacggggtcatcgagcaaattgagcgtggtgtgtacattacagtcgttacgtcccccagcggtaagaagggaatcaagcgcatccggttcagccggaagcatttcggggaggccgaggcacagaaatggtgggagcggaatgagagcagggtattcgcgaagtacgacagcgtggaatacctggcagcgtaatctcgataaggaagatgtacaggagtagccagtagttcttttgtctcagtgtctgcctgcatattgttcagtaaagtcgtaggatagatgagatagaagggaccatgatagcttccttttcctagcgaggagataaactgcataataccatgtcctcgttgtggattaacttagggccatagttgactcgataacgattcaattctacacgactgggggtttgtgttcgatgggaacaacaattatatcacacttcgaataattatcattccattagcatcaaatgataatttcagcaccgaacaacatgttatggataaaaattgaaaaatgagaatttatgataataccattaaatccggatggctatgttagatatacattggataacggtatggatactggatatccatacccaccaaaaaaatatcacggatacattattatatccataaccgtacctgcggatactaaattcaac

SEQ ID NO: 40517 - DNA, 4149 bp, Zea Mays
accctctgcgtgactgcatctcctctgttaagcgcgcatagctagaaatcgctgccaccgtttcccgttcctgctcccttgaatcgcgcagctcgcctcagcccagcccaccgtcctcaagctctctacactacaccctcctctctctcttcacctcaccccaactctctctttacctcctgctcgcttccattctttccttgcagttgcagcgctctttccgtcacacttcactgccatcttttgctccatcgatccatcccactgctgatcaaaggaggcctggactcggacttcgctcaagcctcacggtgatgccgcctttccgtccgcttgatcttttctagctgcctgcctacgcctacgcctacccgcaatggccgggggcttcgagtggagcagctctgcaagcacaaccagaggagtcgagctccagcagtccattgtcgctctcaagaaaggcgcacatctcctgaaatgtgggaagagagggaagcccaaattctgcactgtcaggctgtcttatttctgaaggctgaagggcaactacctgactgccaaaggagataggattgatcgctgcaacattgatcttttacaacttttgacacaaggatgagagagcactaatatggtactccaaagagaggggaaaacgtttgagcttgaattcagtgtccagtgtagttctcggacagaagactacaaaacttttgcgtctacattggccagaaaaggaatctcactccttgtcaattatatacaagaacggtgaatcctcacttgacttggtctgcaaagatagggatcaagctgaatgctggtacttaggccttacagccgtaatatcagcaccatgcacccctttacttctgattgattcaacaaacagccgtcggataaacagctgcacgaatagccctcctagctatattcagcaaaggagtaggctttttgctgtgcatgatggaagaaatttcccaaaggtaaattcgctatatggcagtcctaggttgatacagaacaagtatctgcgtaacaatttggattgctccgaaccattcttttctccaagacagagagcatggtcagaactagatttctacttggaaaagattagtcccgaattggtagatcgagtaaaaaataatttgagagacataaaatctgcagaaataattaacgaccaaagaattatgcaaatacctaagctcaaacaatctgagggatccaatgcagcagcagattctctgaaggacatttttgtctggggtgatgctctgggtcgtatgtcagatcatggacatgtatcagcaagcaatatatcacttccaaggttattgaaatcgtcagagattcttgatgtgcagagcattgcctgtggagagaaacacgcagcaatagttactaagcagggtcaggtattctcttggggtgaggaaaatggagggagactgggacacaagacaagtgacagtgtctctgaccctaaaatcatcgactcactttcctccacgcctgtgaagactattgcatttggggcaaagttcacctgtgcagtttcagtttcaggagaactttatgagtggggtgaagggattgacagcctagggttcgggaccaatcagtgtcaaagaagcccatggttcccgcataaattgatcagaacttcagatggcatatctgtggcgaagattgcatgtggtcagtggcacacagctatagtatcctccacaggtaagctgttcacatatggacatggagcatttggtgttcttggacatggtgacacacgtagttttgttcagccgaaagaagtggagtccttgagagggttaagagtcaagtccgtcgcatgtggaccatggcacaccgctgctattgtggaaacatcaggaacactcaagagcaatgctcctggtgggaagctgttcacatggggtgacgcaggcggagagaagctgggccatactgacaaaaagtcaaagcttgtaccaactcgtgtcgaatcgctcgttgattgtgattttactcaggtgtcatgtggtatttcattaacagctgtgctaaccataacgggtgttgtatttaccattggaagcaaggaccatgggcaattagggaatcctcgatctgacactgacagcgcatgtatttgtatggttgaagggccacttaagactgagtttgtcaaagatatatcctgcggaagttcccatgtcgcagtcttggcaatgaatggaaaagtgtttacctggggcaaaggcacagaagggcaacttggtttaggggattacgttgacaggagctccccaactctagtggaggccctggaagataaacaagtggacagtatagtttgttcttccaattccactgctgcaatttgcgtgcacggggaaatctcaagcaaggatcaatctgtgtgcagcagttgcaggttggcatttcggtttacaaggaagaagcacaactgctacaactgtggttccatggtctgcaattcttgcagcagcaacaaggttcatagggctgcccttgcaccagacaagagcaaaagatgccgcgtctgtgatgcttgtttcaacgagctgaataaaacagccgagcacggtaaaatgagctgtggatcaaagatccaaaaagaaccgtcttatttagcagaaacaaggacatacacaccaaagttatcacggatgctgaaggaagcaaatttcatcatggagaaaatgggttcctccgcacaaagtcccggccagagaaatcaggaacccgccactccgaatcaaatgcaaaaggaaaggtggggacaggtagaatgccccgatcgattcaaatgcgcaagagacaacattccacatcgtttgacaccaaagaagcagacaattgatgattatcctatgaggagaatggctgatccagtctcacaaaagactgctgcccctttaacacaaactactagtgataggaggaaagaacaagatttgatagaaaagatactgctggaggaggtgaaacagcttcaagcacaggtaaccacgctagcagaagaatgccggcacaggagcctgaaagttcggttgtacaaacggaaacttgaggaaacctggttgatagtgagggacgaggccacgaagtgcgaagctgcagaagagattataaaggttttaacgaatcagaggaacgctttgtcaaacaaacttttagatggtctggaactagatggttccagtatcgtgcctaacccacccgacaaagctcttgccacctgcaaaaccccaccgctaaacagcatcagggatcaacacaacgcagaggcagaggaagttttggatacgcgatccacagcgtcttccaacaccgtcgcggtggatgactcagctgcgcatcagaacggcagatctagagcctccagtagcagcagaggctactacgacgatgggggaacagatagcacagctgctcctactgactccaacggggtcatcgagcaaattgagcgtggtgtgtacattacagtcgttacgtcccccagcggtaagaagggaatcaagcgcatccggttcagccggaagcatttcggggaggccgaggcacagaaatggtgggagcggaatgagagcagggtattcgcgaagtacgacagcgtggaatacctggcagcgtaatctcgataaggaagatgtacaggagtagccagtagttcttttgtctcagtgtctgcctgcatattgttcagtaaagtcgtaggatagatgagatagaagggaccatgatagcttccttttcctagcgaggagataaactgcataataccatgtcctcgttgtggattaacttagggccatagttgactcgataacgattcaattctacacgactgggggtttgtgttcgatgggaacaacaattatatcacacttcgaataattatcattccattagcatcaaatgataatttcagcaccgaacaacatgttatggataaaaattgaaaaatgagaatttatgataataccattaaatccggatggctatgttagatatacattggataacggtatggatactggatatccatacccaccaaaaaaatatcacggatacattattatatccataaccgtacctgcggatactaaattcaac

SEQ ID NO: 40518 - DNA, 2076 bp, Zea Mays
cggacagtagcaaaagccccccacaaaaccctaccacatcccagcgctggcatctcacggggaggactagtagtatgctcgccgccgcctggaggctgtcgcagcgagccgtcacgtctcctctcctaggcatcgggcgatcccaaatccgaaaccctttctccaccatggcgtctctctcgccggcagccgcctcgccgaagaggctgagggtctactcgtctgccgcggccgacggtgacggcgcggggagcggcaagcgcgtggggacccacaacggaagcttccactgcgatgaggcgctcggctgcttcctcatccgcctcacctcccagttcgccggcgccgacgtcgtccgcacccgcgattcccagatccttgatacattggatgctgttcttgatgttgggggtgtctatgatcccagtcggcatcgctatgatcatcaccagaagggcttcagtgaggtttttggacatggattcaacacaaaacttagcagtgctggacttgtgtacaagcacttcggcaaggagataattgctaaggagcttggggttaatgaggatcatgaagatgttcactgtttgtatctcgcgatatataaaagctttgttgaggcacttgatgcgattgacaatggaatcaatcaatatgacacagatcaaccgccaaagtatgtgaacaatacacacttgtcttcacgcgttggacgctttaatctggactggactgatccagaccagtcacttgagaaggagaatgcggcatttgaacaggcaatggtactagctggaagtgaatttatggagagcgttcgcttccatgttaaatcatggttaccggcaaggtctattgtcctggagtgtttgttatcaaaaggaaacattgatccaagtggagaaatcatggttttggatagattctgcccgtggaaacttcatttatttgagcttgaagaggagctgaagactgatcctctgaccaagtatgtgctgtatcaggtaagtgccttcccttctcagactacagttcagcatgaatttcatgacgcttcttagttcacttgctgttgaaagacaaacatgatgcaatttgtagcagtctacactgtaaccctgaaatgattgtttctcggccactaaaggaaagaagaattttgtgtatttttttctggttgctgaccgttcatgtacactctttttaagtgcacactttttttacttgttactgagttccccagcattttgtattttctgatctcgtaagcttcatattcaagcaaggtaacacctcctttgttatttcagaaccgatagaattttaaattgcttccgtagccttatttacttttgcttctcaaaacccaatatcattgctacatgcatttgattttcagtgcttaattgcaggatgagaggagcaagagttggcgagtccaagcagtcgcagttgctcctgacaggttcgagagccgaaaggctctgccagagaagtggaggggcatgagagacgacgaactttcagcagaaaccggcatccctggctgtgtgtttgtccacatgagtggcttcattgggggcaacaagacctacgagggagcattggaaatggcgagagctgctctgaaattctgattcaaccaaagcatattacccgtgttaccattatatcagtaaacacatcagtaacacatgatgcagttgcgctttctccaatgttatcgttgactcgagccgtggttaactgcgactgattcttgcactgatcttctgttatcctcgtcttacagaagaggtcgattgacccttttcattctttcgtgggatctggtattgtttagaatgtgacggtttatctgaaaaaaaatgatggaactttttgtcctcaagcatgttctccgttttggagtattcatctgtggcccggcacagccacggtggttttgtgtgtgcatggagagacaggcagacgaaaacgaatgcaaagaaagcttgtggggatcaggtagttttaccctctaaacgactgtacttgaattataatttcagtgtcgatgtgagcatgatttccaac

SEQ ID NO: 40519 - DNA, 1427 bp, Zea Mays
cggacagtagcaaaagccccccacaaaaccctaccacatcccagcgctggcatctcacggggaggactagtagtatgctcgccgccgcctggaggctgtcgcagcgagccgtcacgtctcctctcctaggcatcgggcgatcccaaatccgaaaccctttctccaccatggcgtctctctcgccggcagccgcctcgccgaagaggctgagggtctactcgtctgccgcggccgacggtgacggcgcggggagcggcaagcgcgtggggacccacaacggaagcttccactgcgatgaggcgctcggctgcttcctcatccgcctcacctcccagttcgccggcgccgacgtcgtccgcacccgcgattcccagcacttcggcaaggagataattgctaaggagcttggggttaatgaggatcatgaagatgttcactatcaaccgccaaagtatgtgaacaatacacacttgtcttcacgcgttggacgctttaatctggactggactgatccagaccagtcacttgagaaggagaatgcggcatttgaacaggcaatggtactagctggaagtgaatttatggagagcgttcgcttccatgttaaatcatggttaccggcaaggtctattgtcctggagtgtttgttatcaaaaggaaacattgatccaagtggagaaatcatggttttggatagattctgcccgtggaaacttcatttatttgagcttgaagaggagctgaagactgatcctctgaccaagatgagaggagcaagagttggcgagtccaagcagtcgcagttgctcctgacaggttcgagagccgaaaggctctgccagagaagtggaggggcatgagagacgacgaactttcagcagaaaccggcatccctggctgtgtgtttgtccacatgagtggcttcattgggggcaacaagacctacgagggagcattggaaatggcgagagctgctctgaaattctgattcaaccaaagcatattacccgtgttaccattatatcagtaaacacatcagtaacacatgatgcagttgcgctttctccaatgttatcgttgactcgagccgtggttaactgcgactgattcttgcactgatcttctgttatcctcgtcttacagaagaggtcgattgacccttttcattctttcgtgggatctggtattgtttagaatgtgacggtttatctgaaaaaaaatgatggaactttttgtcctcaagcatgttctccgttttggagtattcatctgtggcccggcacagccacggtggttttgtgtgtgcatggagagacaggcagacgaaaacgaatgcaaagaaagcttgtggggatcaggtagttttaccctctaaacgactgtacttgaattataatttcagtgtcgatgtgagcatgatttccaac

SEQ ID NO: 40520 - DNA, 2023 bp, Zea Mays
cggacagtagcaaaagccccccacaaaaccctaccacatcccagcgctggcatctcacggggaggactagtagtatgctcgccgccgcctggaggctgtcgcagcgagccgtcacgtctcctctcctaggcatcgggcgatcccaaatccgaaaccctttctccaccatggcgtctctctcgccggcagccgcctcgccgaagaggctgagggtctactcgtctgccgcggccgacggtgacggcgcggggagcggcaagcgcgtggggacccacaacggaagcttccactgcgatgaggcgctcggctgcttcctcatccgcctcacctcccagttcgccggcgccgacgtcgtccgcacccgcgattcccagtcggcatcgctatgatcatcaccagaagggcttcagtgaggtttttggacatggattcaacacaaaacttagcagtgctggacttgtgtacaagcacttcggcaaggagataattgctaaggagcttggggttaatgaggatcatgaagatgttcactgtttgtatctcgcgatatataaaagctttgttgaggcacttgatgcgattgacaatggaatcaatcaatatgacacagatcaaccgccaaagtatgtgaacaatacacacttgtcttcacgcgttggacgctttaatctggactggactgatccagaccagtcacttgagaaggagaatgcggcatttgaacaggcaatggtactagctggaagtgaatttatggagagcgttcgcttccatgttaaatcatggttaccggcaaggtctattgtcctggagtgtttgttatcaaaaggaaacattgatccaagtggagaaatcatggttttggatagattctgcccgtggaaacttcatttatttgagcttgaagaggagctgaagactgatcctctgaccaagtatgtgctgtatcaggtaagtgccttcccttctcagactacagttcagcatgaatttcatgacgcttcttagttcacttgctgttgaaagacaaacatgatgcaatttgtagcagtctacactgtaaccctgaaatgattgtttctcggccactaaaggaaagaagaattttgtgtatttttttctggttgctgaccgttcatgtacactctttttaagtgcacactttttttacttgttactgagttccccagcattttgtattttctgatctcgtaagcttcatattcaagcaaggtaacacctcctttgttatttcagaaccgatagaattttaaattgcttccgtagccttatttacttttgcttctcaaaacccaatatcattgctacatgcatttgattttcagtgcttaattgcaggatgagaggagcaagagttggcgagtccaagcagtcgcagttgctcctgacaggttcgagagccgaaaggctctgccagagaagtggaggggcatgagagacgacgaactttcagcagaaaccggcatccctggctgtgtgtttgtccacatgagtggcttcattgggggcaacaagacctacgagggagcattggaaatggcgagagctgctctgaaattctgattcaaccaaagcatattacccgtgttaccattatatcagtaaacacatcagtaacacatgatgcagttgcgctttctccaatgttatcgttgactcgagccgtggttaactgcgactgattcttgcactgatcttctgttatcctcgtcttacagaagaggtcgattgacccttttcattctttcgtgggatctggtattgtttagaatgtgacggtttatctgaaaaaaaatgatggaactttttgtcctcaagcatgttctccgttttggagtattcatctgtggcccggcacagccacggtggttttgtgtgtgcatggagagacaggcagacgaaaacgaatgcaaagaaagcttgtggggatcaggtagttttaccctctaaacgactgtacttgaattataatttcagtgtcgatgtgagcatgatttccaac

SEQ ID NO: 40521 - DNA, 2368 bp, Zea Mays
gacggttgcactgaagaactcgctcggtgacagcgtctcgtctttaagccatcgcctctgcgtcaggccgtcgctgaccgcccccgcccgcgaccgctgaggcgctgacgcctacctgcaatggcgaagccctcgcgccagaacctgacccatgcctccgtcacatccctgcgccgcttcggcggacagtcgtcgctgccgccttcgggcgcgtcgccggcgttacggctcgcggcggcggcgctcctcctcgcggccgcagtggcgctgccctgcgccgtgctataccgcgccaccgtggagactatggagcccatccacgtcccgcgtgtgcacaggcccttattgcctgcgccgccgcttcctccggttcaggtccccgaggatgacagcgacttcgatcccttccccacaggcgatctggacagcgaagatctcaaactagaactggttctgcaggaggcttccatggacaataagaccataatattgacgaccctcaacgctgcatgggcttcaccgggctcagttatagatcttttcattgatagttttcggcgtggtgttggtactagttcactcttgaggcatcttgtgatagtagcatttgattttaaggcatatgaacactgtgtcaagatccatccctactgttatgctcttccaaccaaggatgttgatttttctgaagagaagaggtttcagacaactgggtatctggaaatgatgtggaaaaggcttgatttcttgcggctagtgcttgaaaaaggatgctgatatcgtgtggttccgcaatccatttccccacttctatactgatggagactttcagattgcatgtgatcactacgtagggaatgcaactgacttgaggaacatagccaatggagggttcaactatgtgaagtcaaacgaccaaagcatagagttctacaagttttggtattcttcccgatttagatatcctgggtaccatgatcaggatgtatttaattttataaagcatgatcgttacactacggacattggtctgacaattaagttcttaagtactacctacttcggcggcatatgtgagccaagcagagatttaaacaaagtttgcaccatgcatgcaaactgttgtattggactgcagagcaaaattcatgacctaagaatcatgatggaagactggagtaactatatgtcgatgccaccgagcttaaaacaattcagggcactgtcgtggagagtaccacaaaattgcagtctttcgttactaagcctgtgaggattgtgaagtggctcatcaggacaagcaattcaatactgtaaaacatgtaaactttcgaacatatgcttttggaagaaacatttcaaaggaacagacatcaagtattaactctgccaattcgatggcattagctaatggtgccaattacgtgccattacctacctggatcagcaggggccactcacgcattgttgagaaggatttcaaggtttcagactggaggggatcaagggtgttagggaggaaccatctctgaggattttgtctgcacagctaggaaggatgaactgcagtgacgaggatgagaataggtgtgtcacaagaggcaagaatcagaccaccaggagtggatgcacagtgaagtcatcccaggcaaaaaggcccacccggaacttcaatatcaaagttgaccacacaatcggcatgatgaggaagacccacctcaggaatcttgcagtagtcccgtgcactgagctgtagcgacatgacgttgtcacgcagaatggagcaagcgagtgcagagtggccacttgacgtcgtcacgcagaagactgttgcagtcctctggagccattttccaggcgagcagagcagtggttttctcgtactgattgtctgagaaagaagtggatacgccaaaagcgcagttgctcaacttactcgaattactgaagtgggctaactaatcgacgtcggctatagaaagagaggggagggggggaggggaaagaaaggctaatcgacttccccagtcaggctttgtttagcggatcctgtgggttggagcctgaattgctatcacctttgttttcagcgcaggctgccctgccccgcccgtcccatcgcggagatctctgtggatatatacgatacgatgatgtcgtccgtgccatgattcaccttggcaatcgcacggtgcggcggtcgtgatccaggagaaaaaaggcaaaggcgttgttttaaagacaagagacacgaggcactggtactaacgatagggttccgattggatttccggaggtaatggaatggctgtgccgcttgtgcgcctcacactcgccccacctttgttaaagacagaagaagacggtt

SEQ ID NO: 40522 - DNA, 2523 bp, Zea Mays
ctcgtctttaagccatcgcctctgcgtcaggccgtcgctgaccgcccccgcccgcgaccgctgaggcgctgacgcctacctgcaatggcgaagccctcgcgccagaacctgacccatgcctccgtcacatccctgcgccgcttcggcggacagtcgtcgctgccgccttcgggcgcgtcgccggcgttacggctcgcggcggcggcgctcctcctcgcggccgcagtggcgctgccctgcgccgtgctataccgcgccaccgtggagactatggagcccatccacgtcccgcgtgtgcacaggcccttattgcctgcgccgccgcttcctccggttcaggtccccgaggatgacagcgacttcgatcccttccccacaggcgatctggacagcgaagatctcaaactagaactggttctgcaggaggcttccatggacaataagaccataatattgacgaccctcaacgctgcatgggcttcaccgggctcagttatagatcttttcattgatagttttcggcgtggtgttggtactagttcactcttgaggcatcttgtgatagtagcatttgattttaaggcatatgaacactgtgtcaagatccatccctactgttatgctcttccaaccaaggatgttgatttttctgaagagaagaggtttcagacaactgggtatctggaaatgatgtggaaaaggcttgatttcttgcggctagtgcttgaaaaaggttacagctttgttttctcggatgctgatatcgtgtggttccgcaatccatttccccacttctatactgatggagactttcagattgcatgtgatcactacgtagggaatgcaactgacttgaggaacatagccaatggagggttcaactatgtgaagtcaaacgaccaaagcatagagttctacaagttttggtattcttcccgatttagatatcctgggtaccatgatcaggatgtatttaattttataaagcatgatcgttacactacggacattggtctgacaattaagttcttaagtactacctacttcggcggcatatgtgagccaagcagagatttaaacaaagtttgcaccatgcatgcaaactgttgtattggactgcagagcaaaattcatgacctaagaatcatgatggaagactggagtaactatatgtcgatgccaccgagcttaaaacaattcagggcactgtcgtggagagtaccacaaaattgcagtctttcgttactaagcctgtgaggattgtgaagtggctcatcaggacaagcaattcaatactgtaaaacatgtaaactttcgaacatatgcttttggaagaaacatttcaaaggaacagacatcaagtattaactctgccaattcgatggcattagctaatggtgccaattacgtgccattacctacctggatcagcaggggccactcacgcattgttgagaaggatttcaaggtttcagactggaggggatcaagggtgttagggaggaaccatctctgaggattttgtctgcacagctaggaaggatgaactgcagtgacgaggatgagaataggtgtgtcacaagaggcaagaatcagaccaccaggagtggatgcacagtgaagtcatcccaggcaaaaaggcccacccggaacttcaatatcaaagttgaccacacaatcggttggttcggtaaatctgtagaacacacttgatagaaaattcgtttgggtccacatcacctaagcgcacactttaaacacacagcaaaggaccaaccactcctagctagtaatgtcatcggcacccagtgtgtgctagttttacatagtgtgaataactgaatgtttccaggcatgatgaggaagacccacctcaggaatcttgcagtagtcccgtgcactgagctgtagcgacatgacgttgtcacgcagaatggagcaagcgagtgcagagtggccacttgacgtcgtcacgcagaagactgttgcagtcctctggagccattttccaggcgagcagagcagtggttttctcgtactgattgtctgagaaagaagtggatacgccaaaagcgcagttgctcaacttactcgaattactgaagtgggctaactaatcgacgtcggctatagaaagagaggggagggggggaggggaaagaaaggctaatcgacttccccagtcaggctttgtttagcggatcctgtgggttggagcctgaattgctatcacctttgttttcagcgcaggctgccctgccccgcccgtcccatcgcggagatctctgtggatatatacgatacgatgatgtcgtccgtgccatgattcaccttggcaatcgcacggtgcggcggtcgtgatccaggagaaaaaaggcaaaggcgttgttttaaagacaagagacacgaggcactggtactaacgatagggttccgattggatttccggaggtaatggaatggctgtgccgcttgtgcgcctcacactcgccccacctttgttaaagacagaagaagacggtt

SEQ ID NO: 40523 - DNA, 2429 bp, Zea Mays
atggcgaagccctcgcgccagaacctgacccatgcctccgtcacatccctgcgccgcttcggcggacagtcgtcgctgccgccttcgggcgcgtcgccggcgttacggctcgcggcggcggcgctcctcctcgcggccgcagtggcgctgccctgcgccgtgctataccgcgccaccgtggagactatggagcccatccacgtcccgcgtgtgcacaggcccttattgcctgcgccgccgcttcctccggttcaggtccccgaggatgacagcgacttcgatcccttccccacaggcgatctgatctcaaactagaactggttctgcaggaggcttccatggacaataagaccataatattgacgaccctcaacgctgcatgggcttcaccgggctcagttatagatcttttcattgatagttttcggcgtggtgttggtactagttcactcttgaggcatcttgtgatagtagcatttgattttaaggcatatgaacactgtgtcaagatccatccctactgttatgctcttccaaccaaggatgttgatttttctgaagagaagaggtttcagacaactgggtatctggaaatgatgtggaaaaggcttgatttcttgcggctagtgcttgaaaaaggttacagctttgttttctcggatgctgatatcgtgtggttccgcaatccatttccccacttctatactgatggagactttcagattgcatgtgatcactacgtagggaatgcaactgacttgaggaacatagccaatggagggttcaactatgtgaagtcaaacgaccaaagcatagagttctacaagttttggtattcttcccgatttagatatcctgggtaccatgatcaggatgtatttaattttataaagcatgatcgttacactacggacattggtctgacaattaagttcttaagtactacctacttcggcggcatatgtgagccaagcagagatttaaacaaagtttgcaccatgcatgcaaactgttgtattggactgcagagcaaaattcatgacctaagaatcatgatggaagactggagtaactatatgtcgatgccaccgagcttaaaacaattcagggcactgtcgtggagagtaccacaaaattgcagtctttcgttactaagcctgtgaggattgtgaagtggctcatcaggacaagcaattcaatactgtaaaacatgtaaactttcgaacatatgcttttggaagaaacatttcaaaggaacagacatcaagtattaactctgccaattcgatggcattagctaatggtgccaattacgtgccattacctacctggatcagcaggggccactcacgcattgttgagaaggatttcaaggtttcagactggaggggatcaagggtgttagggaggaaccatctctgaggattttgtctgcacagctaggaaggatgaactgcagtgacgaggatgagaataggtgtgtcacaagaggcaagaatcagaccaccaggagtggatgcacagtgaagtcatcccaggcaaaaaggcccacccggaacttcaatatcaaagttgaccacacaatcggttggttcggtaaatctgtagaacacacttgatagaaaattcgtttgggtccacatcacctaagcgcacactttaaacacacagcaaaggaccaaccactcctagctagtaatgtcatcggcacccagtgtgtgctagttttacatagtgtgaataactgaatgtttccaggcatgatgaggaagacccacctcaggaatcttgcagtagtcccgtgcactgagctgtagcgacatgacgttgtcacgcagaatggagcaagcgagtgcagagtggccacttgacgtcgtcacgcagaagactgttgcagtcctctggagccattttccaggcgagcagagcagtggttttctcgtactgattgtctgagaaagaagtggatacgccaaaagcgcagttgctcaacttactcgaattactgaagtgggctaactaatcgacgtcggctatagaaagagaggggagggggggaggggaaagaaaggctaatcgacttccccagtcaggctttgtttagcggatcctgtgggttggagcctgaattgctatcacctttgttttcagcgcaggctgccctgccccgcccgtcccatcgcggagatctctgtggatatatacgatacgatgatgtcgtccgtgccatgattcaccttggcaatcgcacggtgcggcggtcgtgatccaggagaaaaaaggcaaaggcgttgttttaaagacaagagacacgaggcactggtactaacgatagggttccgattggatttccggaggtaatggaatggctgtgccgcttgtgcgcctcacactcgccccacctttgttaaagacagaagaagacggtt

SEQ ID NO: 40524 - DNA, 2414 bp, Zea Mays
atggcgaagccctcgcgccagaacctgacccatgcctccgtcacatccctgcgccgcttcggcggacagtcgtcgctgccgccttcgggcgcgtcgccggcgttacggctcgcggcggcggcgctcctcctcgcggccgcagtggcgctgccctgcgccgtgctataccgcgccaccgtggagactatggagcccatccacgtcccgcgtgtgcacaggcccttattgcctgcgccgccgcttcctccggttcaggtccccgaggatgacagcgacttcgatcccttccccacaggcgatctgcgaagatctcaaactagaactggttctgcaggaggcttccatggacaataagaccataatattgacgaccctcaacgctgcatgggcttcaccgggctcagttatagatcttttcattgatagttttcggcgtggtgttggtactagttcactcttgaggcatcttgtgatagtagcatttgattttaaggcatatgaacactgtgtcaagatccatccctactgttatgctcttccaaccaaggatgttgatttttctgaagagaagaggtttcagacaactgggtatctggaaatgatgtggaaaaggcttgatttcttgcggctagtgcttgaaaaaggatgctgatatcgtgtggttccgcaatccatttccccacttctatactgatggagactttcagattgcatgtgatcactacgtagggaatgcaactgacttgaggaacatagccaatggagggttcaactatgtgaagtcaaacgaccaaagcatagagttctacaagttttggtattcttcccgatttagatatcctgggtaccatgatcaggatgtatttaattttataaagcatgatcgttacactacggacattggtctgacaattaagttcttaagtactacctacttcggcggcatatgtgagccaagcagagatttaaacaaagtttgcaccatgcatgcaaactgttgtattggactgcagagcaaaattcatgacctaagaatcatgatggaagactggagtaactatatgtcgatgccaccgagcttaaaacaattcagggcactgtcgtggagagtaccacaaaattgcagtctttcgttactaagcctgtgaggattgtgaagtggctcatcaggacaagcaattcaatactgtaaaacatgtaaactttcgaacatatgcttttggaagaaacatttcaaaggaacagacatcaagtattaactctgccaattcgatggcattagctaatggtgccaattacgtgccattacctacctggatcagcaggggccactcacgcattgttgagaaggatttcaaggtttcagactggaggggatcaagggtgttagggaggaaccatctctgaggattttgtctgcacagctaggaaggatgaactgcagtgacgaggatgagaataggtgtgtcacaagaggcaagaatcagaccaccaggagtggatgcacagtgaagtcatcccaggcaaaaaggcccacccggaacttcaatatcaaagttgaccacacaatcggttggttcggtaaatctgtagaacacacttgatagaaaattcgtttgggtccacatcacctaagcgcacactttaaacacacagcaaaggaccaaccactcctagctagtaatgtcatcggcacccagtgtgtgctagttttacatagtgtgaataactgaatgtttccaggcatgatgaggaagacccacctcaggaatcttgcagtagtcccgtgcactgagctgtagcgacatgacgttgtcacgcagaatggagcaagcgagtgcagagtggccacttgacgtcgtcacgcagaagactgttgcagtcctctggagccattttccaggcgagcagagcagtggttttctcgtactgattgtctgagaaagaagtggatacgccaaaagcgcagttgctcaacttactcgaattactgaagtgggctaactaatcgacgtcggctatagaaagagaggggagggggggaggggaaagaaaggctaatcgacttccccagtcaggctttgtttagcggatcctgtgggttggagcctgaattgctatcacctttgttttcagcgcaggctgccctgccccgcccgtcccatcgcggagatctctgtggatatatacgatacgatgatgtcgtccgtgccatgattcaccttggcaatcgcacggtgcggcggtcgtgatccaggagaaaaaaggcaaaggcgttgttttaaagacaagagacacgaggcactggtactaacgatagggttccgattggatttccggaggtaatggaatggctgtgccgcttgtgcgcctcacactcgccccacctttgttaaagacagaagaagacggtt

SEQ ID NO: 40525 - DNA, 2206 bp, Zea Mays
atggcgaagccctcgcgccagaacctgacccatgcctccgtcacatccctgcgccgcttcggcggacagtcgtcgctgccgccttcgggcgcgtcgccggcgttacggctcgcggcggcggcgctcctcctcgcggccgcagtggcgctgccctgcgccgtgctataccgcgccaccgtggagactatggagcccatccacgtcccgcgtgtgcacaggcccttattgcctgcgccgccgcttcctccggttcaggtccccgaggatgacagcgacttcgatcccttccccacaggcgatctggacagcgaagatctcaaactagaactggttctgcaggaggcttccatggacaataagaccataatattgacgaccctcaacgctgcatgggcttcaccgggctcagttatagatcttttcattgatagttttcggcgtggtgttggtactagttcactcttgaggcatcttgtgatagtagcatttgattttaaggcatatgaacactgtgtcaagatccatccctactgttatgctcttccaaccaaggatgttgatttttctgaagagaagaggtttcagacaactgggtatctggaaatgatgtggaaaaggcttgatttcttgcggctagtgcttgaaaaaggatgctgatatcgtgtggttccgcaatccatttccccacttctatactgatggagactttcagattgcatgtgatcactacgtagggaatgcaactgacttgaggaacatagccaatggagggttcaactatgtgaagtcaaacgaccaaagcatagagttctacaagttttggtattcttcccgatttagatatcctgggtaccatgatcaggatgtatttaattttataaagcatgatcgttacactacggacattggtctgacaattaagttcttaagtactacctacttcggcggcatatgtgagccaagcagagatttaaacaaagtttgcaccatgcatgcaaactgttgtattggactgcagagcaaaattcatgacctaagaatcatgatggaagactggagtaactatatgtcgatgccaccgagcttaaaacaattcagggcactgtcgtggagagtaccacaaaattgcagtctttcgttactaagcctgtgaggattgtgaagtggctcatcaggacaagcaattcaatactgtaaaacatgaacagacatcaagtattaactctgccaattcgatggcattagctaatggtgccaattacgtgccattacctacctggatcagcaggggccactcacgcattgttgagaaggatttcaaggtttcagactggaggggatcaagggtgttagggaggaaccatctctgaggattttgtctgcacagctaggaaggatgaactgcagtgacgaggatgagaataggtgtgtcacaagaggcaagaatcagaccaccaggagtggatgcacagtgaagtcatcccaggcaaaaaggcccacccggaacttcaatatcaaagttgaccacacaatcggcatgatgaggaagacccacctcaggaatcttgcagtagtcccgtgcactgagctgtagcgacatgacgttgtcacgcagaatggagcaagcgagtgcagagtggccacttgacgtcgtcacgcagaagactgttgcagtcctctggagccattttccaggcgagcagagcagtggttttctcgtactgattgtctgagaaagaagtggatacgccaaaagcgcagttgctcaacttactcgaattactgaagtgggctaactaatcgacgtcggctatagaaagagaggggagggggggaggggaaagaaaggctaatcgacttccccagtcaggctttgtttagcggatcctgtgggttggagcctgaattgctatcacctttgttttcagcgcaggctgccctgccccgcccgtcccatcgcggagatctctgtggatatatacgatacgatgatgtcgtccgtgccatgattcaccttggcaatcgcacggtgcggcggtcgtgatccaggagaaaaaaggcaaaggcgttgttttaaagacaagagacacgaggcactggtactaacgatagggttccgattggatttccggaggtaatggaatggctgtgccgcttgtgcgcctcacactcgccccacctttgttaaagacagaagaagacggtt

SEQ ID NO: 40526 - DNA, 3299 bp, Zea Mays
tttttttggagaaggccggagtcgggtttggatggtcaactccggcatactgccgaaaacaaaccaatccgtcaccgtcaaggccccgcaccgctggccgcacgcaggaaaaataagttgcgaccgcgagcgggcgaatcagaaagggcgtccggccttggtcagacacgacagcgacgcggaaaggctgcgcccgcggtgccatctacaagggtccacgtccatccaaaaagagcggtgccctggacttctccctcgtgttcctacttcctacgcgaaggaagccaggcagcccactcgcatcggatcgcgcgcggggagcggcatggccggcgacgacggcagcggcgggagcggaggcggcaacagggaggacgaggtccacgtgcagatcgcaggatcatccaaacctgaaacctcatctaccaacgaaacagctcctcaaaactctcataccaagcattggcattggtggctgatggtaactctgaacattttcttcctcgttgctggtcagacagcatcgacactccttggcaggttctactacaaccaaggtggaaatagcaagtggatgtccacatttgtccaaaccgctggctttccagtgctgttcgtcgccctatatctgttccgttcaaaatcgccttctacacaaacaaccaccagtaaccctgagacttctgtcaccaaaattactcttatatatgttgtcttgggcctcatcattgctgccgatgacttgatgtattcctatggcctgttgtaccttcctgtatcaacatattcgctcatttgcgctagtcagctggccttcaatgctgtcttctcatatgtcctaaatgctcaaaagttcaccccattcattttcaactcagtaattctccttaccttttccgctgcgcttcttggagttgacgaagattctcagggtaccaatggtttatcgcgtgggaagtacatattgggtttcgcattgaccctaggagcctcggccacatactcactaattctctctctaatgcaagtcgcattcgagaaggttattaagaaggaaactttctcagtcgtgttgaatatgcagatatatacagcactagtggcaacagtagcttctcttatcggtttatttgcaagcggcgagtggaagactttagagggagagatgcatgccttcagctcagggagggtgtcctatgtgatgacacttctatggactgctgtatcttggcagatagcttccgtaggagtggtgggtttgatctttgttgtgtcatcactcttttcaaatgtgataagcacactggctctacccatcattccgatttttgctgtgattttcttccacgacaagatggatggagtgaagattattgctatgttgatggccatctggggattcgtttcatatggatatcaattatatgtcagtgacaagaaggctaggaagacttcagtcagtgtggaggagaattcctaagcgcttgttggcctgttacattggtctttgtggctcctataccactttaagttgctggtattgaggaggtactagttattgacttattgtatccaaaaggagctcagttgagaatctcaggtttacacaattcataggtatatacttctgttagtattgtcatatcatcatatgtaccgatgtacggttgtgttgtcctttaaaataaaaagattagcatttccagaggcatgctctctagatttctaattgccttaaatattttcttgcctttgttttgtttttttttttttgctattaactgtgatttgtgattctatggtttgacatatagtatttctaggtggtgtgcatgctgatcctgcttattctactatgaattaaatgcagtataggtccattaacttttgcatgcgagcttcttggtgaaagccctgcgtggtttggttttgataactgagtgacagttagtaaaggttttttgtgtaccacattttcttagtgttcttcactccaaatttgataggcgaggctcgatcttattcagttgcttggctttccttgttataacgcctcagctaatctggctttgtttccttatgcataccttctgtaatctaacaccaaaccacagatgttgcatgtccattctccatggttgattggccttgcggaatgcagctgctacggaacaaccttttacttccaattggttatgaatacgagctcgaagcgtactgtcatccctcgaccatttcgtaattgcgcaagggatcagtaattcagggataaaagtagcagcacagaccacacccagtactacgtgatttattcttttcttttgatttgctagttgcacttcacacaggtgggacccagtactaagtgatttatcctttgatttgctaattgcacttcacaccgatggtgccttaaaaaaaagttctgatctccttgtcgctgctactgccttcttggttctcatctctctttacttgttgcgtgatgcctacctgtctcggtgtctcgttgacatatatgtatgtgattctagtctacaaacgaacctgcacaagtggcctccgttcaatacagcataataaaaaccttaggcacattaggtctatttatttttctggctgtcctttctggtgagggaatacacttgcaggctcggcgagggccttcggataagagcataagacaagttcgttattcttctcttctcagtttacagaggtacagcttgactcaatgcttcaggtttaacttgctctgaaattatctatgcctttttttacataagaagttaatatgattcgttgtctgtgcaacagattaactagctgcattgttaacttttagtgccatgtatatttttctctacggctagaaccatctcatacgcattatttacatcgacacatcaacatgtatgcaattatttctattgcacagatgtgcgtacattgtagtagtacgacatgctgtgaaagtagataacaagtactccctccatttttcttattcgatgttttgtagttcagttttgcactatttagcgtcaaattaaaaagggtggaggtagtactgtgtatccaagtgaccatgaggatgacagatggacggctaacaagcaatgaagaaggaactgtatcttgttcaggaagacattgcttcaaagattgtaatactcgaaatgcaatcatcatgagctttcgcctccatttctgcagtctaaggctgtctccagcaacgtcctttatattcattctctatatccgtcttttacagtatactctaaaagattttatcctct

SEQ ID NO: 40527 - DNA, 2238 bp, Zea Mays
tatttttgttcttcgttaatgtgctcatcgggttttccattctcctcattaaccaattcatcctcctcttgtctgcccgcagcctcctcactgaattcttgattgtccacggcttcttcctcctccagcttcttgagagccatatagtcagcttcatcttctgcttgtctaatagctgcttcaacatctgcaattgacagagccagatcaacatcatttgaaactcctgaggttgtagagcaattcttctcctgatcttctgcatgaagagatgtgtgcccggaaaagaattccataggatcaagtttcttgaagaattccgtattgtagctacctcgttgtatcactaaatcatcaagagctcgtttctgatttgctttcttgagaatgttctcctctatagtgctttcactaatgagtctatatatgtgaacttcacgagtctgaccaatcctgtggcatctgtcctgtgcttgttggtccattgcagggttccagtcactgtcatagaagatgacagtgtctgcacctacaaggttgattcccacaccaccacttcgagtggacaaaatgaaaaggaagaactttggatttgtgttgaacctctgcatcagagtctgcctctcttctgggggagtagaaccatctaaacgtaaatatgtatatccatatagatttatgaactcttccaagacatcaagcatcttagtcatctgagtaaatatcaaggccctgtgcccttctgacttcaagcgccttaacagaatagcaagttcctgcaacttcccacaatcaaactggatcaaacgcctatcaggaaagtagacttgacgtcgaacaatagcagaccttataggagacaggatgggagaaaactcgttcatgcatttttctctatatgctggatcaataaaaacaggagagtttcctttgctgtaccagcaaacagggggaggagctcgagcagcaggaattgcgaatgtaaatgattcaacaatatcaagcattttctgaaagcgttccacagatggaagaacaagatctgcaaggcttgatgaatagtccatgtggcacaaagggttgttcctcttatcaagaatatttgatacatgatgctttacagtcaaaacatgtatcatgtttgtgccatagacaggcctcttttggcatctaactctattccaccatgcaatggaagctgccctttctctggattcctttattctctcctcctgtagtgctttctgaatatcttcaaaaatgtttgtcaaattacttccctgacgatccttattagagcaaaaagtatcaaggtcatggttccaggaagtggtactcaaaggaaaggcagaaatgacctcatcagcttcccaggaactcatgctaaattcattttgcgtaaacactaaattcatatcagacagtcccacctgagaaaatggactcttatcaaggagcatgcagactgaatagctgagctgcatgttaatcccagccatgtcaaatgagcttattattggccgaccttcaaaaagatctggatggttacagacctttctaagttgcataatgatgcttatcatgccaaaataattcccacttgccagtgttgcttgagtctctgagctagcaataaaatcttcatacaagtttctttgccttctagaaagtcggcaatatatgacatgctcttgcttctttggtaactgtttctcaacatctcttttcagtcgacgcagtataaatggacgaaggacattgtgcaaccgatctataatttctttgtttactttatcttgaccttccaccatcccagaaattggattgcagaaccaatccttgaactcttgatgagactgaaacacatgaggcatcagaaaatgcatgagggaccaaagttccataaggtcattttgcagtggagttccagtcagaagaatacgtctctttgaattaaagttgagcaaagtctgccaacgttgtgatttccagttctttatcagatgagcctcatcaagaataagatacttccacttctttctcttaaacactttagagtcctgtatgacaagcctatatgttgtgatgcaaacatggaagaaatttggtttcatccagccctgacgcttctgctttctctcctttgcgcttccgaaataagtcagtattttaaaagcaggacaccacttaagaaattcagtctcccaatttagcataacactagtcggcacgacaata

SEQ ID NO: 40528 - DNA, 3694 bp, Zea Mays
atgtcatcagaaaatgcagctacaccttctgaaactgaagcagctagagcgaatctcctaaaaagaaattcagatgatgttggatgggaatatggtgttcttgttgatgctaacaacaaagacaaggtgaagtgtaagttctgtgacaaggagatgaggggagggatttataggttgaaggaacatcttgcccatgttggaaagatacacactaagaagagaaataggctgactacaacccgcctcaacaagttggtctatattcagttcaataacaggctgatgaataacagagaaaagattaagtcaaagaaaatcactgatgttctcttgtctagtgatacaactgaagctcaaggttttctccaagacggtggagatgattgtgcacaagttgtctttagagatgaggaggaagatgagatggaaggtacagggataccttggtctgttattggagaggcagtgggggcagaagaacagcttgagcctcgtagaagtgcaagagtgagagagctctatgaaggagaagagtttgagtctgaagaagaagagtatgaagatgaagatttgtgctacagtgaagatgaaatatgatctggaccatctccatgtagtagtgaagccttttgtgatgccctggtcttatgaactgcagctgtgtcactttgtgtctgtgtgtcttcttttgtgtgagacctgaactaagaactatgtgcttgtgttgtcctttatttataaattgtgttctgcacttgtattactgtcctatccacttgtgttgtaattaccagctgctgatatggtgtgcagtgtgctcaactgctcatgaatgggaggctgctgaaatcatccagataagtcacaatttagtgttttctattttttatgaacaggaacagctagctgtctattgactaatttactaactactagctgtcaaaatgtgttgcagccttgcaggagctaggaacatgcaagacagcaagagtaagctcagctaggaatcagatatgtctactggccttctttttatacttactgtgagtctgtgactcatatagtcatatatagtagttatatacgtatatatagttatatacataatatatataatttatggctatattgccaaaacgcctagaaaagcgcctagaagcgcctaagaccgagtactcccgactaggcgctaggcaatgggtcaccgcctagattccgcctagcgcctagctgaaccttgtttagccacaatagcagagtgaagctttggataagatcgaatataagcatattgtacaatattttctttaaaacccaccaaaagaacgatgttattcaaataaaatagaaatgtttctttagatattctattgcaatatatattactgtaacttgccgattgttattactgatttttaataaaaacatacattacactgctttagatttggcacagggcctcaaatttctctggcccggccctggttgaacacttgaacttgtgttattgtggatttgtggtagtgtggttatggacatgttacattattatgtgaaattatgttatattcatattttgtccatgttgtttaaaaagacgttttaaagctcgcttaaacattttaaagttaaaaagttctcatgagcgcttcagcgttttatcgctttaataaccttgacaactacacatgaggaaggagacattaatttagaaggtcaagtagtgcctagaaaggatacctttcagtatttactatttaagatcaatgctacaaagagagacagggatattgatgaagatgttagccatagaatcgaagcagtgtggatggtagtgtcaagcatctggcattctgtgtaacaagagggtaccacagaagctaaaaggcaaattttatagtacggtgattagacttgctatgttgtataatgcagaatgttggcctacaaaaagacatcatgttcaacacgtaagtgttgcggaaatgtgtatattatgttggatgtgtagccatacaagacggggtcgagtcatgaacaatgagatatgcgataagttaagggtatcaccaattgaagaaaagcttgtctaacaccgattgagatagtttagacatgtccaatatagaccttcaaagacagtagtatgtagtgggattgtaaggcacgatagcaatgggaagagatacaatggtgacatgtgaagagacagtaaaacaagatttaaaataatagaatatacccaaagatttagccttcaatagaagtgcatggaaaacagctatctatatgtctgaaccttgacttgtagtttctgttgcgtttcaactctagcctagcccaacttgcttgggactaaaaggttttgttgttgtgacagaactagtcaaatgtactgatgttatgttcgcctaaaatcatgcattgtagccacattagcattgttcaaactccaaatgcctacagcattgcaatcacacacaaggggacctcaaaacccaaacattgcaaacttcaatccccatatgcaaacccatctggaatggataatagaaccccaaggtagagcagcagagataaacagccacggggaggagctccagtctacagccagcagctgacatcacgtgggttgtggaggttcacttgcccaaaggcttgggaaataaagcaaatcacgtgcactgcacaagcagtctggacgggctgggaagaagaaaaaagatttcaaggattgccataaggaagggaaagtgactattcaaagcaaaattggaaatccgaccaagcaagttaggggccctatagcccaaacaagaagcatctcaagtccgatggatcagatctccactccacgtcatgacgtccagcagtggtggtcccagaaatggagctaagtatggcagtctaagagtccagctaggttgaaattaaagcattaaactatgtaccagtcaaagtaccaacctgcaggtcccgcggcgggatctggcagccgctataccggaggcagcacgcactgccgaagtggcgggcaccgtccggcggcgctgccgcgcgttgggacgggcagatcacttcggttcggtggtggtcggcgccgaactcgcgttggggccgcacaacccactacaggtggacgtgcagccctggacgagatgcactggcggcggcgcgtggttgcaccggcgccagcggccggagcgcgggagcaaggaggctagggtttaggccttttaggatgaatggggaacacggaggaggaggtgagtcgcgactgcgaggggggcatcgaagcgacgcgacgggcggacgagcgccggggcctcgggggacagagtcgcaggacgcatcggggaggatgggagattggctgaggagtgaggaccaggaaggatgggccgggtattacctggggctaatggaccggaccagcttgttggcgattctcggatggagcacaggcgtgccggaagtgaaacagtgccacatgggctgcgtcaagaggaccagaggcccaggaagcaaagcacaagatcttttggacccgaataggtgaattagttgctcgtatttacatttacactagtgtatgaagcgcgcacatgcgcgcatggcaaaccgtttagcgttattgtataatatctgatgattatatgattgacagtaagtaaattaggatataagagtaaag

SEQ ID NO: 40529 - DNA, 324 bp, Zea Mays
ctcagtccagccttttcaccttgcgcccgccgtcctcctctccctcttcttcgcattgcctttcccttcagttgcaccgacctccagacgaaaccacccaagacgcgtgcttccattcctagcccaacagaagcgaagcacgccaccgaccaccggcctcgaagggatcatcttctctacaactcgtcctcgtggccttgttcctcctcttgtataggggactgcggcggagtggagatccgtgccgacatagtccgacttcttcgctcgctgtgaatggagacatgattcagctgggatctttctctacgatgagaatcagtt

SEQ ID NO: 40530 - DNA, 3399 bp, Zea Mays
cccattgccatctctagccacaatcctgttccacacttcaatcctgttccacacttccacttccacgcacaggctccgtggcaaaaagatcgcgcgcgcaagtagccacgaccccacggccgcgagcgggaaacgcgaaatccactacattgcgggttgccgccttcgtcccattttgtagtcgataccatctccctccggcgcggcagtgtcatcggttaatcgaaacgcgccgcgcgcccgccttcgtttcaaacgcgaaattttccgccatccccaaaaaatttcccttgcctttgcctccgcccaactaacaaatcgccttctattttgcttgcctgcctgccgcccaaaccaaccttcctctcccccggaatcccagaaatttccgcccacaccaaccggcacctattccgtgggcgcgaaaccctaatcggcgcccgcctccatctccatggcggagcaggacgacgccgcggggcagagcccgctcgactccgttccgatcgacgaaacttgtgatgctgaagatatgcattctcctttgtccttttcttacagaagtcagcctaaatctgtgggagctggtcttagcaatatggggaacacatgcttcctgaacgcaactcttcagtgcatcactcacactgtaccgctttttctcaagcttcgctcaactgatcattccaccccatgctcatataataaggatgggttttgttctttctgtgcccttaaagaacatgttgatgaatcaattcaaaggtctggatctgttatagcaccagcaaagttcagagataatttaagaagtatcctttcatgttgaacttttgctgagtctgttcaattttcaacattataactgctgtttgcatatatgttttcctgttaattcatgtccttccacccccttttggcattcagttcaccttactcttcacttaattattgtgctactgcatccttctcaattgttgccagcctgctatagtccaatgtgacatgagatttcttaacaatattttctagagttatcttcggatttttggccaggacagcaagaagatgcacatgaatttctacgttgcttgcttgataacttgcacaagtgtactcttgatcccatgtcaaagggcaagggctcatcctttgacgaagaaagtatagtcaacgagatttttggaggacaactgaaaagccatttatcttgctgcgagtgtggtcacagctcagagacgtttgagcccttcctggatctaagcttggagattgatcaggttgatcatctggtagatgctttgcaatcttttaccaaggtagaacagattggggactctgaaaacaagctcacctgcgaaagttgcaatgctcaagtttctaagaacaagcagcttacacttcatagagcaccagatgttattgcatttcatctcaagcgttttacaacccttgacaattctgttgaaaagattgacaaacatgtggtgtaccctctggaggttgatttgaagccatttcatagcaatccagacacagtggggggactgaaatatgatctttatggtgttgttgagcattctggattacccaactatggccattatacctgcaccattcgttcttcaccaagcacatggtacttcatgaatgactccaaagttgattcttgtactgattcaagtgcattaaaccaggaagcatatattttgttctatgttaggcagggcaaatttccatggttctcgagtttgctagaaggaggcagtggcagtagttctggtgataagttagagaaaaatgaagccagccaattagaggagacggagaaagatgaaatgggtcggtacaaaccatcattccttcctgaggagccatctacgagaagttcccttggcgcttccaacagcaataatacaatcgatgaaaacaatccacccagggcttctctccaaaatgatgtggctacatgtctccgctgtgtagaaactaccaatctggataagccctctaccccaccgcgctccaaacgacttgcctttgataacgagtttagtgtgtttgagtttgaggactttggtaaggatgcattttcaaccatatttatgaacatctggttttgttttcataatgcatctaccttatttccctttttgaattcccactcaaatttattatgcagttaactctactttatgattaatacctaccctaatccttaaatatcattctaatcacctcatcctttcagatctagacatcagacttctactatactactctttgatctgtttaatgtttttttcacgcagttgaatgttacatgctgtgtaaaacactactcattcatctttttaagggctgatgtctctccttgtttcattcataggtgaggaagatgaaactttatttccaaatttgaaacttacaccgaaggccaagaaagctaaggctgcatctgcatctaaagctgagaagggtccttgcattgatcagaacgcagtacgtttgatgaggggcatgacatcgacacgaagaaaaggtttaatggactgcatagcacagcaaactgcaaagcacgagtctagcagataccctgcaagtgaccctctggacaaaaagaaaagaaagccggttcttcaatactatgtaaacgtgaaaaattgataaaatggtctagaaaaaaaaacccggtgagcgtgggtggtgaatacgccgtggaggtggctcacgctgatgagggtaagccggcatggattaagggcacagcaagcatgtgggtcataggcggagctacgttagggccgtcctcggcccttggcctttgctctgcgtaaccactagaagtctgcatggctgaatgctgcaattaacttgctctccacagtctgcgaccgagaatattttaggtaattttatatttgtgtccctagtttagcaccactcagttttgttcctagtttagcaccactgctccgttttgtttttcgctagcagtagaaatgtctcatccattactatttgagagtaaaattgtgtagtggtgcggaactaaagcctaaaggtacatatttaaaaacccaaatattttagcgctcatgttaaactgtttgtttttcccattcccttacaaggctcgtaataacactaacgcaatagcagtaggcgatgctaaattgcattctcccggcatgcgctcggctaaatttcaacgtattcagacacaaggctcgtaataacacttaggcactgtttacttctgcttttttaacggcgatggtggtgagaatcatatgatcttgccaaacacttataaacttatccctataaagttattcttgccttcggagcgtcaccgagatcaaccaagcatgaggtcgacggtatcatgacacgtcg

SEQ ID NO: 40531 - DNA, 2745 bp, Zea Mays
atcgcgcgcgcaagtagccacgaccccacggccgcgagcgggaaacgcgaaatccactacattgcgggttgccgccttcgtcccattttgtagtcgataccatctccctccggcgcggcagtgtcatcggttaatcgaaacgcgccgcgcgcccgccttcgtttcaaacgcgaaattttccgccatccccaaaaaatttcccttgcctttgcctccgcccaactaacaaatcgccttctattttgcttgcctgcctgccgcccaaaccaaccttcctctcccccggaatcccagaaatttccgcccacaccaaccggcacctattccgtgggcgcgaaaccctaatcggcgcccgcctccatctccatggcggagcaggacgacgccgcggggcagagcccgctcgactccgttccgatcgacgaaacttgtgatgctgaagatatgcattctcctttgtccttttcttacagaagtcagcctaaatctgtgggagctggtcttagcaatatggggaacacatgcttcctgaacgcaactcttcagtgcatcactcacactgtaccgctttttctcaagcttcgctcaactgatcattccaccccatgctcatataataaggatgggttttgttctttctgtgcccttaaagaacatgttgatgaatcaattcaaaggtctggatctgttatagcaccagcaaagttcagagataatttaagaaagttatcttcggatttttggccaggacagcaagaagatgcacatgaatttctacgttgcttgcttgataacttgcacaagtgtactcttgatcccatgtcaaagggcaagggctcatcctttgacgaagaaagtatagtcaacgagatttttggaggacaactgaaaagccatttatcttgctgcgagtgtggtcacagctcagagacgtttgagcccttcctggatctaagcttggagattgatcaggttgatcatctggtagatgctttgcaatcttttaccaaggtagaacagattggggactctgaaaacaagctcacctgcgaaagttgcaatgctcaagtttctaagaacaagcagcttacacttcatagagcaccagatgttattgcatttcatctcaagcgttttacaacccttgacaattctgttgaaaagattgacaaacatgtggtgtaccctctggaggttgatttgaagccatttcatagcaatccagacacagtgcattctggattacccaactatggccattatacctgcaccattcgttcttcaccaagcacatggtacttcatgaatgactccaaagttgattcttgtactgattcaagtgcattaaaccaggaagcatatattttgttctatgttaggcagggcaaatttccatggttctcgagtttgctagaaggaggcagtggcagtagttctggtgataagttagagaaaaatgaagccagccaattagaggagacggagaaagatgaaatgggtcggtacaaaccatcattccttcctgaggagccatctacgagaagttcccttggcgcttccaacagcaataatacaatcgatgaaaacaatccacccagggcttctctccaaaatgatgtggctacatgtctccgctgtgtagaaactaccaatctggataagccctctaccccaccgcgctccaaacgacttgcctttgataacgagtttagtgtgtttgagtttgaggactttggtgaggaagatgaaactttatttccaaatttgaaacttacaccgaaggccaagaaagctaaggctgcatctgcatctaaagctgagaagggtccttgcattgatcagaacgcagtacgtttgatgaggggcatgacatcgacacgaagaaaaggtttaatggactgcatagcacagcaaactgcaaagcacgagtctagcagataccctgcaagtgaccctctggacaaaaagaaaagaaagccggttcttcaatactatgtaaacgtgaaaaattgataaaatggtctagaaaaaaaaacccggtgagcgtgggtggtgaatacgccgtggaggtggctcacgctgatgagggtaagccggcatggattaagggcacagcaagcatgtgggtcataggcggagctacgttagggccgtcctcggcccttggcctttgctctgcgtaaccactagaagtctgcatggctgaatgctgcaattaacttgctctccacagtctgcgaccgagaatattttaggtaattttatatttgtgtccctagtttagcaccactcagttttgttcctagtttagcaccactgctccgttttgtttttcgctagcagtagaaatgtctcatccattactatttgagagtaaaattgtgtagtggtgcggaactaaagcctaaaggtacatatttaaaaacccaaatattttagcgctcatgttaaactgtttgtttttcccattcccttacaaggctcgtaataacactaacgcaatagcagtaggcgatgctaaattgcattctcccggcatgcgctcggctaaatttcaacgtattcagacacaaggctcgtaataacacttaggcactgtttacttctgcttttttaacggcgatggtggtgagaatcatatgatcttgccaaacacttataaacttatccctataaagttattcttgccttcggagcgtcaccgagatcaaccaagcatgaggtcgacggtatcatgacacgtcg

SEQ ID NO: 40532 - DNA, 2929 bp, Zea Mays
cgccttcgtcccattttgtagtcgataccatctccctccggcgcggcagtgtcatcggttaatcgaaacgcgccgcgcgcccgccttcgtttcaaacgcgaaattttccgccatccccaaaaaatttcccttgcctttgcctccgcccaactaacaaatcgccttctattttgcttgcctgcctgccgcccaaaccaaccttcctctcccccggaatcccagaaatttccgcccacaccaaccggcacctattccgtgggcgcgaaaccctaatcggcgcccgcctccatctccatggcggagcaggacgacgccgcggggcagagcccgctcgactccgttccgatcgacgaaacttgtgatgctgaagatatgcattctcctttgtccttttcttacagaagtcagcctaaatctgtgggagctggtcttagcaatatggggaacacatgcttcctgaacgcaactcttcagtgcatcactcacactgtaccgctttttctcaagcttcgctcaactgatcattccaccccatgctcatataataaggatgggttttgttctttctgtgcccttaaagaacatgttgatgaatcaattcaaaggtctggatctgttatagcaccagcaaagttcagagataatttaagaagtatcctttcatgttgaacttttgctgagtctgttcaattttcaacattataactgctgtttgcatatatgttttcctgttaattcatgtccttccacccccttttggcattcagttcaccttactcttcacttaattattgtgctactgcatccttctcaattgttgccagcctgctatagtccaatgtgacatgagatttcttaacaatattttctagagttatcttcggatttttggccaggacagcaagaagatgcacatgaatttctacgttgcttgcttgataacttgcacaagtgtactcttgatcccatgtcaaagggcaagggctcatcctttgacgaagaaagtatagtcaacgagatttttggaggacaactgaaaagccatttatcttgctgcgagtgtggtcacagctcagagacgtttgagcccttcctggatctaagcttggagattgatcaggttgatcatctggtagatgctttgcaatcttttaccaaggtagaacagattggggactctgaaaacaagctcacctgcgaaagttgcaatgctcaagtttctaagaacaagcagcttacacttcatagagcaccagatgttattgcatttcatctcaagcgttttacaacccttgacaattctgttgaaaagattgacaaacatgtggtgtaccctctggaggttgatttgaagccatttcatagcaatccagacacagtggggggactgaaatatgatctttatggtgttgttgagcattctggattacccaactatggccattatacctgcaccattcgttcttcaccaagcacatggtacttcatgaatgactccaaagttgattcttgtactgattcaagtgcattaaaccaggaagcatatattttgttctatgttaggcagggcaaatttccatggttctcgagtttgctagaaggaggcagtggcagtagttctggtgataagttagagaaaaatgaagccagccaattagaggagacggagaaagatgaaatgggtcggtacaaaccatcattccttcctgaggagccatctacgagaagttcccttggcgcttccaacagcaataatacaatcgatgaaaacaatccacccagggcttctctccaaaatgatgtggctacatgtctccgctgtgtagaaactaccaatctggataagccctctaccccaccgcgctccaaacgacttgcctttgataacgagtttagtgtgtttgagtttgaggactttggtgaggaagatgaaactttatttccaaatttgaaacttacaccgaaggccaagaaagctaaggctgcatctgcatctaaagctgagaagggtccttgcattgatcagaacgcagtacgtttgatgaggggcatgacatcgacacgaagaaaaggtttaatggactgcatagcacagcaaactgcaaagcacgagtctagcagataccctgcaagtgaccctctggacaaaaagaaaagaaagccggttcttcaatactatgtaaacgtgaaaaattgataaaatggtctagaaaaaaaaacccggtgagcgtgggtggtgaatacgccgtggaggtggctcacgctgatgagggtaagccggcatggattaagggcacagcaagcatgtgggtcataggcggagctacgttagggccgtcctcggcccttggcctttgctctgcgtaaccactagaagtctgcatggctgaatgctgcaattaacttgctctccacagtctgcgaccgagaatattttaggtaattttatatttgtgtccctagtttagcaccactcagttttgttcctagtttagcaccactgctccgttttgtttttcgctagcagtagaaatgtctcatccattactatttgagagtaaaattgtgtagtggtgcggaactaaagcctaaaggtacatatttaaaaacccaaatattttagcgctcatgttaaactgtttgtttttcccattcccttacaaggctcgtaataacactaacgcaatagcagtaggcgatgctaaattgcattctcccggcatgcgctcggctaaatttcaacgtattcagacacaaggctcgtaataacacttaggcactgtttacttctgcttttttaacggcgatggtggtgagaatcatatgatcttgccaaacacttataaacttatccctataaagttattcttgccttcggagcgtcaccgagatcaaccaagcatgaggtcgacggtatcatgacacgtcg

SEQ ID NO: 40533 - DNA, 2864 bp, Zea Mays
aaatcgccttctattttgcttgcctgcctgccgcccaaaccaaccttcctctcccccggaatcccagaaatttccgcccacaccaaccggcacctattccgtgggcgcgaaaccctaatcggcgcccgcctccatctccatggcggagcaggacgacgccgcggggcagagcccgctcgactccgttccgatcgacgaaacttgtgatgctgaagatatgcattctcctttgtccttttcttacagaagtcagcctaaatctgtgggagctggtcttagcaatatggggaacacatgcttcctgaacgcaactcttcagtgcatcactcacactgtaccgctttttctcaagcttcgctcaactgatcattccaccccatgctcatataataaggatgggttttgttctttctgtgcccttaaagaacatgttgatgaatcaattcaaaggtctggatctgttatagcaccagcaaagttcagagataatttaagaaagttatcttcggatttttggccaggacagcaagaagatgcacatgaatttctacgttgcttgcttgataacttgcacaagtgtactcttgatcccatgtcaaagggcaagggctcatcctttgacgaagaaagtatagtcaacgagatttttggaggacaactgaaaagccatttatcttgctgcgagtgtggtcacagctcagagacgtttgagcccttcctggatctaagcttggagattgatcaggttgatcatctggtagatgctttgcaatcttttaccaaggtagaacagattggggactctgaaaacaagctcacctgcgaaagttgcaatgctcaagtttctaagaacaagcagcttacacttcatagagcaccagatgttattgcatttcatctcaagcgttttacaacccttgacaattctgttgaaaagattgacaaacatgtggtgtaccctctggaggttgatttgaagccatttcatagcaatccagacacagtggggggactgaaatatgatctttatggtgttgttgagcattctggattacccaactatggccattatacctgcaccattcgttcttcaccaagcacatggtacttcatgaatgactccaaagttgattcttgtactgattcaagtgcattaaaccaggaagcatatattttgttctatgttaggcagggcaaatttccatggttctcgagtttgctagaaggaggcagtggcagtagttctggtgataagttagagaaaaatgaagccagccaattagaggagacggagaaagatgaaatgggtcggtacaaaccatcattccttcctgaggagccatctacgagaagttcccttggcgcttccaacagcaataatacaatcgatgaaaacaatccacccagggcttctctccaaaatgatgtggctacatgtctccgctgtgtagaaactaccaatctggataagccctctaccccaccgcgctccaaacgacttgcctttgataacgagtttagtgtgtttgagtttgaggactttggtaaggatgcattttcaaccatatttatgaacatctggttttgttttcataatgcatctaccttatttccctttttgaattcccactcaaatttattatgcagttaactctactttatgattaatacctaccctaatccttaaatatcattctaatcacctcatcctttcagatctagacatcagacttctactatactactctttgatctgtttaatgtttttttcacgcagttgaatgttacatgctgtgtaaaacactactcattcatctttttaagggctgatgtctctccttgtttcattcataggtgaggaagatgaaactttatttccaaatttgaaacttacaccgaaggccaagaaagctaaggctgcatctgcatctaaagctgagaagggtccttgcattgatcagaacgcagtacgtttgatgaggggcatgacatcgacacgaagaaaaggtttaatggactgcatagcacagcaaactgcaaagcacgagtctagcagataccctgcaagtgaccctctggacaaaaagaaaagaaagccggttcttcaatactatgtaaacgtgaaaaattgataaaatggtctagaaaaaaaaacccggtgagcgtgggtggtgaatacgccgtggaggtggctcacgctgatgagggtaagccggcatggattaagggcacagcaagcatgtgggtcataggcggagctacgttagggccgtcctcggcccttggcctttgctctgcgtaaccactagaagtctgcatggctgaatgctgcaattaacttgctctccacagtctgcgaccgagaatattttaggtaattttatatttgtgtccctagtttagcaccactcagttttgttcctagtttagcaccactgctccgttttgtttttcgctagcagtagaaatgtctcatccattactatttgagagtaaaattgtgtagtggtgcggaactaaagcctaaaggtacatatttaaaaacccaaatattttagcgctcatgttaaactgtttgtttttcccattcccttacaaggctcgtaataacactaacgcaatagcagtaggcgatgctaaattgcattctcccggcatgcgctcggctaaatttcaacgtattcagacacaaggctcgtaataacacttaggcactgtttacttctgcttttttaacggcgatggtggtgagaatcatatgatcttgccaaacacttataaacttatccctataaagttattcttgccttcggagcgtcaccgagatcaaccaagcatgaggtcgacggtatcatgacacgtcg

SEQ ID NO: 40534 - DNA, 137 bp, Zea Mays
aagaaacgcatgagtccttaactcattcagtgccatcaaatcagcttcagaagcatcagcacgggctccagggtataccttaaatacagcccgtgtgcccctgaatggaccttgaacaactcttccctcataaagtc

SEQ ID NO: 40535 - DNA, 551 bp, Zea Mays
atggcggtgaaggcgagggtctcgccgacgggcttgctcgccgccgcaacgtgggcaggcttattatcactcgtggctgcctccgccctcgacgtgccgaccgtggccttcgacgagcgcttctcgccgctcttcggcgacggcaacctcgtccgctcccccgacgacaggagcgtccgcctcctgctcgaccgccggtccggttccgggttcgtttcgtcggactactacctccacggcttcttcagcgcgtccatcaagctgcccaggggctacacggccggcgtcgtcgtcgccttctacctgtctaatgtgttggaaaatagagtttgtttaagtatgttgcgtaaatattggtttgtttcctgacgcacctcttcctaatgctagaagataggaatatagtttgttgaggtgataacgcttgtaacagaattgttgtaatctccggcttcctttgcctatattaacatgcaagctcggcagagaacatatgccagagtttaatcaaaaggcttccgctcctctgatttcttacatggtaatcagag

SEQ ID NO: 40536 - DNA, 2105 bp, Zea Mays
acaaatacaaacacacactcctgtcctttctactccaagtttcattccaaaccctcccccctcgctctcgacgcctcagctcctcccccttctctctcaactcctgctagctctctctcacacacactagccggcggcgctcctcaattttcacacttcctaaccacatcaggcgcacacctacgcggccataccctcctccaccgatcacttctcggcagccggcttctcgtcctgcatcccaggagagatcgagagaatggagctgttcccagcgcacccggacttgcagctgcatatcagccctcccccagccacgaaaccaacggagctagggttctggaaaagggctctagacaccaccccgacagcaactacaacggccgcggcggccaccacggccccctccctcgccttcgcgtcctcggcgccgacagccgtggggcaccacgcggcggccggcgcgcaccacaacgaccaccaccatcaggtgccgacgacgagctcccactcccacctggtgggcctcccgttcttgcaccacacccagcccatcctcctcccggagggccgcggcggcggcctccgccgggacctggcagccgcgaggcccatccggggcatccccgtgtacaacgcctcgcagccgctcctccacttcctgcagagccacacgcattgccacgacgcgatcgtcggcgcggccgggccgaggttgtcccccaaggccgcgctccggctcgcggcgaagcggggcgcgcgcgcgccccggatgcggtggacgacgtcgctgcacgcgcggttcgtccacgccgtcgagctgctcgggggccacgagagagctacgcccaagtcagttcttgagctaatggacgtgaaggatctgaccttggcccatgtcaagtcgcacttgcagatgtatcgcaccatcaagaccaccgaccacaagccagctaattctgcttcatcctacggtatgtacgggcaagcagcagccgcgaaaccggtcatcgacatccccgaccccgacgacgacagcctgttcgacctcatcaccaccagcgccgggtctgatcagtcgtcgtcgtcggctcagcactctaaccctgacggcggcggcggcaacgagcatggctccagcatgtgcgctctgtggtgcagctcctcgacaagcatcagcagggggggctggttccatgacagaccaagagacgatgatgccgccactcccggtcccggcgacgacatcaaatccttcgaggacgtgcaatcacacagccttcttgacgatgtcgccgacctcaactcgtcgccgttccaggtagtagctgggatgtttggcagcgacaagaaaccgaacctcgacttcaccctaggacggatataatccgcactgtctatctacacctcgaccatcagctgagccaaccgagatcgatcgatcggccggccatggatacgaagctagatacaggctagagctagctgcactgcatacataggttgatctgcttctaagctgccatgtttatgatctgatggagcatgtgcgtgcggtatgcatgcatggtcgtagcgagggaacaatgaagaagaaccaaaacgcttgaagaaatgaaaaaagaaggcgcgctaggagtaaagaataggagatatggcaaccgtggattggatccaggaacaaattaaagctagcgcgcgcaaaattaaaggaggcgggggagacattggtgcgtgcgtgttagtagatatagacagctcgataggctttatccaaggcatgtggtgtacacatgcatgagggatcggatagagagatcgatcagaggtgcatgacgcatgaggcacctagttgtagctaggggccggttggctggccaagatttgacaaaaaaggtttgcttcatatatatcctttattatgttatatgcttatgccacacaaagtgtactgcaaagagagctaggtagctagcgcatattatatatatatatgtcatatatatgcctgcatgtattgtttggaccatggaagagtattattattcttgcgctctgttagctcccaatgcaaccgagaggcaataataagttcttgcccaggg

SEQ ID NO: 40537 - DNA, 1973 bp, Zea Mays
caagtttcattccaaaccctcccccctcgctctcgacgcctcagctcctcccccttctctctcaactcctgctagctctctctcacacacactagccggcggcgctcctcaattttcacacttcctaaccacatcaggcgcacacctacgcggccataccctcctccaccgatcacttctcggcagccggcttctcgtcctgcatcccaggagagatcgagagaatggagctgttcccagcgcacccggacttgcagctgcatatcagccctcccccagccacgaaaccaacggagctagggttctggaaaagggctctagacaccaccccgacagcaactacaacggccgcggcggccaccacggccccctccctcgccttcgcgtcctcggcgccgacagccgtggggcaccacgcggcggccggcgcgcaccacaacgaccaccaccatcaggtgccgacgacgagctcccactcccacctggtgggcctcccgttcttgcaccacacccagcccatcctcctcccggagggccgcggcggcggcctccgccgggacctggcagccgcgaggcccatccggggcatccccgtgtacaacgcctcgcagccgctcctccacttcctgcagagccacacgcattgccacgacgcgatcgtcggcgcggccgggccgaggttgtcccccaaggccgcgctccggctcgcggcgaagcggggcgcgcgcgcgccccggatgcggtggacgacgtcgctgcacgcgcggttcgtccacgccgtcgagctgctcgggggccacgagagagctacgcccaagtcagttcttgagctaatggacgtgaaggatctgaccttggcccatgtcaagtcgcacttgcagatgtatcgcaccatcaagaccaccgaccacaagccagctaattctgcttcatcctacgggcaagcagcagccgcgaaaccggtcatcgacatccccgaccccgacgacgacagcctgttcgacctcatcaccaccagcgccgggtctgatcagtcgtcgtcgtcggctcagcactctaaccctgacggcggcggcggcaacgagcatggctccagcatgtgcgctctgtggtgcagctcctcgacaaggacgtgcaatcacacagccttcttgacgatgtcgccgacctcaactcgtcgccgttccaggtagtagctgggatgtttggcagcgacaagaaaccgaacctcgacttcaccctaggacggatataatccgcactgtctatctacacctcgaccatcagctgagccaaccgagatcgatcgatcggccggccatggatacgaagctagatacaggctagagctagctgcactgcatacataggttgatctgcttctaagctgccatgtttatgatctgatggagcatgtgcgtgcggtatgcatgcatggtcgtagcgagggaacaatgaagaagaaccaaaacgcttgaagaaatgaaaaaagaaggcgcgctaggagtaaagaataggagatatggcaaccgtggattggatccaggaacaaattaaagctagcgcgcgcaaaattaaaggaggcgggggagacattggtgcgtgcgtgttagtagatatagacagctcgataggctttatccaaggcatgtggtgtacacatgcatgagggatcggatagagagatcgatcagaggtgcatgacgcatgaggcacctagttgtagctaggggccggttggctggccaagatttgacaaaaaaggtttgcttcatatatatcctttattatgttatatgcttatgccacacaaagtgtactgcaaagagagctaggtagctagcgcatattatatatatatatgtcatatatatgcctgcatgtattgtttggaccatggaagagtattattattcttgcgctctgttagctcccaatgcaaccgagaggcaataataagttcttgcccaggg

SEQ ID NO: 40538 - DNA, 1617 bp, Zea Mays
ctttccgtttcactctcctcgagaggcggcgctgctgaggacactaggcccgaccgcccgaggaaggaagagaaacccgcagagggcgatagaggtcagcgcgattcggagatgggcatgggcgacgaactgtgggacgactcggcgctggtcgtcgccttcgaccgcgccatttccacgttcaatgaaatgcattgcaagagcaggcgagcaacgccaagtaaggatgcgaagaaggaacacgctgctgctcctgcagcagaagaagagcccattactgctggagcagtggatgaagaggaagatgacaactgtgacaacgcacagacagttgagcaacagcagccctctgacgacaggcagacagttgagcaagcttctcttcaggaaactgatccaggcaaagagacacatgtttcagaggctaaaacgctcacagcagatgctgatggaaatttgagttcaagccagcaaactggggagtacaatgaattgctgagacaatactatgagcttgaggagaagagtcggaacattcttgagcaacttcaacaaacaaactcttggaattatcaggcaccaggatatgcttctacaacccaacagcagcaagttcctgtctatagtgccacagcaccagaccttcactcttccaccactcaatcatcatgctgcaattggaatgttcccctggtatctgtctactgctgttcaactggccaaccaagtggaggttctgcttatatgccacctactgctggctgcagcgcaacattgacttgtgatcaatgcccagatgcaaacagtgcataccctagcgtttcaaacttcatgcaggtcccaacaaatgtatctatcaatgatgatcaagttgctaaggctgcaatgaagactgctgaaggtgccttcaattttatgagaagtacgatatctggacagcctggcgcccaaagaaatgaatctgatactgggaaggaggaaagcactgatatgggcacaaacctgaatcttgatagtgatcttgctgctctcttaaattcatggtatgctgctgggttctacacttgcagagccccaaaaccatgaagttcccaactcgtaaagtccaggtttcgaaaactgcattgcaccagtaattctatcagtttaatattcagcgtatgacacttgattcttaatgcccgtatatgacactgtatgtcagcatcaagaatctgatatgtgtgtttacaggtacctcacgctgcaatctacgagaaattccagaccgtagagtgctttggccgtcttgagttttagatgtctggggaaaaaaaaagcaaatcactgggtgcgcgtgtgtgccttcaagtacgaatattctgctggagtttgtctactgtctgcttgctgcttgtcactgctattttaagctacactagactttcggtattgctcgaatgtgaatctgttgatgccaggcagaaaaattgcgtataaatgtgtaaactgtcgcactgacctatcagatattcgtcgtatatagagcgctgccatgttcaacctattttagcaggctgttttcggcaggatgacatttgtgctaccacgagtagctttgccggttggcagcttcca

SEQ ID NO: 40539 - DNA, 3712 bp, Zea Mays
ctttccgtttcactctcctcgagaggcggcgctgctgaggacactaggcccgaccgcccgaggaaggaagagaaacccgcagagggcgatagaggtcagcgcgattcggagatgggcatgggcgacgaactgtgggacgactcggcgctggtcgtcgccttcgaccgcgccatttccacgttcaatgaaatgcattgcaagagcaggcgagcaacgccaagtaaggatgcgaagaaggaacacgctgctgctcctgcagcagaagaagagcccattactgctggagcagtggatgaagaggaagatgacaactgtgacaacgcacagacagttgagcaacagcagccctctgacgacaggcagacagttgagcaagcttctcttcaggaaactgatccaggcaaagagacacatgtttcagaggctaaaacgctcacagcagatgctgatggaaatttgagttcaagccagcaaactggggagtacaatgaattgctgagacaatactatgagcttgaggagaagagtcggaacattcttgagcaacttcaacaaacaaactcttggaattatcaggcaccaggatatgcttctacaacccaacagcagcaagttcctgtctatagtgccacagcaccagaccttcactcttccaccactcaatcatcatgctgcaattggaatgttcccctggtatctgtctactgctgttcaactggccaaccaagtggaggttctgcttatatgccacctactgctggctgcagcgcaacattgacttgtgatcaatgcccagatgcaaacagtgcataccctagcgtttcaaacttcatgcaggtcccaacaaatgtatctatcaatgatgatcaagttgctaaggctgcaatgaagactgctgaaggtgccttcaattttatgagaagtacgatatctggacagcctggcgcccaaagaaatgaatctgatactgggaaggaggaaagcactgatatgggcacaaacctgaatcttgatagtgatcttgctgctctcttaaattcatggtatgctgctgggttctacacttgcaggtacctcacgctgcaatctacgagaaattccagaccgtagagtgctttggccgtcttgagttttagatgtctggggaaaaaaaaagcaaatcactgggtgcgcgtgtgtgccttcaagtacgaatattctgctggagtttgtctactgtctgcttgctgcttgtcactgctattttaagctacactagactttcggtattgctcgaatgtgaatctgttgatgccaggcagaaaaattgcgtataaatgtgtaaactgtcgcactgacctatcagatattcgtcgtatatagagcgctgccatgttcaacctattttagcaggctgttttcggcaggatgacatttgtgctaccacgagtagctttgccggttggcagcttccatcctcggttgtccattacagtattaaagcagtgcgaccgcgaccagaaagttttggtgcttgtggcgccatgtgttgtgatattgcctcctgaccggccggcctgcctgccccgcgcgtcgtgatgtttggtgatcggtagacggcacctttctacagttgtggcatgtgtgaacctgctgatgcatctgtacgccttgcgccgtggacggacggaccctgctgatgcgtcttctccaagctgccaaatcggagcctgctgcaaaaaatgagtgataacctgatggaaaaggttagcgcctttggtgagcgcctgaagatcaccgggacggaggtcagcaagaagatgacggccggaatgagctccatgagcttcaagatgaaggagttgttccaggggcagactcccgctgataagattgttgaggacgccacctcggagaatctggacgggcctgattggaactcaaacttggagatttgcgacttgatcaacacagagaaagttaacagtgtggaacttatacatgggatcaagaagaggatcatgatgaaggatgcgagagttcagtacctctcattggtcctgcttgagactattgttaagaactgtgagaaggccttctcagaagttgcggccgaacgggttcttgatgagatggtcaggttgattgatgatcctcagaccgtggtgaataacaggaacaaggcccttatgctgattgaagcatggggagagtccggtgatgaactccgctatctgccagtctatgaggaaacgtacaagagcttgaaatcaagagtgcggtttcctggacgtgacaatgagagcttggctcccatatttactcccccacgatcagttgctgaagctgatgttgaaaccagcttgccccagcaggcgttcgaagacgtccatgttcatacatatactgctgaagaaacaaaagaagcgtttgatgtagctcgtaacagcatagaacttctttcgactgttctttcctcttcccctgagcaggatgcttcgcaggatgacttgacggccacactcgtgcaacaatgctaccaatctcagcacactatccagaggattattgagaccgtcggagacaacgaagctgtgctcttcgaggccttgagcgtgaacgacgagatccagaaagtgttgtcaaagtacgaggagatgaagcagcccagggcctcggagcatgcagaacagagagcagttgtcataccggttgccacagaacatgaagatctgactgctgccgtcaatgaagacgcccttgtcagaaaaccagctgccgcgagaacaaggtcaggtggggatgatgatatccttgatgatctggacgagatgatattcggcaagaagggaggtagcagctcccaggaagggccgaagaagccagatccaaagaaggatgacctgataactttttaagcgtacccttctataattgcagcctttgcttgctattttctggtgatgtacccactcggtagattgaagattccttaggatttggatcgattgtctattcgcatacgattcgtatctgccccctttcggtttgttcagtaaagtcgctgcactttctcagtcttgtttcatggatgagtcccagtcccagtcccagtgaccatgaatgtgttggatggtggattatgcaccaacggggggaaataaaatcatgacgggaataaatggtggtccttaattgacgaagcactcgcatacaaagcatatattgatagtacattctcggtacctcatgtttcacgcctgtacccatacactggattggcagtaaacgccactaccaaacgagttgcacgtagcaaggcatggaacctgagcgtcaagctcctcaggcggtcgcggctgccgcgagcttggcgcgcagctccctcctcaggatcttcccggacgccgacttggggatggagggggtgaagtacaccttgtgtagcctcttgtagaataccacctgaaaatcggcgcacgcgcgcacacgtacactgttatgtcagaacaaacttcttcatggcataagcaaggcgcgcggcgtgatccagcctgcgtgactggtgagtacctgcttggagatgaactccttgatggcgtcctccgcgatgtcggcgtcggcggcgcggaccacgaaggcgacggggacctcgccggcggcttcgtccttttgcctgccacgcgcatacatatacacacacacacactcagaacgagcagttttgttgcgg

SEQ ID NO: 40540 - DNA, 1538 bp, Zea Mays
cactctcctcgagaggcggcgctgctgaggacactaggcccgaccgcccgaggaaggaagagaaacccgcagagggcgatagaggtcagcgcgattcggagatgggcatgggcgacgaactgtgggacgactcggcgctggtcgtcgccttcgaccgcgccatttccacgttcaatgaaatgcattgcaagagcaggcgagcaacgccaagtaaggatgcgaagaaggaacacgctgctgctcctgcagcagaagaagagcccattactgctggagcagtggatgagtgcagagaggaagatgacaactgtgacaacgcacagacagttgagcaacagcagccctctgacgacaggcagacagttgagcaagcttctcttcaggaaactgatccaggcaaagagacacatgtttcagaggctaaaacgctcacagcagatgctgatggaaatttgagttcaagccagcaaactggggagtacaatgaattgctgagacaatactatgagcttgaggagaagagtcggaacattcttgagcaacttcaacaaacaaactcttggaattatcaggcaccaggatatgcttctacaacccaacagcagcaagttcctgtctatagtgccacagcaccagaccttcactcttccaccactcaatcatcatgctgcaattggaatgttcccctggtatctgtctactgctgttcaactggccaaccaagtggaggttctgcttatatgccacctactgctggctgcagcgcaacattgacttgtgatcaatgcccagatgcaaacagtgcataccctagcgtttcaaacttcatgcaggtcccaacaaatgtatctatcaatgatgatcaagttgctaaggctgcaatgaagactgctgaaggtgccttcaattttatgagaagtacgatatctggacagcctggcgcccaaagaaatgaatctgatactgggaaggaggaaagcactgatatgggcacaaacctgaatcttgatagtgatcttgctgctctcttaaattcatggtatgctgctgggttctacacttgcagagccccaaaaccatgaagttcccaactcgtaaagtccaggtttcgaaaactgcattgcaccagtaattctatcagtttaatattcagcgtacctcacgctgcaatctacgagaaattccagaccgtagagtgctttggccgtcttgagttttagatgtctggggaaaaaaaaagcaaatcactgggtgcgcgtgtgtgccttcaagtacgaatattctgctggagtttgtctactgtctgcttgctgcttgtcactgctattttaagctacactagactttcggtattgctcgaatgtgaatctgttgatgccaggcagaaaaattgcgtataaatgtgtaaactgtcgcactgacctatcagatattcgtcgtatatagagcgctgccatgttcaacctattttagcaggctgttttcggcaggatgacatttgtgctaccacgagtagctttgccggttggcagcttcca

SEQ ID NO: 40541 - DNA, 1866 bp, Zea Mays
ggcgctgctgaggacactaggcccgaccgcccgaggaaggaagagaaacccgcagagggcgatagaggtcagcgcgattcggagatgggcatgggcgacgaactgtgggacgactcggcgctggtcgtcgccttcgaccgcgccatttccacgttcaatgaaatgcattgcaagagcaggcgagcaacgccaagtaaggatgcgaagaaggaacacgctgctgctcctgcagcagaagaagagcccattactgctggagcagtggatgagtgcagagaggaagatgacaactgtgacaacgcacagacagttgagcaacagcagccctctgacgacaggcagacagttgagcaagcttctcttcaggaaactgatccaggcaaagagacacatgtttcagaggctaaaacgctcacagcagatgctgatggaaatttgagttcaagccagcaaactggggagtacaatgaattgctgagacaatactatgagcttgaggagaagagtcggaacattcttgagcaacttcaacaaacaaactcttggaattatcaggcaccaggatatgcttctacaacccaacagcagcaagttcctgtctatagtgccacagcaccagaccttcactcttccaccactcaatcatcatgctgcaattggaatgttcccctggtatctgtctactgctgttcaactggccaaccaagtggaggttctgcttatatgccacctactgctggctgcagcgcaacattgacttgtgatcaatgcccagatgcaaacagtgcataccctagcgtttcaaacttcatgcaggtcccaacaaatgtatctatcaatgatgatcaagttgctaaggctgcaatgaagactgctgaaggtgccttcaattttatgagaagtacgatatctggacagcctggcgcccaaagaaatgaatctgatactgggaaggaggaaagcactgatatgggcacaaacctgaatcttgatagtgatcttgctgctctcttaaattcatggtatgctgctgggttctacacttgcaggtacctcacgctgcaatctacgagaaattccagaccgtagagtgctttggccgtcttgagttttagatgtctggggaaaaaaaaagcaaatcactgggtgcgcgtgtgtgccttcaagtacgaatattctgctggagtttgtctactgtctgcttgctgcttgtcactgctattttaagctacactagactttcggtattgctcgaatgtgaatctgttgatgccaggcagaaaaattgcgtataaatgtgtaaactgtcgcactgacctatcagatattcgtcgtatatagagcgctgccatgttcaacctattttagcaggctgttttcggcaggatgacatttgtgctaccacgagtagctttgccggttggcagcttccatcctcggttgtccattacagtattaaagcagtgcgaccgcgaccagaaagttttggtgcttgtggcgccatgtgttgtgatattgcctcctgaccggccggcctgcctgccccgcgcgtcgtgatgtttggtgatcggtagacggcacctttctacagttgtggcatgtgtgaacctgctgatgcatctgtacgccttgcgccgtggacggacggaccctgctgatgcgtcttctccaagctgccaaatcggagcctgctggtaaacggctaaaatgttatatcaacccttgaaagagcagtgtttgggggaagcattcagcagcttctatggaattatttttacgtatcttcttatctccgcttgagcgagttgaagaaggaatttgaggggaaaaatgatttattcagaaatagcgtattattatatggat

SEQ ID NO: 40542 - DNA, 1870 bp, Zea Mays
gctgctgaggacactaggcccgaccgcccgaggaaggaagagaaacccgcagagggcgatagaggtcagcgcgattcggagatgggcatgggcgacgaactgtgggacgactcggcgctggtcgtcgccttcgaccgcgccatttccacgttcaatgaaatgcattgcaagagcaggcgagcaacgccaagtaaggatgcgaagaaggaacacgctgctgctcctgcagcagaagaagagcccattactgctggagcagtggatgagtgcagagaggaagatgacaactgtgacaacgcacagacagttgagcaacagcagccctctgacgacaggcagacagttgagcaagcttctcttcaggaaactgatccaggcaaagagacacatgtttcagaggctaaaacgctcacagcagatgctgatggaaatttgagttcaagccagcaaactggggagtacaatgaattgctgagacaatactatgagcttgaggagaagagtcggaacattcttgagcaacttcaacaaacaaactcttggaattatcaggcaccaggatatgcttctacaacccaacagcagcaagttcctgtctatagtgccacagcaccagaccttcactcttccaccactcaatcatcatgctgcaattggaatgttcccctggtatctgtctactgctgttcaactggccaaccaagtggaggttctgcttatatgccacctactgctggctgcagcgcaacattgacttgtgatcaatgcccagatgcaaacagtgcataccctagcgtttcaaacttcatgcaggtcccaacaaatgtatctatcaatgatgatcaagttgctaaggctgcaatgaagactgctgaaggtgccttcaattttatgagaagtacgatatctggacagcctggcgcccaaagaaatgaatctgatactgggaaggaggaaagcactgatatgggcacaaacctgaatcttgatagtgatcttgctgctctcttaaattcatggtatgctgctgggttctacacttgcaggtaatccttaaccctcgaacgttgagttttcagattgcagcgataccttgttcttgttggtctctgcattaatttctttatttctttgctaacaatcattcacacgtctcagcacttgtacttgtccctacattttgggtgggtatgcgttcacttgtctccgttatcatcgtataaggcgattcttgcttttatttcataaataaaagagaggacttatttgcacttattaattgaattgactgactgatttacctaaactggtttggaacgtcagagccccaaaaccatgaagttcccaactcgtaaagtccaggtttcgaaaactgcattgcaccagtaattctatcagtttaatattcagcgtatgacacttgattcttaatgcccgtatatgacactgtatgtcagcatcaagaatctgatatgtgtgtttacaggtacctcacgctgcaatctacgagaaattccagaccgtagagtgctttggccgtcttgagttttagatgtctggggaaaaaaaaagcaaatcactgggtgcgcgtgtgtgccttcaagtacgaatattctgctggagtttgtctactgtctgcttgctgcttgtcactgctattttaagctacactagactttcggtattgctcgaatgtgaatctgttgatgccaggcagaaaaattgcgtataaatgtgtaaactgtcgcactgacctatcagatattcgtcgtatatagagcgctgccatgttcaacctattttagcaggctgttttcggcaggatgacatttgtgctaccacgagtagctttgccggttggcagcttcca

SEQ ID NO: 40543 - DNA, 1313 bp, Zea Mays
tgaggttttaccttaccggcatcgcgactagaaatttatgaaatgcattgcaagagcaggcgagcaacgccaagtaaggatgcgaagaaggaacacgctgctgctcctgcagcagaagaagagcccattactgctggagcagtggatgagtgcagagaggaagatgacaactgtgacaacgcacagacagttgagcaacagcagccctctgacgacaggcagacagttgagcaagcttctcttcaggaaactgatccaggcaaagagacacatgtttcagaggctaaaacgctcacagcagatgctgatggaaatttgagttcaagccagcaaactggggagtacaatgaattgctgagacaatactatgagcttgaggagaagagtcggaacattcttgagcaacttcaacaaacaaactcttggaattatcaggcaccaggatatgcttctacaacccaacagcagcaagttcctgtctatagtgccacagcaccagaccttcactcttccaccactcaatcatcatgctgcaattggaatgttcccctggtatctgtctactgctgttcaactggccaaccaagtggaggttctgcttatatgccacctactgctggctgcagcgcaacattgacttgtgatcaatgcccagatgcaaacagtgcataccctagcgtttcaaacttcatgcaggtcccaacaaatgtatctatcaatgatgatcaagttgctaaggctgcaatgaagactgctgaaggtgccttcaattttatgagaagtacgatatctggacagcctggcgcccaaagaaatgaatctgatactgggaaggaggaaagcactgatatgggcacaaacctgaatcttgatagtgatcttgctgctctcttaaattcatggtatgctgctgggttctacacttgcaggtacctcacgctgcaatctacgagaaattccagaccgtagagtgctttggccgtcttgagttttagatgtctggggaaaaaaaaagcaaatcactgggtgcgcgtgtgtgccttcaagtacgaatattctgctggagtttgtctactgtctgcttgctgcttgtcactgctattttaagctacactagactttcggtattgctcgaatgtgaatctgttgatgccaggcagaaaaattgcgtataaatgtgtaaactgtcgcactgacctatcagatattcgtcgtatatagagcgctgccatgttcaacctattttagcaggctgttttcggcaggatgacatttgtgctaccacgagtagctttgccggttggcagcttcca

SEQ ID NO: 40544 - DNA, 2207 bp, Zea Mays
cctcgctcaccgcccctccaaccgccaccaccgctgggccggccgccgcccccaggcctgcctttcgaagcccggagtacattggaggctctttaagctccaccccaaaccctagccttgttggcgcactgtttttcttcgcgtttctcattcattcacatgtcaacgcttgtccacgcgttgctactgttggcagcgagcgcgttttaacaaaaaatgagtgataacctgatggaaaaggttagcgcctttggtgagcgcctgaagatcaccgggacggaggtcagcaagaagatgacggccggaatgagctccatgagcttcaagatgaaggagttgttccaggggcagactcccgctgataagattgttgaggacgccacctcggagaatctggacgggcctgattggaactcaaacttggagatttgcgacttgatcaacacagagaaagttaacagtgtggaacttatacatgggatcaagaagaggatcatgatgaaggatgcgagagttcagtacctctcattggtcctgcttgagactattgttaagaactgtgagaaggccttctcagaagttgcggccgaacgggttcttgatgagatggtcaggttgattgatgatcctcagaccgtggtgaataacaggaacaaggcccttatgctgattgaagcatggggagagtccggtgatgaactccgctatctgccagtctatgaggaaacgtacaagagcttgaaatcaagagtgcggtttcctggacgtgacaatgagagcttggctcccatatttactcccccacgatcagttgctgaagctgatgttgaaaccagcttgccccagcaggcgttcgaagacgtccatgttcatacatatactgctgaagaaacaaaagaagcgtttgatgtagctcgtaacagcatagaacttctttcgactgttctttcctcttcccctgagcaggatgcttcgcaggatgacttgacggccacactcgtgcaacaatgctaccaatctcagcacactatccagaggattattgagaccgtcggagacaacgaagctgtgctcttcgaggccttgagcgtgaacgacgagatccagaaagtgttgtcaaagtacgaggagatgaagcagcccagggcctcggagcatgcagaacagagagcagttgtcataccggttgccacagaacatgaagatctgactgctgccgtcaatgaagacgcccttgtcagaaaaccagctgccgcgagaacaaggtcaggtggggatgatgatatccttgatgatctggacgagatgatattcggcaagaagggaggtagcagctcccaggaagggccgaagaagccagatccaaagaaggatgacctgataactttttaagcgtacccttctataattgcagcctttgcttgctattttctggtgatgtacccactcggtagattgaagattccttaggatttggatcgattgtctattcgcatacgattcgtatctgccccctttcggtttgttcagtaaagtcgctgcactttctcagtcttgtttcatggatgagtcccagtcccagtcccagtgaccatgaatgtgttggatggtggattatgcaccaacggggggaaataaaatcatgacgggaataaatggtggtccttaattgacgaagcactcgcatacaaagcatatattgatagtacattctcggtacctcatgtttcacgcctgtacccatacactggattggcagtaaacgccactaccaaacgagttgcacgtagcaaggcatggaacctgagcgtcaagctcctcaggcggtcgcggctgccgcgagcttggcgcgcagctccctcctcaggatcttcccggacgccgacttggggatggagggggtgaagtacaccttgtgtagcctcttgtagaataccacctgaaaatcggcgcacgcgcgcacacgtacactgttatgtcagaacaaacttcttcatggcataagcaaggcgcgcggcgtgatccagcctgcgtgactggtgagtacctgcttggagatgaactccttgatggcgtcctccgcgatgtcggcgtcggcggcgcggaccacgaaggcgacggggacctcgccggcggcttcgtccttttgcctgccacgcgcatacatatacacacacacacactcagaacgagcagttttgttgcgg

SEQ ID NO: 40545 - DNA, 2338 bp, Zea Mays
caccgctgggccggccgccgcccccaggcctgcctttcgaagcccggagtacattggaggctctttaagctccaccccaaaccctagccttgttggcgcactgtttttcttcgcgtttctcattcattcacatgtcaacgcttgtccacgcgttgctactgttggcagcgagcgcgttttaacgcgcaacattactctaagcgaagtgcagtctagtttccagaattctgggttttcaactcccgcgtgaagtttgacatgaaaccttttctagtcatgacgccaatttgttatctaactaagacatgcccattttctcgactaattcggagtttctgcagcaaaaaatgagtgataacctgatggaaaaggttagcgcctttggtgagcgcctgaagatcaccgggacggaggtcagcaagaagatgacggccggaatgagctccatgagcttcaagatgaaggagttgttccaggggcagactcccgctgataagattgttgaggacgccacctcggagaatctggacgggcctgattggaactcaaacttggagatttgcgacttgatcaacacagagaaagttaacagtgtggaacttatacatgggatcaagaagaggatcatgatgaaggatgcgagagttcagtacctctcattggtcctgcttgagactattgttaagaactgtgagaaggccttctcagaagttgcggccgaacgggttcttgatgagatggtcaggttgattgatgatcctcagaccgtggtgaataacaggaacaaggcccttatgctgattgaagcatggggagagtccggtgatgaactccgctatctgccagtctatgaggaaacgtacaagagcttgaaatcaagagtgcggtttcctggacgtgacaatgagagcttggctcccatatttactcccccacgatcagttgctgaagctgatgttgaaaccagcttgccccagcaggcgttcgaagacgtccatgttcatacatatactgctgaagaaacaaaagaagcgtttgatgtagctcgtaacagcatagaacttctttcgactgttctttcctcttcccctgagcaggatgcttcgcaggatgacttgacggccacactcgtgcaacaatgctaccaatctcagcacactatccagaggattattgagaccgtcggagacaacgaagctgtgctcttcgaggccttgagcgtgaacgacgagatccagaaagtgttgtcaaagtacgaggagatgaagcagcccagggcctcggagcatgcagaacagagagcagttgtcataccggttgccacagaacatgaagatctgactgctgccgtcaatgaagacgcccttgtcagaaaaccagctgccgcgagaacaaggtcaggtggggatgatgatatccttgatgatctggacgagatgatattcggcaagaagggaggtagcagctcccaggaagggccgaagaagccagatccaaagaaggatgacctgataactttttaagcgtacccttctataattgcagcctttgcttgctattttctggtgatgtacccactcggtagattgaagattccttaggatttggatcgattgtctattcgcatacgattcgtatctgccccctttcggtttgttcagtaaagtcgctgcactttctcagtcttgtttcatggatgagtcccagtcccagtcccagtgaccatgaatgtgttggatggtggattatgcaccaacggggggaaataaaatcatgacgggaataaatggtggtccttaattgacgaagcactcgcatacaaagcatatattgatagtacattctcggtacctcatgtttcacgcctgtacccatacactggattggcagtaaacgccactaccaaacgagttgcacgtagcaaggcatggaacctgagcgtcaagctcctcaggcggtcgcggctgccgcgagcttggcgcgcagctccctcctcaggatcttcccggacgccgacttggggatggagggggtgaagtacaccttgtgtagcctcttgtagaataccacctgaaaatcggcgcacgcgcgcacacgtacactgttatgtcagaacaaacttcttcatggcataagcaaggcgcgcggcgtgatccagcctgcgtgactggtgagtacctgcttggagatgaactccttgatggcgtcctccgcgatgtcggcgtcggcggcgcggaccacgaaggcgacggggacctcgccggcggcttcgtccttttgcctgccacgcgcatacatatacacacacacacactcagaacgagcagttttgttgcgg

SEQ ID NO: 40546 - DNA, 2300 bp, Zea Mays
tatatatcgaagaacttttaacgactattagtggtttccactaaactgtgtttagctttttaacagctcacaacctacaacagctttttccacagctcacaaccaacaacaacttttttcacagccatagcacaaccaagcagactcaaaagaatagaagcaacaagctaaaagaactcaagtccttcaacaaagttgttcgtcttctgttaacacacgaggttaccctcaactaatgccaagacgagcttaagcatcctggtcaaggccccatgcacccgagtcagtggaccatgggatctttcttctccctaacaacatgaacacgtcagtctcaggtcctaaatagtttagctactctaccactatgtttcacattcaaacagagagattgtaagtataaagaaaggaggatagagaaatctgatggaggatggtttgcttcaggcactggcagggaggacaccaggcacctccaaggatcactccatggcatcacgccaaaccattgtaccctaacacaagatcagaaaccgttctgttgtgttttccccattgccgagtgtgaaggccgacatccatgccaacaatatattctgctgcctctgtaacaatacttgacttattaccttggtccaaagtgtttaaattgttgcgattggtagacagatcaaagcatctggtgcctgtgggaatcctttcttcactcatacattctagttaacagttaacaaatcccatgccctgtgacaagaaaacagcacacattggtaccattttcacttgcagacagtttgtcaaccttattgcacccgcgagaacaaggccacgggcaaatgttttcgatcacataatgggaagagggtaatgctcaaaccccaaccagcagctatgcaccgatgatgttcaccttcctctgaatatcaacacagcccaatcagcagcagctatgcactgatgatgttcaccttcaatatcaacacagcaaaactgggaattaccgattgccatcaccaaacaacaccttataaaaccgcctcctctcctctcttttctctgcactatccaagcgcgccgcttcctcatcctccacctctttctctttctttacctcaacctcccctctcctcctcttcttctcaatattcatccctcgccgccgttggttatactcatgcagcccctcctgcatcagctccccgagccgatccttggccaagaccaccggatccttctccctcagctctgacccctcgtaaccttcgcggagcaccactggtgagagagaggagctcgtgcaccaaggccaccgatcgcttctcggcttcggcatccgtgcccggcaaggcccactccgagtagggcgagatgtaaggcgtggaggcgttgaaatcctccatcttggcgtgtgacttgacccatgaggccggcagcgagcagctgaaccgtggggtcgagtcgctcgcggcctcgacggcggagacggcgagagagggagcccatctgacgagctctagctcagcggcgttgcggcggtgcgggtaggggtttgtgaggcggaagagatcggtgttggcggggacgaggcggaggaggtagtcatcggggaggccgagagggccccgcagcgcggcgagcttggaaacctgtaggcggcggccgcgggcgagcatgagcacgcgcgcgaggcggtccgccatggccggctcggaagccgcgacggcagcctcctccgcgtggacgagcgccgccatccgcttggtgaagccgaaatggggttcctgctcaccgccaccatcgtccgcggagaagacctcgaagcaggaagggtacttgctgagccagttggcggcgcgacccatgagatcgagtgtcttgaagcgggattggaggaaacgcacgggcgccgtgcgggacgggaagcggagtaggaggcgcttgatctggttgttgacgacccagcggcggttgcgccggagcgccgcctccagggcagggtccttaggggacgaccaccgtgccatgctcgccgacgacgcacgccagcggacgccgccgggatggggcgtcgaaacgccgccgaaagggttaacgcgagcggggctcgtgggcttcagccgttgtctgcaaatgggctttctgtagcacttgggtgactttctctggtatcctggctgggccttttggagttttggtgtgaccaactgaccatcgggtctttcgtcgtcatcgtcaatcaaaggacaacatagtgtatcattctctgaatagaaatgcaattataaatttatctcctaaaa

SEQ ID NO: 40547 - DNA, 3048 bp, Zea Mays
acacctcacatatatataacatgttcatcaattattttgtaaatgatatgcatatagtttcgttttgctggaatatggtagctcgtttagctcgcgagctggctcgttaacgaaccgagctggctcattaacgaaccgagctaggatgttagctcagctcgtgaaaaaattcaaacgagccgatccgagccgagccgagctgaccacgaaccgagcgagccagcgagccacgagtatttcgtccagccctacccacgcacaaaggcacaaatagtcgcatctcctacggcggtattgatagagagttcggtacggacgtgcagccaactttaaaccctacccgcccaaacccacacgactcacaagtcacagccatggccgccgccgctaaggcagcggccgtagccgtctccgcgggggcagccttcgtgctctcttccgagcgggcccacgctgacggtggcagctcgaccttccgcttccccggattctactcctccgccccggccccggccccgccccccgccgcgccgccgcatcagcagcccccaccgccgtcaggcggccagcgcgaggaagccccggaggaggctccgaaggtttctactcagcaccctcgcacgagtgccgcgggcttcgaccccgcgccgctggagcgtggggtggaggcgattgacaagctcaaacagtcgtcggaccctaaaaagctgttcgagtttatgaagaagcaggaggagacgcaccagcaggaaatagctgcgaagaaactcgagttgcagaaggcagtggccgagatcgagcttgagcaaaaacgagtggattttgaagagagaaaaaaacttgatcaacaacgagcgaaatttaagtcgcagacagctcagtatgaggatgagctaaagaggaagcgactgcaggctgaacatgaggcgcaaaggttaagaaaccaagagctcgtgaagatgcaagaggaatctgggattaggctagagcagatcaggcgggcgactgaggagcaaatccaggaacaacggaggcagacagagaggcaaagggctgatctagagcaggcgaccctttcaaagaaagccatggcagaggcggaggggagaatactagtaacaaagcaaactgaagatgtgaagaggcgattgcttttggaggagataaatgctgacagggagaagtggatccaagtgataaatacaacctttgagcatatcggaggtggtttgcgaacgatactaactgatcaaaataagctagtggtagcagtgggaggtgtaacagcacttgctgcagggatatacaccacaagggagggtgcaagagtagtctggggctatgttgatcgtattcttggtcagccatcactgataagggagtcatcacgggggaaatatccctggtctggttccctatcacgtgctacaagtaccctgactagcaaattgaagagtggaagcaacctagggaaggacgggaatgggtttggtgatgttattctaaatccttctctccagaagagagtgaagcagcttgctaatgccacagccaatacgaaacttcatcaagctcctttcaggaacatgcttttctatgggcctcctggcacagggaaaaccatggcagcacgagaactagctcgcaattctggattagattatgcactaatgactggtggagatgttgcaccattaggatcacaagcagtcaccaagatccatcagttgtttgactgggcgaagaaatctaacaggggtttgctcctcttcatagatgaagcagatgctttcttgtgcgagcgaccagtccaaggacatcgtccttgcgcttgccaccaacaggcctggcgatctcgactcggccgtcgccgaccgtatcgacgaggtcctggaattccccctgcccggggaagacgagcggttcaagctcctgaagctatacctggacaagtacgtcatcagagccggcgacaagcgcgagaagagctggctccgtttcttccgccgccagccccagaagatcgtggtgaagggcgtcaccgacgacctgatccgcgaggcggcggccaagacccagggcttctccggacgagagatagccaagatgatggccagcgtccaggcggctgtctacgggagcaaggactgcgagctaacccctggcctgttccgtgaggtcgtggactacaaggtcgctgagcaccagcaacggagaagattagccggtgaggagccaaagcaggatgcctaggttgaccctttttttttattcattcacccccgttttgccttcccgggatagatagcttcatcagacaacacagcctagctacacaatgtgcaggcgacgcccaactaaaagctcaatcagacaacagagccacggctcccagagacgtcggcacgtcgcaccagtcaagcagcgctaggatgttgtgcttaggcagttaggcgcactcgcggaggggactgcaggccgtgacctagcaccgctgctgtcaggctcgagccgcagccctggcaagtccgtcctcaccctcgtgctctgctgactgaagacatacagcaaaaccaataagggaacagtagtctgctgttaaggaagggaatgtcgaacttcaggcatacagcaagactaggctgttagtcggcaaggtttgttgtttgcacaacattagattcttctattcaaggcagattgctaatatgatcaaacacttagcctgcaacgcaagaaagattgcaagtatggtctgcatttgatactgaaaacaccttgtccttttatcctcctatcgtagaatccatcagtcaattaactaagaccaattaggcaacaggtttgcaccgtgtgatatacctttgctacaacggaaatgacacttcaagcatcgattaactaattctgtaccacaagaaagtctcataagactttgttcgtttacaccaattcagttctggattagcatgaattggaattaaattcatgtcacaattcatgtcccaaataatctaagtctacttaattttttttatttggttaaac

SEQ ID NO: 40548 - DNA, 2965 bp, Zea Mays
gatagagagttcggtacggacgtgcagccaactttaaaccctacccgcccaaacccacacgactcacaagtcacagccatggccgccgccgctaaggcagcggccgtagccgtctccgcgggggcagccttcgtgctctcttccgagcgggcccacgctgacggtggcagctcgaccttccgcttccccggattctactcctccgccccggccccggccccgccccccgccgcgccgccgcatcagcagcccccaccgccgtcaggcggccagcgcgaggaagccccggaggaggctccgaaggtttctactcagcaccctcgcacgagtgccgcgggcttcgaccccgcgccgctggagcgtggggtggaggcgattgacaagctcaaacagtcgtcggaccctaaaaagctgttcgagtttatgaagaagcaggaggagacgcaccagcaggaaatagctgcgaagaaactcgagttgcagaaggcagtggccgagatcgagcttgagcaaaaacgagtggattttgaagagagaaaaaaacttgatcaacaacgagcgaaatttaagtcgcagacagctcagtatgaggatgagctaaagaggaagcgactgcaggctgaacatgaggcgcaaaggttaagaaaccaagagctcgtgaagatgcaagaggaatctgggattaggctagagcagatcaggcgggcgactgaggagcaaatccaggaacaacggaggcagacagagaggcaaagggctgatctagagcaggcgaccctttcaaagaaagccatggcagaggcggaggggagaatactagtaacaaagcaaactgaagatgtgaagaggcgattgcttttggaggagataaatgctgacagggagaagtggatccaagtgataaatacaacctttgagcatatcggaggtggtttgcgaacgatactaactgatcaaaataagctagtggtagcagtgggaggtgtaacagcacttgctgcagggatatacaccacaagattcacatatttttccccagggagggtgcaagagtagtctggggctatgttgatcgtattcttggtcagccatcactgataagggagtcatcacgggggaaatatccctggtctggttccctatcacgtgctacaagtaccctgactagcaaattgaagagtggaagcaacctagggaaggacgggaatgggtttggtgatgttattctaaatccttctctccagaagagagtgaagcagcttgctaatgccacagccaatacgaaacttcatcaagctcctttcaggaacatgcttttctatgggcctcctggcacagggaaaaccatggcagcacgagaactagctcgcaattctggattagattatgcactaatgactggtggagatgttgcaccattaggatcacaagcagtcaccaagatccatcagttgtttgactgggcgaagaaatctaacaggggtttgctcctcttcatagatgaagcagatgctttcttgtgcgagtaagtgcaaacaaaatcttcagatactttttcttgtgcgagtagtgctcagtttctcacccataacttgcaaactgtagcgttgacatctcagaccgtttttgttttttttttggggtaccctacagacgaaacaaaacttacatgagcgaagctcaaaggagtgccctgaacgctctcctcttccgcacaggcgaccagtccaaggacatcgtccttgcgcttgccaccaacaggcctggcgatctcgactcggccgtcgccgaccgtatcgacgaggtcctggaattccccctgcccggggaagacgagcggttcaagctcctgaagctatacctggacaagtacgtcatcagagccggcgacaagcgcgagaagagctggctccgtttcttccgccgccagccccagaagatcgtggtgaagggcgtcaccgacgacctgatccgcgaggcggcggccaagacccagggcttctccggacgagagatagccaagatgatggccagcgtccaggcggctgtctacgggagcaaggactgcgagctaacccctggcctgttccgtgaggtcgtggactacaaggtcgctgagcaccagcaacggagaagattagccggtgaggagccaaagcaggatgcctaggttgaccctttttttttattcattcacccccgttttgccttcccgggatagatagcttcatcagacaacacagcctagctacacaatgtgcaggcgacgcccaactaaaagctcaatcagacaacagagccacggctcccagagacgtcggcacgtcgcaccagtcaagcagcgctaggatgttgtgcttaggcagttaggcgcactcgcggaggggactgcaggccgtgacctagcaccgctgctgtcaggctcgagccgcagccctggcaagtccgtcctcaccctcgtgctctgctgactgaagacatacagcaaaaccaataagggaacagtagtctgctgttaaggaagggaatgtcgaacttcaggcatacagcaagactaggctgttagtcggcaaggtttgttgtttgcacaacattagattcttctattcaaggcagattgctaatatgatcaaacacttagcctgcaacgcaagaaagattgcaagtatggtctgcatttgatactgaaaacaccttgtccttttatcctcctatcgtagaatccatcagtcaattaactaagaccaattaggcaacaggtttgcaccgtgtgatatacctttgctacaacggaaatgacacttcaagcatcgattaactaattctgtaccacaagaaagtctcataagactttgttcgtttacaccaattcagttctggattagcatgaattggaattaaattcatgtcacaattcatgtcccaaataatctaagtctacttaattttttttatttggttaaac

SEQ ID NO: 40549 - DNA, 3078 bp, Zea Mays
gatagagagttcggtacggacgtgcagccaactttaaaccctacccgcccaaacccacacgactcacaagtcacagccatggccgccgccgctaaggcagcggccgtagccgtctccgcgggggcagccttcgtgctctcttccgagcgggcccacgctgacggtggcagctcgaccttccgcttccccggattctactcctccgccccggccccggccccgccccccgccgcgccgccgcatcagcagcccccaccgccgtcaggcggccagcgcgaggaagccccggaggaggctccgaaggtttctactcagcaccctcgcacgagtgccgcgggcttcgaccccgcgccgctggagcgtggggtggaggcgattgacaagctcaaacagtcgtcggaccctaaaaagctgttcgagtttatgaagaagcaggaggagacgcaccagcaggaaatagctgcgaagaaactcgagttgcagaaggcagtggccgagatcgagcttgtgaggcatttctcatcccatcaccgtcgacctttgttttgttggttatgatattttggacgaaggaattatcacttcccaaactaacttaacagcagcaaggccttttagttccaagctcagctcgtctggggagcaaaaacgagtggattttgaagagagaaaaaaacttgatcaacaacgagcgaaatttaagtcgcagacagctcagtatgaggatgagctaaagaggaagcgactgcaggctgaacatgaggcgcaaaggttaagaaaccaagagctcgtgaagatgcaagaggaatctgggattaggctagagcagatcaggcgggcgactgaggagcaaatccaggaacaacggaggcagacagagaggcaaagggctgatctagagcaggcgaccctttcaaagaaagccatggcagaggcggaggggagaatactagtaacaaagcaaactgaagatgtgaagaggcgattgcttttggaggagataaatgctgacagggagaagtggatccaagtgataaatacaacctttgagcatatcggaggtggtttgcgaacgatactaactgatcaaaataagctagtggtagcagtgggaggtgtaacagcacttgctgcagggatatacaccacaagggagggtgcaagagtagtctggggctatgttgatcgtattcttggtcagccatcactgataagggagtcatcacgggggaaatatccctggtctggttccctatcacgtgctacaagtaccctgactagcaaattgaagagtggaagcaacctagggaaggacgggaatgggtttggtgatgttattctaaatccttctctccagaagagagtgaagcagcttgctaatgccacagccaatacgaaacttcatcaagctcctttcaggaacatgcttttctatgggcctcctggcacagggaaaaccatggcagcacgagaactagctcgcaattctggattagattatgcactaatgactggtggagatgttgcaccattaggatcacaagcagtcaccaagatccatcagttgtttgactgggcgaagaaatctaacaggggtttgctcctcttcatagatgaagcagatgctttcttgtgcgagtaagtgcaaacaaaatcttcagatactttttcttgtgcgagtagtgctcagtttctcacccataacttgcaaactgtagcgttgacatctcagaccgtttttgttttttttttggggtaccctacagacgaaacaaaacttacatgagcgaagctcaaaggagtgccctgaacgctctcctcttccgcacaggcgaccagtccaaggacatcgtccttgcgcttgccaccaacaggcctggcgatctcgactcggccgtcgccgaccgtatcgacgaggtcctggaattccccctgcccggggaagacgagcggttcaagctcctgaagctatacctggacaagtacgtcatcagagccggcgacaagcgcgagaagagctggctccgtttcttccgccgccagccccagaagatcgtggtgaagggcgtcaccgacgacctgatccgcgaggcggcggccaagacccagggcttctccggacgagagatagccaagatgatggccagcgtccaggcggctgtctacgggagcaaggactgcgagctaacccctggcctgttccgtgaggtcgtggactacaaggtcgctgagcaccagcaacggagaagattagccggtgaggagccaaagcaggatgcctaggttgaccctttttttttattcattcacccccgttttgccttcccgggatagatagcttcatcagacaacacagcctagctacacaatgtgcaggcgacgcccaactaaaagctcaatcagacaacagagccacggctcccagagacgtcggcacgtcgcaccagtcaagcagcgctaggatgttgtgcttaggcagttaggcgcactcgcggaggggactgcaggccgtgacctagcaccgctgctgtcaggctcgagccgcagccctggcaagtccgtcctcaccctcgtgctctgctgactgaagacatacagcaaaaccaataagggaacagtagtctgctgttaaggaagggaatgtcgaacttcaggcatacagcaagactaggctgttagtcggcaaggtttgttgtttgcacaacattagattcttctattcaaggcagattgctaatatgatcaaacacttagcctgcaacgcaagaaagattgcaagtatggtctgcatttgatactgaaaacaccttgtccttttatcctcctatcgtagaatccatcagtcaattaactaagaccaattaggcaacaggtttgcaccgtgtgatatacctttgctacaacggaaatgacacttcaagcatcgattaactaattctgtaccacaagaaagtctcataagactttgttcgtttacaccaattcagttctggattagcatgaattggaattaaattcatgtcacaattcatgtcccaaataatctaagtctacttaattttttttatttggttaaac

SEQ ID NO: 40550 - DNA, 5077 bp, Zea Mays
ctcatccactggtcccaccatccgtcccctagtccgccgcctcccgcctcacgcaccccaaattcaaatttcgaatcccagaaggacagcaccgttgcccttcggcttcgataaacacccctcaacccccattgctttctagccccagatccccaatccccaagaccccaacgcctcacgcacccctcaaccctaccgcagctgcgcaggcacacgacctccgtgtgcagcgcatcgccgccatgacgggtcccttacactccagctccggccacaacgccgccgccggcggcgggggcaagaccatcgaggaaatgtaccagaagaagacgcagctggagcacatcctgctgcgccctgacacctacattggctcggtggagaagcatacccagacgctctgggtctacgaggacggcgccatggtgaaccgctccgtcacctacgtccctggactctacaagatcttcgacgagatcctcgtcaacgccgccgacaacaagcagcgggatcccaagatggacgcgctccgcgtcgagatcgacgtcgacggctgctccatctccgtatacaacaacggcgacgggatacccgtcgaggtccaccaggaggagggcgtctacgtgccagagatgattttcggccacctcctcaccagtagcaactacaacgacaacgagaagaagacaaccggcgggaggaacggatacggcgccaaactcactaacatcttctccacggagttcgtcatcgagaccgctgatggacgtcgccaaaagaagtacaagcaggttttctctgaaaacatggggaagaagtcagagccccagattaccaagtgcaagcagggcgagaactggaccagggtcaccttcaagcctgatcttgccaagttcaacatgatccatctcgaagatgatgttgtagccctcatgaggaagagagtggttgatatggcaggcactcttggcaaaacagtgaaggttgagttggatgggcacagggtgcccataaagagcttctgtgattatgtcgacctgtatatgaagagtgctaactgtgacagacctgataatttcaaaaagatttatgagcaagtaaatgatcggtgggaagtgtgtgttagtcaaagcgaagggcagtttcagcaggtcagctttgtcaacagaattgccaccataaggggtggaactcatgttgattatgtcaccaatcaaattgccacccatgtgatggcttttgtgaataagaaaaacaagaatgcaaacatgaagctacacaatgtgaagagccatttgtgggtctttgtcaatgcgctgattgacaatccggcctttgattcacagaccaaggagaccttgaccactcgtcagggaagctttgggtcaaagtgtgagctttctagtgatttcctcaagaaagttgagaaatctagtgtaatcgataatgtcctctcttgggctgatttcaaacttagcaaagaattaaagaagactgatggaagcaagaagtcaagaatttctggcatccctaagcttgaggatgcaaatgaagctggtgggaaggactctcacaagtgcaccttgattctgactgagggtgactctgcaaaagctcttgctatgtcgggcatagctgttgtagggagagattactatggtgtatttcctctcaggggaaaactattgaatgtcagagaggcaaaccacaagcagataatggacaacgctgaaattcagaacataaagcaaatccttggtttgcagcatggaaagcagtatgatagcaccaaaggtttgagatacggccatctcatgataatgacagatcaggatcacgatggttcccacatcaaagggttgctgatcaatttcattcactcattctggccatcacttcttaaagttccatctttcttggttgagttcattactccaattatcaaggcaaccagaggccaaactactaagtcattctacacgttgccagagtatgaagaatggagaaataatttaggagcaagtgcaagttcatggactataaaatactacaaggggttaggaacaagcacagccaaagaaggccgaaagtacttcgaagatattactgaacataaaaaagattttctctgggtagatgaccaagatggcaatcatattgaattagcattcagcaagaaacggattgctgataggaaacagtggcttacaaattttcagcctgggacatacattgaccaacgtgacaaacatgtcaagtatagcgatttcatcaacaaagagctgatactcttctcaatggcagacctgcagcgatcaataccttcaatggttgacggccttaaaccaggccagaggaaaattctgttttgctcattcaagaggaattttgttaaggaagctaaggtggctcagttctctggttatgtgtcagaacactcagcataccatcatggtgagcagagtttagcaggtacaattattggaatggctcagaactttgttggcagcaataacatcaaccttatgtaccctagtggtcagtttggcaccagagctcaggggggcaaggatgctgcgagtcctaggtacatcttcaccaagctgtctcatatcacacgttcaatttttccgaaggatgatgatattcttcttaattatctgaatgaggatgggcagtcaattgaacccacctggtatatgccaatccttcctatggtcttggtcaatggtagtgaaggaattggaactggatggagcacatatattccaaactacaatccaagagacattcttgctaacctcaggcgattgctgaatggagagtctactgtaccaatgcacccatggtacaggggatttaagggctctatagagaagacagtcaatacaaaggtagctggttccacatatactgtcactggaatcattgaggttcttgacaacactacactgaggatcactgaattgccaatccgccgttggactcaggattacaaagattatcttgagagtttggctccagatactaagaacaaggacaaagtaccattcatagaggatgtcacatgtcaaggtgataatgaagatgtttacattcagttcacattaagtgagaaaaatatgaatatagctatggaagaaggactagtgaagaagtttaagctgacaacaacaattgggacatcaaatatgcacttgtttgattcagatggtaaaattcggaagtatgacactcccgagcaaatacttgaggagttctgtcatttaaggcttgaattctattgtaagagaaaggaagcattgttgaaaagcatcaagttggacttaaagaagcttgaaaacaaagttaggtttatccgctgtgttgttgataatgaaattatagttaacaaccggaaaagggcagatctatttttggagcttcggcagaagaattttgatcctttcccaaagaaaaaaaagagggctgaaccagctgctgtaggtgctttagaagaggaggaaaatgaagagagtcctgaagctgctggagcggaacctagtgactatgagtatctcctctcaatgtcaattggtacgttgactttggaaaagatacaggagcttaatgctgagaaacaaaaattagtggatgatgttgaggaattggagaatatgtcaccaaaatcactatggttgaaagatcttgatgcttttgagaaagaactggatgtgcttgatcaaatggatctagcagaggaactgcaaagggaaaagaggataaatgctggcaaaaaaggaggatcaaaagctgcacccaagaaaccacgtaaaaaggctgcatctaaaaagctggatagcgatacagaagatgatgattttgaaccagcggttgcaaagcgtggagctcaaccgaagaaaacatccagcaaggcaaatgattctgcgtctgaagatggagattatgtggctgctgaaaatcaaaagaaacaatccaagaaagcaagtgcccatgtggacgaagaagttgacatgccttcgttaaaagaccgtctggctgcttttaatatcagcgactcctctccggatcattctgccatggaaactgaagtaacagaattgacagaacagcagaatgaaaacaaagcgacagagggagcaagcaaaagaggcggacgaaagaaggcgtcatcatccttggcgacgataccatctgatgttgatgaggaagtcctagaggtccaagctcagaagaaaggtagaggaaggaagcctgctgccgttgtgaagcccaaggctcctgccgccgccaggaaaagggcgccggctcagggcaaggtaacacagaagaaaatagatgagatgctcaaggccactgaggataacaacaccagtgcatcttcccctgagaagaaggtccggaagatgaggtcctctcccttcaacaagaagagcggctcaatcttacagagaggctcgaccgcttctgcaagctctggaacaactgttgaagcttcaccaccctctggcagctctgcagagccagttggtgctgcacaacctagaaggacagccagggctaccaagaagcctatctatattagcgatagcgaccctgaggatgaagtggagttgattgatgattcggactttgatgcggacggtgactctgacgagtgaagattgtagtcatccgtactttggctgcaacaatatccagtttgtgtcgttgcatgtgacaatttgataatgcatttcttgtgcgttgtatgtgttcgttgcgttgttcagaactgttgccaagagctcaagacaacctggttaactggttaactgaattgtatgtctaattttggcatacaagtgtgcctgtggtatgttttatgctctgatgctggcatgctgctctcagagcgcccattgtgtgcattatcaaagtttgtgcggggagtttccagggttatatataccaaatctaagtagttgaagaatctagctacatttcatcaacatcggggatggtttctaggtgatgagcatctaaatttttgatttattttacaaagaataagtctacataacccactgatttttag

SEQ ID NO: 40551 - DNA, 856 bp, Zea Mays
caccatccgtcccctagtccgccgcctcccgcctcacgcaccccaaattcaaatttcgaatcccagaaggacagcaccgttgcccttcggcttcgataaacacccctcaacccccattgctttctagccccagatccccaatccccaagaccccaacgcctcacgcacccctcaaccctaccgcagctgcgcaggcacacgacctccgtgtgcagcgcatcgccgccatgacgggtcccttacactccagctccggccacaacgccgccgccggcggcgggggcaagaccatcgaggaaatgtaccagaagaagacgcagctggagcacatcctgctgcgccctgacacctacattggctcggtggagaagcatacccagacgctctgggtctacgaggacggcgccatggtgaaccgctccgtcacctacgtccctggactctacaagatcttcgacgagatcctcgtcaacgccgccgacaacaagcagcgggatcccaagatggacgcgctccgcgtcgagatcgacgtcgacggctgctccatctccgtatacaacaacggcgacgggatacccgtcgaggtccaccaggaggagggcgtctacgtgccagagatgattttcggccacctcctcaccagtagcaactacaacgacaacgagaagaagacaaccggcgggaggaacggatacggcgccaaactcactaacatcttctccacggagttcgtcatcgagaccgctgatggacgtcgccaaaagaagtacaagcaggtcaaatttcaagatactgagcgtggttattaaaaagtcgcttaagcgtcttttaagcgtcaaaacgctgctaagtgcct

SEQ ID NO: 40552 - DNA, 3526 bp, Zea Mays
tgtcaggttgctttgactgaaattttgttcagttcactgaaactaaaattcagtaaaaaggtactgagtttggggctcatttgtggctaatccatttggttttgggctaaattttatatatataatttgaagatcacagtaaggtaaacaagtttatgcaaataattggtcttgttactgtgtgtaatttggagataatagtgttacaaaactccctgtcagattgggtgcagagctgtttcagacctctgaaactgaattttcagtgtttttactaaattttggatcaccacaacccttgttctatatgatttcagccatgagtttctattcaaaataggtagagatatccatggagaataacttttgtgaagggatagtggtctgttactaaaagaaattgggtgatcaatgcagctaaacaatgaaatgtgcaagggggcagtgttggctgattcagtaaactcagaggactgaaactgtgttttagtgatgtgtggccaacttcagagccacataacttgtgatcaacatattttgggtcctggatttttatagtaaacctgaagagccatggttggggaacaaatctattcaggaatgcttgagctatccttgtttggaatagagagaaaaaggtgttcgaactatgtctatcaggcatgggaatgcaaacctgaatcagtcactgtggatttggttcagtatttttctcctgactttggagctgtttagtgtctgatctaaggattataaggattaagtctgtatggaagattgatagtgggttagttggtgaacaaggttccttaaggtcggttcccctgttgttgcttggagctgggaaaaataaaaaggtgaagctgtgaactcagtcaaacagcagcagttcggtgtactccaaaaatatctgaaggagatctttttatccctgctggctgcactagcgtgtagaaatgaagataaggttgtagtgaatagttgaaggtcctagaggtctcactccccactaaaatatccaatttggactgcatggggggcagtgggcagtagaaatcttatctattttgtctactacctacagatttggacaaagtgatatttatgtgtgggagctgagccaacgaggtgtagtgcttgtatgccacgtttttgaacctttggtgtgctggcactctaggaatcctccttcatcaagcgtggctgagctccactgcacctgcccctatattcagtaccttgggctgccgtattgagtgaagatttcttccttgccctcaaattctagccaaagttcactgcttgagtgtgcagtccttatgtactgctggtataaccccctccctagcccaggtttgcccccttctccccatggactggatgcgctcagtgacccctccccctgcctatttattcagtgtgttccacggctgagttcagaaaagcttttctcccttgttctcgagctgtagtcccagtccactacaaaggtgttggagtcctggtattcttgctggtgtgcatcctctctttcagccaccaagtttgttttactctagagctgaatgccaacctcttgcctgtggtgaccaaacccaaccgtttttcacctccccgtggacaaggtttcccacaagtattcttggtcgtgtactacttgttccatgctcggcaaaggcgaagttttattcccttatctttgggttagttacttcatgtggaagacttcaagcttagaaggtttttatatatctcttatgaaaaggcttcacccttccaattattgtagttaagttatgcccttcgagtactatcaggacttgtaataaatacatctctttctaccatgtaaaacttgtgttctagaatgtaaagtgtactttgtaaaagtcttccgctctatctccaatgtgtgcgtatcaaatgtgattactgtaatatacctgttatgtgggagatccttgggatgatgagttccagttggcgaactcgatagccttgttaagttacccggtacacgtgcacagccatctgaggcctgtaaggcaaggattggtgcatgtgggcctgataacttgggagggctgtcacacagcccccacacagcaaacggccaggtgatgggtatcgtttgcagggcctgagcgggcaggtaggtctgccttacgtagaattgacacccttggcaggtgcggacaattctagtggcgtcagccaccgcggtcagccagtagaaaccttgtcggaaggcgtttccaacaagggctcggggcgccgcgtgatgaccgcaagcccccgagtgtatctcttgtaagagctcctggccttcggcgatggatatgcatcgctggaggatgcccgaggggctgcggtggtagagctccttttcgtctcccagcaagacgaacgacttggcgcgccgcgccaaccgtcgagcttcggctcggtcgaggggtagctctcctcggtggagatattgcaggtacggggtctgccagtttcgattaggcgtgaccccgctccgctcctccttgacgtgcattgcctcaccttcgggggccgagggtgcctcgggctgggccgaggccttctcgggctcgggcgtgtcgtcggtcttgacggagggttgatgcaggtctcgggagaagacgtccgggggaaccgttgttcgccccgaagctatcttagccagcttgtccgcagtctcgttgtagagtcgggcgatgtggttgagctcgagcccgtagaacttgtcttccaggcgccgaacctcatcgtagtaggcttccatctttgggtcgcggcagtgggagttcttcatgacttggtcgatgacgagctgtgagtcaccgcgagcgtcgaggcgtcggacccctagctcgatggcgatgcgcaacccgttgactagagcctcgtactcagccacattgttggacgccgggaagtggaggcgtagcacgtagcgtaggtgcttctcgaggggcgagatgaagagcaggcccgtgcctgcccctgtcttcatcagcgacccgtcgaaaaacatggtccagagttccggttggatcggagctgttgggagctgggtatcgacccattcagccacaaagtccaccaagacttgggacttgatggccttacgaggggcgaacgagattgttgagagcacctagagggggggtgaataggtgatcctgtaaaagcttaaacttatagccacaaaactttgattaagcgttagcacagtttatgccaagtggctagagaggagtcaaaaacacaataaccacaagaattcaatcgcagagatgacacggtggttatcccgtggttcggccaagtacaaaacttgcctactccacgttgtggcgtcccaacggacgagagttgcactcaactcctctcaagtgatccaatgatcaacttgaataccacagtgttcttgcttttcttttctcaatcccgtttgcgaggaatctccacagcttggagcctctcgcccttacaaaagatgttcacagagaatcac

SEQ ID NO: 40553 - DNA, 950 bp, Zea Mays
gtgtactccaaaaatatctgaaggagatctttttatccctgctggctgcactagcgtgtagaaatgaagataaggttgtagtgaatagttgaaggtcctagaggtctcactccccactaaaatatccaatttggactgcatggggggcagtgggcagtagaaatcttatctattttgtctactacctacagatttggacaaagtgatatttatgtgtgggagctgagccaacgaggtgtagtgcttgtatgccacgtttttgaacctttggtgtgctggcactctaggaatcctccttcatcaagcgtggctgagctccactgcacctgcccctatattcagtaccttgggctgccgtattgagtgaagatttcttccttgccctcaaattctagccaaagttcactgcttgagtgtgcagtccttatgtactgctggtataaccccctccctagcccaggtttgcccccttctccccatggactggatgcgctcagtgacccctccccctgcctatttattcagtgtgttccacggctgagttcagaaaagcttttctcccttgttctcgagctgtagtcccagtccactacaaaggtgttggagtcctggtattcttgctggtgtgcatcctctctttcagccaccaagtttgttttactctagagctgaatgccaacctcttgcctgtggtgaccaaacccaaccgtttttcacctccccgtggacaaggtttcccacaagtattcttggtcgtgtactacttgttccatgctcggcaaagaaggagtgaagattcaagctgaagtggtgactgaagaggaatctactccagtggctgctgatcaagtggaggagccatctaactggggtttaatagagggatcgagtacctcttcactgcaataaggatccgtgggaatgattgacatatgcaagggttaagtgct

SEQ ID NO: 40554 - DNA, 2283 bp, Zea Mays
gttgaaggtcctagaggtctcactccccactaaaatatccaatttggactgcatggggggcagtgggcagtagaaatcttatctattttgtctactacctacagatttggacaaagtgatatttatgtgtgggagctgagccaacgaggtgtagtgcttgtatgccacgtttttgaacctttggtgtgctggcactctaggaatcctccttcatcaagcgtggctgagctccactgcacctgcccctatattcagtaccttgggctgccgtattgagtgaagatttcttccttgccctcaaattctagccaaagttcactgcttgagtgtgcagtccttatgtactgctggtataaccccctccctagcccaggtttgcccccttctccccatggactggatgcgctcagtgacccctccccctgcctatttattcagtgtgttccacggctgagttcagaaaagcttttctcccttgttctcgagctgtagtcccagtccactacaaaggtgttggagtcctggtattcttgctggtgtgcatcctctctttcagccaccaagtttgttttactctagagctgaatgccaacctcttgcctgtggtgaccaaacccaaccgtttttcacctccccgtggacaaggtttcccacaagtattcttggtcgtgtactacttgttccatgctcggcaaagaactcctaccagaaggagtgaagattcaagctgaagtggtgactgaagaggaatctactccagtggctgctgatcaagtggaggagccatctaactggggtttaatagagggatcgagtacctcttcactgcaataagagtggaatttgaaataggagatcagatagtggatctgctgaagatagccttaggacgacaatgggggcttggctagagctcctcgtggtcatcaattcttgtgctctgaccatagttattaaagcggtaaggcgatgtaagacaactgacccccttttatgttttaagcggtaaagtgtaaggtgaaggggcaccatattaaatagtaatataacactttaattatatagtagtataaaagattagaccaaatattatttatataacactaattcaaaattaattaagtaagctaacacaaatataagacctagtaggcctatttcaacctagtagaggagagaaatagaaaaaaccacaacaaggcccaactaacccatcccaatagttttagattaaaatctacggtctctagccagctctccttcccctctcatgtgcagttgccgctctttcttccaccgccagtcgcctctctaccttctgtcgttagccgcaactctctctctctctaccctgtagctccttctctctccctaccgcgactctccttcctcctcttactggccagctaggtcacacactgccgtcgcgccctcacatctggtcaagacgtccacgaagctatgtctaaattggttcaaagcactagagagacaccttaacaaataagcgaacgccttagactattgagtaaggcgacctagatggctcaggctatctccagcagcttatccatccctatccccatattcaaactccactctacgaacagtgcagtgtacaatgcagaacaatataaaacagtgtttttgaaaacagtgtttttgagtaaactttggatagactgctgcagacagccttacaatggctctcgccaatcctttcgagcaatggtggcttcgaatggacttggcgctcggccatgtaggccttctttatatagctattactcacacgtctacatgactagtgtagctttcagatctctgacttattagaagaattagttaaaatttaactgtgatcaacataccattgaaatcattagctgaagcgagctctggagaaaactgaaaaaaacacattgacattgatgtcttgtcatcctcgaactctgtgaattgtatctccgtatgaaggaaaaacaaaacagcagtttcaactttcaaaagaacaatagttgctgccacaggaatctgtgcagtttcttcttcaaagaaaaagaagggaaaaaaaagactgcatcttcttcctatcctacgtactgttgtactgtaccgctgtccgtttgtatggatatacgagccgttgagcggttgagccgctagcccgctgtttgcatcctagttaccctttaccagtcaccaatttgcaactgtgcaaaaacaaaatgcagtggaatctccaagaccatgatggaggcgagttgagcaatcttgtagttg

SEQ ID NO: 40555 - DNA, 4462 bp, Zea Mays
agccgccgtcgtcatggagcatgcggggcgccatcattacttgtttatcggggcgagccagatgggacgctggtcttgttccccgtagcctaagttagcttggagtagggtaatgatggcgcctcctgtgacgtggtcggtccgagccctgggttgggcgaggcggaggctcctccgaggtcgaggtcgagtctgtcttccgaggtcgagtccgagcccctgggtcaggcgaggtggagaccgtcggctgaggccagggctgagtccaagccctggggtcgggcgaggcggagttcgtcgtcttccagggctgagcccgagtccgagccctggggtcgggtgagcgcggagttcgtcgtcttccggggctgagcccgagtccgagccctggggtcgggcgaggcggagttcatcgtcttccggggccgagcctgagtccgagccttgggtcgggcgaggcggagttcgtcgtctttcggggccgagcccgagtccgagccctgtggtcgggcgaggcggagttcgtcgtcttccggggctgagcccgagtccgagccctgggtcgggcgaggcggagttcgtcgtcttccggggccgagcccgagtccgagccctggggtcgggcgaggcggagttcgtcgtcttccggggccgagcccgagtccgagccctgggtcggggcgaagcggagttcgtcgtcttccggggccgagcccgagtccgagccctgggtcaggcgatgcggagttttctatggcgcccgaggccgaacttggctgctgtcagcctcactctgtcgagtggcacaacagtcggagtgtcgcaggcggcgctgtcctcttgtcaggccggtcagtggagcggcgaagtgactgcggtcacttcggctctggcgactgaagggcgtgcgtcaggataaggtgtcaggccacttttgcattaaatgcttctgcgaaacggtcagtcggcgtggcgacttggccaagattgcttcttggcgaagactgggcctcgggcgaaccgaaggtgtgtcctttgctagagggggtcctcgggcgagacataaatcctccggggtcggctgccctttcccgaggctgggctcgggcgaggcgagatcgtgtcccttgagtggaccgagccttgacttaatcgcacccatcaggcctttgcagctttgtgctaatgggggttaccagctgagattaggagtcttgggggtacccctaattatggtccccgacaactttgcacacatagctcatttatgtatctttgatcatatttccttcatgtgctatgactaatgtattttaaggtaaattcttatgctaagtcatagattgaaagggaaatggagttcttcggcgaagacaaggcttccactccactctatcgatattatttagccttcgccgtcactccacatcgctctccactttggtataatcttcactcatattcatttgtaccattggggagaaagtcaaagggctctaaagacttcgtttttggtgattaattccaaagggggagagagtattagcccaaagcaaaaggaccgcaccaccacgccaatttcaaaaaaaatcgaaacaagttgttttcaattggtatatttcaaattagtattcctctaacaaattctatttcatttggtatctaaaatattttgatcttctttcaaatggtaaaaaccctcttgaacactaagaggagaatttcattaaagggggagttttgtttagtcaaaggaaaagcatttgaaacagggggagaaaacttcaaatcttgaaaatgcttctcgaaatcctattcatatacctttgactatttgcaaaaagcctttgaaaagattttccaaaagaatttgcaaaaacaaaacaagtggtgcaagcatggtccaaaatgttagaagaaagaaaacaatccatgcatatcttatgaaagtataaattggtttaattccaagcaacctttgcacttaccttatgcaaactagttcaattatgcacttatatatctgctttgatttgtgttggcatcaatcaccaaaaagggggagattgaaagggaaatagggtcaaaccttttcctaaatgattttggtggttgaattgcctaacacaaataattggactaactagtttgctatagattacaagttctacaggtgccaaaggttcaacacaaaccaataaaaaggtccaagttagggttcaaaaggaaggagcaaaagaaaccaaaggctgtgctgttctagcgcactggactgtccggtgtgccatcggacagtgtccggtgcaccaccgaatagtgtccggtgcaccagggtggatcaactcgaactcctcaccttcgggtttctgaggcgactctccgctataattcaccggactatccggtgtgccaagcggagcaacggtcgccagcgcaacggtcgactccaacggtcggctgacacagcgaacagtgcagagtcagagcagtgccagaagacgcactggacagtgaacaatgactgtctgatgcaccaccggactatccggtggcccaggctatcagagctccaacggtcgaaccctaacggttaggtgacgtggctggcgcaccggactgtccggtgcgcccatcgacagcagcccaaccccagcggttggtttggtggttggggctataaatacccccaaccaccaccactgcaaggcatccaagttttcagccattgcattcaatacaagagctctagacttcactccaagacacaaatcaagagatcaaatcctctccaagtccaaattcactccaaacacttagtggctagtgagagagagatattcgtgttcatttgagttcttgtcgcttggatcgctttccttcttccccattcttgttctcaacaactttgtaataaaagcaagagacaccaagttgtggtggtccttgtggggtctaagtgacccaattgattgaggagaaaagctcactcggtctaggtgaccgtttgagagagggaaagggttgaaaaagacccggtctttgtgaccacctcaacgggaagtaggtttgcaagaaccgaacctcggtaaaacaaatcaccgtgtcatccgctctatttctttggttgatttgttttcaccctctctttcgaactcggttatatttctaacgctaacccggtttgtagttgtgcttaaagtttataaatttcagatttgcctattcacccccctctaggcgactttcaataactatagatgatactgtttgacattgtttgcagagtggaatttgaaataggagatcagatagtggatctgctgaagatagccttaggacgacaatgggggcttggctagagctcctcgtggtcatcaattcttgtgctctgaccatagttattaaagcggtaaggcgatgtaagacaactgacccccttttatgttttaagcggtaaagtgtaaggtgaaggggcaccatattaaatagtaatataacactttaattatatagtagtataaaagattagaccaaatattatttatataacactaattcaaaattaattaagtaagctaacacaaatataagacctagtaggcctatttcaacctagtagaggagagaaatagaaaaaaccacaacaaggcccaactaacccatcccaatagttttagattaaaatctacggtctctagccagctctccttcccctctcatgtgcagttgccgctctttcttccaccgccagtcgcctctctaccttctgtcgttagccgcaactctctctctctctaccctgtagctccttctctctccctaccgcgactctccttcctcctcttactggccagctaggtcacacactgccgtcgcgccctcacatctggtcaagacgtccacgaagctatgtctaaattggttcaaagcactagagagacaccttaacaaataagcgaacgccttagactattgagtaaggcgacctagatggctcaggctatctccagcagcttatccatccctatccccatattcaaactccactctacgaacagtgcagtgtacaatgcagaacaatataaaacagtgtttttgaaaacagtgtttttgagtaaactttggatagactgctgcagacagccttacaatggctctcgccaatcctttcgagcaatggtggcttcgaatggacttggcgctcggccatgtaggccttctttatatagctattactcacacgtctacatgactagtgtagctttcagatctctgacttattagaagaattagttaaaatttaactgtgatcaacataccattgaaatcattagctgaagcgagctctggagaaaactgaaaaaaacacattgacattgatgtcttgtcatcctcgaactctgtgaattgtatctccgtatgaaggaaaaacaaaacagcagtttcaactttcaaaagaaca

SEQ ID NO: 40556 - DNA, 2488 bp, Zea Mays
gaagcggagttcgtcgtcttccggggccgagcccgagtccgagccctgggtcaggcgatgcggagttttctatggcgcccgaggccgaacttggctgctgtcagcctcactctgtcgagtggcacaacagtcggagtgtcgcaggcggcgctgtcctcttgtcaggccggtcagtggagcggcgaagtgactgcggtcacttcggctctggcgactgaagggcgtgcgtcaggataaggtgtcaggccacttttgcattaaatgcttctgcgaaacggtcagtcggcgtggcgacttggccaagattgcttcttggcgaagactgggcctcgggcgaaccgaaggtgtgtcctttgctagagggggtcctcgggcgagacataaatcctccggggtcggctgccctttcccgaggctgggctcgggcgaggcgagatcgtgtcccttgagtggaccgagccttgacttaatcgcacccatcaggcctttgcagctttgtgctaatgggggttaccagctgagattaggagtcttgggggtacccctaattatggtccccgacaactttgcacacatagctcatttatgtatctttgatcatatttccttcatgtgctatgactaatgtattttaaggtaaattcttatgctaagtcatagattgaaagggaaatggagttcttcggcgaagacaaggcttccactccactctatcgatattatttagccttcgccgtcactccacatcgctctccactttggtataatcttcactcatattcatttgtaccattggggagaaagtcaaagggctctaaagacttcgtttttggtgattaattccaaagggggagagagtattagcccaaagcaaaaggaccgcaccaccacgccaatttcaaaaaaaatcgaaacaagttgttttcaattggtatatttcaaattagtattcctctaacaaattctatttcatttggtatctaaaatattttgatcttctttcaaatggtaaaaaccctcttgaacactaagaggagaatttcattaaagggggagttttgtttagtcaaaggaaaagcatttgaaacagggggagaaaacttcaaatcttgaaaatgcttctcgaaatcctattcatatacctttgactatttgcaaaaagcctttgaaaagattttccaaaagaatttgcaaaaacaaaacaagtggtgcaagcatggtccaaaatgttagaagaaagaaaacaatccatgcatatcttatgaaagtataaattggtttaattccaagcaacctttgcacttaccttatgcaaactagttcaattatgcacttatatatctgctttgatttgtgttggcatcaatcaccaaaaagggggagattgaaagggaaatagggtcaaaccttttcctaaatgattttggtggttgaattgcctaacacaaataattggactaactagtttgctatagattacaagttctacaggtgccaaaggttcaacacaaaccaataaaaaggtccaagttagggttcaaaaggaaggagcaaaagaaaccaaaggctgtgctgttctagcgcactggactgtccggtgtgccatcggacagtgtccggtgcaccaccgaatagtgtccggtgcaccagggtggatcaactcgaactcctcaccttcgggtttctgaggcgactctccgctataattcaccggactatccggtgtgccaagcggagcaacggtcgccagcgcaacggtcgactccaacggtcggctgacacagcgaacagtgcagagtcagagcagtgccagaagacgcactggacagtgaacaatgactgtctgatgcaccaccggactatccggtggcccaggctatcagagctccaacggtcgaaccctaacggttaggtgacgtggctggcgcaccggactgtccggtgcgcccatcgacagcagcccaaccccagcggttggtttggtggttggggctataaatacccccaaccaccaccactgcaaggcatccaagttttcagccattgcattcaatacaagagctctagacttcactccaagacacaaatcaagagatcaaatcctctccaagtccaaattcactccaaacacttagtggctagtgagagagagatattcgtgttcatttgagttcttgtcgcttggatcgctttccttcttccccattcttgttctcaacaactttgtaataaaagcaagagacaccaagttgtggtggtccttgtggggtctaagtgacccaattgattgaggagaaaagctcactcggtctaggtgaccgtttgagagagggaaagggttgaaaaagacccggtctttgtgaccacctcaacgggaagtaggtttgcaagaaccgaacctcggtaaaacaaatcaccgtgtcatccgctctatttctttggttgatttgttttcaccctctctttcgaactcggttatatttctaac

SEQ ID NO: 40557 - DNA, 728 bp, Zea Mays
aaattcttttgttagaaccaattgtaactaatcattagtgcataagctttaaaccccccgcgagaccttttcccgtttctttctaaccataatgaatgcgatatcgaatgtcatacttgatgcatattcactttatttgttcccttgtatgatgtactgtttgtttcccaatttgaatggatgaatgtatgtatgcttgcaatcgcatagagaacgatccggttgaagagcccgaggaactcgcaggagaagcccctgagcaccggtcgtttggtggaggcaagtgtcccttgacctatctctgtcctaatcattatttaattcacctcccgcattacacatttatgcctaaggattgactagcttttgttatccatgtccttgtttacctatttgggttggattattactgtttagctttatgctattgctcaaactctaatcaatgaacatgatgagattatctatgatacgttgttttcccttctcttatttatgatgttgtacttgtggcctttaagggggctcgagcggtttctcgagtgcctctccgtaaggacctgttctatggatgaccgcccgggaaaacagtgcaaccatgagggtggaatggggtgcccttagctgaataattagaggatccggggtgtagttcacttagccgtcgtaccgtcaatggggctcggtgtatgcggctcgctctgccaagtttgggttcgccccttggg

SEQ ID NO: 40558 - DNA, 898 bp, Zea Mays
ccagctattactactgagttcatatgaaatggcgtatgaaaggagtatagttcaattgtgtccactaaactgcaattttgctctcaaaaagattcgttcccaacaaattgcgtggcaagggaacaaatggggtctcagatcacaattatggattcaattctgctgctggagttctaaaaggtgttgggaccttctgtatggactatcagactgcagtatttgagaagatctagagcatcgtctattggtgcaacatcacattctatcagaagtgaaccttacaggtgataggtgtactgcagttcataatgttgtgctgtctccatgatcgccgcttgatttggagttcccaaaaacaaatcacatgtacaagggagtatttgcaaggccttctggacaccctcgtattggcaagtaattgaatggctcttgctttgctggcagttacttggaactctgtacctattgcagagcttcagggagagatcacaaagactgccttgtttggctgtctggtcaaggcagtgctgcctgaccagacagcaacccagcccgtcgattttctgcccctggtctgggggacgctgccgggctgacaaacatgttgcagtagaggaagaagataccaagatgtgctttgtcattgaaagcataatgtcgcaagttcaaagataaaatgcaaacacgcgattcagttctgttacctctctaccttagtattcgaaagccttctcccactgttcaaatttgtaatgttataccccagtagggaaaacctggcaaaacagctaacataagttaaaactgtaaataatacttcatgctaaaaaacgggcagaaggtattgcacagattgatttgatgcctggtaatctaaggtggtcaaattccacggttc

SEQ ID NO: 40559 - DNA, 1735 bp, Zea Mays
actagccgttggtcctgcggtgcggcgggcgttccggcttcgctcttgcctcttgctacaaataaccattcacggccgatccctaaaccccacaaagcaaagcagcctctctctctctgtctctctctctcgcctccctctcgcctccctctcgacgacgatctcaggcgctcgcggggagtcgagtcgagaccagcttcgttccttcataaaaagctcacttagttgttgtccccgcctctttttttcgctgttcttgtttgattacatcatcttattttgtgcttgaatctaacctgccattaagtttttatcgcttcgttatttctctgttgtgcttgtcttgttcttttgttgctctaaccatggacgcaggctcccgctcgatctcctcggcgaagaaccgcgccgccgccgtcgccgccgcgccccggccaccgctgcaggaggcgggctcccgcccctacatgccatcgctgagctcgggaccccgcaacccgtcggccaagtgctacggcgacaggttcatcccggacaggtcggcgatggacatggacttggcgcactacttgcttactgagcccaggagggacaaggagaacgcgtcgggcatggcggcgtccccgtccaaggaggcgtaccggaggctgctcgcggagaagctgctcaacaaccggacacggatcctcgctttcaggagcaagccgccggagcccgagaacgtttcttttgcggacacgacttcctccaacctgcaggccaagccggccaaacagcggcgccacattccccagtctgccgagaggaccctagacgcaccagagctagttgacgactactacctcaacttgcttgactggggaagcaacaacgtgctatccattgctttgggagacacggtgtacctgtgggatgcatcgagcggatccacatccgagcttgtgaccgtcggcgaggacagtggtcctgttacaagcgttagctgggctcctgatggtcggcacatggccgtcgggctcaactcgtctgacgtccagctctgggacaccagctccaaccgactgttgagaacactcagaggtgcgcatgaggcaagggtaggctcgctggcatggaacaacagcgtcttgaccaccggttgcatggacggcaagatcgtgaacaatgacgtgtgcgctctgctgtggaacaagaacgagagggagctgctgagctcacatggattcacacagaaccaactcaccttgtggaagtacccatcgatggtgaagatggctgaacttaatggccatacctctcgcgtcctcttcatggctcagagtcctgatggatgcacagtagcgtcggctgctgctgacgagaccctccggttctggaacgtttttggaacccctgaaacgcccaagcctgcagccaaagcttcccacactgggatgttcaacagcttcaaacatatccgataggatgagtcaagactattattggatattgtctatacttgacttgatgatggcctgtcgttttcggaaggtcagaaatcaatgacacagggtttgcttcagaaatcagatgtaatgttttttcctcatttttggttggaacatcaagggcgcttgtttgatgtaccaattattgtaaatcaagacagcaatatatataaattgatattttgtcggttggatttggaaattgttgtaaatcggcaaccgtttgtttcaacatcaagagcacttgt

SEQ ID NO: 40560 - DNA, 2738 bp, Zea Mays
gggagcggttaaaatgcgtgcaaaaagggaggagacgccgcgagcggcagacagacaggcagaggcaggcaggcaaggccaagagcccaagacggtcggggcggagcgcgagaggcaggcgacgcgaggagaggaggcggtgctgtggtggcctcacctgccctgccatgattataaaaaataacggagcgcgacgcgggtagaaaccggaaggcccgccgctgcccgccccttcttccttcccgtcccacacacgccgccgccgccgccgccgccgctcgcttcctccaccccccggtccgcgcggcgcgggctgcctgcgcgaccagggaggcagggcacgcggcaaccacgtggggaggcgacgacaccacaccaccctatgctctctgtcctcgcccgcaggattgcagcagcagtgaatttgggagcttgaagcgttcatccgagacatggaaaaagtgatctgccgggcatatctccttcaatgcaagcgattcttttcgaaagaaactcttgattggtgtgtcttagcccgtgggaacacccatctctcctctctggtgaactacacatagtggttatatgctcctctatgctccacaacaagcaggctgatgcgatattttcctgaagttattatattccagtctatgccagacatctacatgtagatgatgctcatataagggggggttaatatatttgccatcttcagcctacatctgttgctgccctaattagttgatttgtcttctgtgtactatctgaggcaagatattgatcagctagaacttggcaaacccttgcctttcgtgtctgttcatatttctcgtggcttggttattctgaagggtaaaacttgcacaaggcagctttgatattacaacaatggatagattcaagttgattaaggaagttggcgatgggacttttgggagtgtatggcgtgctatgaataaacagaatggcgaagttgttgctgttaagaaaatgaagaaaaaatattattcttttgaggaatgtatgagtctacgtgaagtaaagtctttgcggcgcatgaatcatcctaacattgtgaagctcaaagaggttatcagggaaaatgatatattatacttcataatggaatacatggagtgtaatctctatcaacttatgaaagaaagggtcaagcctttctccgagtctgaagtccgcaactggtgttttcagatatttcaggctcttgcatacatgcaccagaggggctactttcatcgtgacctcaaacctgagaatctgttggttagcaaaggtgtcataaagctagcagactttggtcttgcaagggaagtctcatcattgccaccatatacagaatatgtctcaactcgctggtatcgggcaccagaagtcttgctccagtcatctgcttatgattctgcagttgatatgtgggcaatgggtgccataatggctgagctgttgacactccatcctctctttcctggaaccagtgaaccagatgagattcacaagatatgcaatgtcatcggtagtccagatgagcaatcttggcctcaaggattgtctcttgcagaagcaatgaagtatcagttcccacagaccaaaggcagtcaattgtctgaggtgatgacaacagctagtagcgaggcaattgacctcatctcatcactatgctcatgggatcctagcaagagaccaaaggccacagaagtcctccagcataccttcttccagggttgtacatgtgttccgcttcctgtccgtcggaaagcttcatcgcttcctaaaacacctccatgtgttggatcaaagagaatttccgagaacagtgttgctagaagattctcgaccgggactctatctacgatgaaatctcatagcaatgcacctgcaaaatcaaacggtttatctaggactggtgtacaaagaaaacttcacttggatcgtcagccaccgcagaagagtacaaaaccgaccgagaacagcaataagctagctacaaatcgggtcccagcccggaacagcccagggaatcctgtacttaggcattcacgcagcttgcctgaaactggtcgacgagcagtacagaaggtctcatcaatcacagagaaactgtcgcaaatgtcggtgacctccagaacacgaagcgccgtgaagcctgccgccccgacgatgaaggccggacatggcaagtcagacttcctggggaagtctgacgatatccctccggcaaagaggctgacgagaaaattggtcagctaaacaagggtacgtagagtgaaaatccgatcatctgcaggagggtggagggatatggtgtatagtgtgcaggaaccagtgtgccgaagagaggctagctcatcctgagcgtttgcctgtcgatggtcgcgcggatttgccatcgccacagttttgctgcatcgagtcatcttaggaatggctttgcaaactcctttgtggagtgctagagcctgcttcgagccttaaccctcttcctggccttcgatctgccttttgcctgcgtcaactttgcccccatgttttaataaacatgatgtgtgctattaattttgtcttgttcatatcttgctgggatggacgtttcatgtttggtttgaatgtacaggtacagtgcacaggtgagaacaccgtaaaatgccaatttcacgtactgtatgcacatgagttgtcactctccaatatggataaagtattataccaagtggcgc

SEQ ID NO: 40561 - DNA, 2703 bp, Zea Mays
gcagacagacaggcagaggcaggcaggcaaggccaagagcccaagacggtcggggcggagcgcgagaggcaggcgacgcgaggagaggaggcggtgctgtggtggcctcacctgccctgccatgattataaaaaataacggagcgcgacgcgggtagaaaccggaaggcccgccgctgcccgccccttcttccttcccgtcccacacacgccgccgccgccgccgccgccgctcgcttcctccaccccccggtccgcgcggcgcgggctgcctgcgcgaccagggaggcagggcacgcggcaaccacgtggggaggcgacgacaccacaccaccctatgctctctgtcctcgcccgcaggattgcagcagcagtgaatttgggagcttgaagcgttcatccgagacatggaaaaagtgatctgccgggcatatctccttcaatgcaagcgattcttttcgaaagaaactcttgattggtgtgtcttagcccgtgggaacacccatctctcctctctggtgaactacacatagtggttatatgctcctctatgctccacaacaagcaggctgatgcgatattttcctgaagttattatattccagtctatgccagacatctacattttcttttcaggtagatgatgctcatataagggggggttaatatatttgccatcttcagcctacatctgttgctgccctaattagttgatttgtcttctgtgtactatctgaggcaagatattgatcagctagaacttggcaaacccttgcctttcgtgtctgttcatatttctcgtggcttggttattctgaagggtaaaacttgcacaaggcagctttgatattacaacaatggatagattcaagttgattaaggaagttggcgatgggacttttgggagtgtatggcgtgctatgaataaacagaatggcgaagttgttgctgttaagaaaatgaagaaaaaatattattcttttgaggaatgtatgagtctacgtgaagtaaagtctttgcggcgcatgaatcatcctaacattgtgaagctcaaagaggttatcagggaaaatgatatattatacttcataatggaatacatggagtgtaatctctatcaacttatgaaagaaagggtcaagcctttctccgagtctgaagtccgcaactggtgttttcagatatttcaggctcttgcatacatgcaccagaggggctactttcatcgtgacctcaaacctgagaatctgttggttagcaaaggtgtcataaagctagcagactttggtcttgcaagggaagtctcatcattgccaccatatacagaatatgtctcaactcgctggtatcgggcaccagaagtcttgctccagtcatctgcttatgattctgcagttgatatgtgggcaatgggtgccataatggctgagctgttgacactccatcctctctttcctggaaccagtgaaccagatgagattcacaagatatgcaatgtcatcggtagtccagatgagcaatcttggcctcaaggattgtctcttgcagaagcaatgaagtatcagttcccacagaccaaaggcagtcaattgtctgaggtgatgacaacagctagtagcgaggcaattgacctcatctcatcactatgctcatgggatcctagcaagagaccaaaggccacagaagtcctccagcataccttcttccagggttgtacatgtgttccgcttcctgtccgtcggaaagcttcatcgcttcctaaaacacctccatgtgttggatcaaagagaatttccgagaacagtgttgctagaagattctcgaccgggactctatctacgatgaaatctcatagcaatgcacctgcaaaatcaaacggtttatctaggactggtgtacaaagaaaacttcacttggatcgtcagccaccgcagaagagtacaaaaccgaccgagaacagcaataagctagctacaaatcgggtcccagcccggaacagcccagggaatcctgtacttaggcattcacgcagcttgcctgaaactggtcgacgagcagtacagaaggtctcatcaatcacagagaaactgtcgcaaatgtcggtgacctccagaacacgaagcgccgtgaagcctgccgccccgacgatgaaggccggacatggcaagtcagacttcctggggaagtctgacgatatccctccggcaaagaggctgacgagaaaattggtcagctaaacaagggtacgtagagtgaaaatccgatcatctgcaggagggtggagggatatggtgtatagtgtgcaggaaccagtgtgccgaagagaggctagctcatcctgagcgtttgcctgtcgatggtcgcgcggatttgccatcgccacagttttgctgcatcgagtcatcttaggaatggctttgcaaactcctttgtggagtgctagagcctgcttcgagccttaaccctcttcctggccttcgatctgccttttgcctgcgtcaactttgcccccatgttttaataaacatgatgtgtgctattaattttgtcttgttcatatcttgctgggatggacgtttcatgtttggtttgaatgtacaggtacagtgcacaggtgagaacaccgtaaaatgccaatttcacgtactgtatgcacatgagttgtcactctccaatatggataaagtattataccaagtggcgc

SEQ ID NO: 40562 - DNA, 2666 bp, Zea Mays
gcagacagacaggcagaggcaggcaggcaaggccaagagcccaagacggtcggggcggagcgcgagaggcaggcgacgcgaggagaggaggcggtgctgtggtggcctcacctgccctgccatgattataaaaaataacggagcgcgacgcgggtagaaaccggaaggcccgccgctgcccgccccttcttccttcccgtcccacacacgccgccgccgccgccgccgccgctcgcttcctccaccccccggtccgcgcggcgcgggctgcctgcgcgaccagggaggcagggcacgcggcaaccacgtggggaggcgacgacaccacaccaccctatgctctctgtcctcgcccgcagggtaagcagcagtgaatttgggagcttgaagcgttcatccgagacatggaaaaagtgatctgccgggcatatctccttcaatgcaagcgattcttttcgaaagaaactcttgattggtgtgtcttagcccgtgggaacacccatctctcctctctggtgaactacacatagtggttatatgctcctctatgctccacaacaagcaggctgatgcgatattttcctgaagttattatattccagtctatgccagacatctacatggttaatatatttgccatcttcagcctacatctgttgctgccctaattagttgatttgtcttctgtgtactatctgaggcaagatattgatcagctagaacttggcaaacccttgcctttcgtgtctgttcatatttctcgtggcttggttattctgaagggtaaaacttgcacaaggcagctttgatattacaacaatggatagattcaagttgattaaggaagttggcgatgggacttttgggagtgtatggcgtgctatgaataaacagaatggcgaagttgttgctgttaagaaaatgaagaaaaaatattattcttttgaggaatgtatgagtctacgtgaagtaaagtctttgcggcgcatgaatcatcctaacattgtgaagctcaaagaggttatcagggaaaatgatatattatacttcataatggaatacatggagtgtaatctctatcaacttatgaaagaaagggtcaagcctttctccgagtctgaagtccgcaactggtgttttcagatatttcaggctcttgcatacatgcaccagaggggctactttcatcgtgacctcaaacctgagaatctgttggttagcaaaggtgtcataaagctagcagactttggtcttgcaagggaagtctcatcattgccaccatatacagaatatgtctcaactcgctggtatcgggcaccagaagtcttgctccagtcatctgcttatgattctgcagttgatatgtgggcaatgggtgccataatggctgagctgttgacactccatcctctctttcctggaaccagtgaaccagatgagattcacaagatatgcaatgtcatcggtagtccagatgagcaatcttggcctcaaggattgtctcttgcagaagcaatgaagtatcagttcccacagaccaaaggcagtcaattgtctgaggtgatgacaacagctagtagcgaggcaattgacctcatctcatcactatgctcatgggatcctagcaagagaccaaaggccacagaagtcctccagcataccttcttccagggttgtacatgtgttccgcttcctgtccgtcggaaagcttcatcgcttcctaaaacacctccatgtgttggatcaaagagaatttccgagaacagtgttgctagaagattctcgaccgggactctatctacgatgaaatctcatagcaatgcacctgcaaaatcaaacggtttatctaggactggtgtacaaagaaaacttcacttggatcgtcagccaccgcagaagagtacaaaaccgaccgagaacagcaataagctagctacaaatcgggtcccagcccggaacagcccagggaatcctgtacttaggcattcacgcagcttgcctgaaactggtcgacgagcagtacagaaggtctcatcaatcacagagaaactgtcgcaaatgtcggtgacctccagaacacgaagcgccgtgaagcctgccgccccgacgatgaaggccggacatggcaagtcagacttcctggggaagtctgacgatatccctccggcaaagaggctgacgagaaaattggtcagctaaacaagggtacgtagagtgaaaatccgatcatctgcaggagggtggagggatatggtgtatagtgtgcaggaaccagtgtgccgaagagaggctagctcatcctgagcgtttgcctgtcgatggtcgcgcggatttgccatcgccacagttttgctgcatcgagtcatcttaggaatggctttgcaaactcctttgtggagtgctagagcctgcttcgagccttaaccctcttcctggccttcgatctgccttttgcctgcgtcaactttgcccccatgttttaataaacatgatgtgtgctattaattttgtcttgttcatatcttgctgggatggacgtttcatgtttggtttgaatgtacaggtacagtgcacaggtgagaacaccgtaaaatgccaatttcacgtactgtatgcacatgagttgtcactctccaatatggataaagtattataccaagtggcgc

SEQ ID NO: 40563 - DNA, 2685 bp, Zea Mays
gcagacagacaggcagaggcaggcaggcaaggccaagagcccaagacggtcggggcggagcgcgagaggcaggcgacgcgaggagaggaggcggtgctgtggtggcctcacctgccctgccatgattataaaaaataacggagcgcgacgcgggtagaaaccggaaggcccgccgctgcccgccccttcttccttcccgtcccacacacgccgccgccgccgccgccgccgctcgcttcctccaccccccggtccgcgcggcgcgggctgcctgcgcgaccagggaggcagggcacgcggcaaccacgtggggaggcgacgacaccacaccaccctatgctctctgtcctcgcccgcaggcagcagtgaatttgggagcttgaagcgttcatccgagacatggaaaaagtgatctgccgggcatatctccttcaatgcaagcgattcttttcgaaagaaactcttgattggtgtgtcttagcccgtgggaacacccatctctcctctctggtgaactacacatagtggttatatgctcctctatgctccacaacaagcaggctgatgcgatattttcctgaagttattatattccagtctatgccagacatctacatgtagatgatgctcatataagggggggttaatatatttgccatcttcagcctacatctgttgctgccctaattagttgatttgtcttctgtgtactatctgaggcaagatattgatcagctagaacttggcaaacccttgcctttcgtgtctgttcatatttctcgtggcttggttattctgaagggtaaaacttgcacaaggcagctttgatattacaacaatggatagattcaagttgattaaggaagttggcgatgggacttttgggagtgtatggcgtgctatgaataaacagaatggcgaagttgttgctgttaagaaaatgaagaaaaaatattattcttttgaggaatgtatgagtctacgtgaagtaaagtctttgcggcgcatgaatcatcctaacattgtgaagctcaaagaggttatcagggaaaatgatatattatacttcataatggaatacatggagtgtaatctctatcaacttatgaaagaaagggtcaagcctttctccgagtctgaagtccgcaactggtgttttcagatatttcaggctcttgcatacatgcaccagaggggctactttcatcgtgacctcaaacctgagaatctgttggttagcaaaggtgtcataaagctagcagactttggtcttgcaagggaagtctcatcattgccaccatatacagaatatgtctcaactcgctggtatcgggcaccagaagtcttgctccagtcatctgcttatgattctgcagttgatatgtgggcaatgggtgccataatggctgagctgttgacactccatcctctctttcctggaaccagtgaaccagatgagattcacaagatatgcaatgtcatcggtagtccagatgagcaatcttggcctcaaggattgtctcttgcagaagcaatgaagtatcagttcccacagaccaaaggcagtcaattgtctgaggtgatgacaacagctagtagcgaggcaattgacctcatctcatcactatgctcatgggatcctagcaagagaccaaaggccacagaagtcctccagcataccttcttccagggttgtacatgtgttccgcttcctgtccgtcggaaagcttcatcgcttcctaaaacacctccatgtgttggatcaaagagaatttccgagaacagtgttgctagaagattctcgaccgggactctatctacgatgaaatctcatagcaatgcacctgcaaaatcaaacggtttatctaggactggtgtacaaagaaaacttcacttggatcgtcagccaccgcagaagagtacaaaaccgaccgagaacagcaataagctagctacaaatcgggtcccagcccggaacagcccagggaatcctgtacttaggcattcacgcagcttgcctgaaactggtcgacgagcagtacagaaggtctcatcaatcacagagaaactgtcgcaaatgtcggtgacctccagaacacgaagcgccgtgaagcctgccgccccgacgatgaaggccggacatggcaagtcagacttcctggggaagtctgacgatatccctccggcaaagaggctgacgagaaaattggtcagctaaacaagggtacgtagagtgaaaatccgatcatctgcaggagggtggagggatatggtgtatagtgtgcaggaaccagtgtgccgaagagaggctagctcatcctgagcgtttgcctgtcgatggtcgcgcggatttgccatcgccacagttttgctgcatcgagtcatcttaggaatggctttgcaaactcctttgtggagtgctagagcctgcttcgagccttaaccctcttcctggccttcgatctgccttttgcctgcgtcaactttgcccccatgttttaataaacatgatgtgtgctattaattttgtcttgttcatatcttgctgggatggacgtttcatgtttggtttgaatgtacaggtacagtgcacaggtgagaacaccgtaaaatgccaatttcacgtactgtatgcacatgagttgtcactctccaatatggataaagtattataccaagtggcgc

SEQ ID NO: 40564 - DNA, 2564 bp, Zea Mays
gcagacagacaggcagaggcaggcaggcaaggccaagagcccaagacggtcggggcggagcgcgagaggcaggcgacgcgaggagaggaggcggtgctgtggtggcctcacctgccctgccatgattataaaaaataacggagcgcgacgcgggtagaaaccggaaggcccgccgctgcccgccccttcttccttcccgtcccacacacgccgccgccgccgccgccgccgctcgcttcctccaccccccggtccgcgcggcgcgggctgcctgcgcgaccagggaggcagggcacgcggcaaccacgtggggaggcgacgacaccacaccaccctatgctctctgtcctcgcccgcagggtaagattgcagcagcagtgaatttgggagcttgaagcgttcatccgagacatggaaaaagtgatctgccgggcatatctccttcaatgcaagcgattcttttcgaaagaaactcttgattggtgtgtcttagcccgtgggaacacccatctctcctctctggtgaactacacatagtggttatatgctcctctatgctccacaacaagcaggctgatgcgatattttcctgaagttattatattccagtctatgccagacatctacatggttaatatatttgccatcttcagcctacatctgttgctgccctaattagttgatttgtcttctgtgtactatctgaggcaagatattgatcagctagaacttggcaaacccttgcctttcgtgtctgttcatatttctcgtggcttggttattctgaagggtaaaacttgcacaaggcagctttgatattacaacaatggatagattcaagttgattaaggaagttggcgatgggacttttgggagtgtatggcgtgctatgaataaacagaatggcgaagttgttgctgttaagaaaatgaagaaaaaatattattcttttgaggaatgtatgagtctacgtgaagtaaagtctttgcggcgcatgaatcatcctaacattgtgaagctcaaagaggttatcagggaaaatgatatattatacttcataatggaatacatggagtgtaatctctatcaacttatgaaagaaagggtcaagcctttctccgagtctgaagtccgcaactggtgttttcagatatttcaggctcttgcatacatgcaccagaggggctactttcatcgtgacctcaaacctgagaatctgttggttagcaaaggtgtcataaagctagcagactttggtcttgcaagggaagtctcatcattgccaccatatacagaatatgtctcaactcgctggtatcgggcaccagaagtcttgctccagtcatctgcttatgattctgcagttgatatgtgggcaatgggtgccataatggctgagctgttgacactccatcctctctttcctggaaccagaccaaaggcagtcaattgtctgaggtgatgacaacagctagtagcgaggcaattgacctcatctcatcactatgctcatgggatcctagcaagagaccaaaggccacagaagtcctccagcataccttcttccagggttgtacatgtgttccgcttcctgtccgtcggaaagcttcatcgcttcctaaaacacctccatgtgttggatcaaagagaatttccgagaacagtgttgctagaagattctcgaccgggactctatctacgatgaaatctcatagcaatgcacctgcaaaatcaaacggtttatctaggactggtgtacaaagaaaacttcacttggatcgtcagccaccgcagaagagtacaaaaccgaccgagaacagcaataagctagctacaaatcgggtcccagcccggaacagcccagggaatcctgtacttaggcattcacgcagcttgcctgaaactggtcgacgagcagtacagaaggtctcatcaatcacagagaaactgtcgcaaatgtcggtgacctccagaacacgaagcgccgtgaagcctgccgccccgacgatgaaggccggacatggcaagtcagacttcctggggaagtctgacgatatccctccggcaaagaggctgacgagaaaattggtcagctaaacaagggtacgtagagtgaaaatccgatcatctgcaggagggtggagggatatggtgtatagtgtgcaggaaccagtgtgccgaagagaggctagctcatcctgagcgtttgcctgtcgatggtcgcgcggatttgccatcgccacagttttgctgcatcgagtcatcttaggaatggctttgcaaactcctttgtggagtgctagagcctgcttcgagccttaaccctcttcctggccttcgatctgccttttgcctgcgtcaactttgcccccatgttttaataaacatgatgtgtgctattaattttgtcttgttcatatcttgctgggatggacgtttcatgtttggtttgaatgtacaggtacagtgcacaggtgagaacaccgtaaaatgccaatttcacgtactgtatgcacatgagttgtcactctccaatatggataaagtattataccaagtggcgc

SEQ ID NO: 40565 - DNA, 2581 bp, Zea Mays
gcagacagacaggcagaggcaggcaggcaaggccaagagcccaagacggtcggggcggagcgcgagaggcaggcgacgcgaggagaggaggcggtgctgtggtggcctcacctgccctgccatgattataaaaaataacggagcgcgacgcgggtagaaaccggaaggcccgccgctgcccgccccttcttccttcccgtcccacacacgccgccgccgccgccgccgccgctcgcttcctccaccccccggtccgcgcggcgcgggctgcctgcgcgaccagggaggcagggcacgcggcaaccacgtggggaggcgacgacaccacaccaccctatgctctctgtcctcgcccgcagggtaagcagcagtgaatttgggagcttgaagcgttcatccgagacatggaaaaagtgatctgccgggcatatctccttcaatgcaagcgattcttttcgaaagaaactcttgattggtgtgtcttagcccgtgggaacacccatctctcctctctggtgaactacacatagtggttatatgctcctctatgctccacaacaagcaggctgatgcgatattttcctgaagttattatattccagtctatgccagacatctacatgtagatgatgctcatataagggggggttaatatatttgccatcttcagcctacatctgttgctgccctaattagttgatttgtcttctgtgtactatctgaggcaagatattgatcagctagaacttggcaaacccttgcctttcgtgtctgttcatatttctcgtggcttggttattctgaagggtaaaacttgcacaaggcagctttgatattacaacaatggatagattcaagttgattaaggaagttggcgatgggacttttgggagtgtatggcgtgctatgaataaacagaatggcgaagttgttgctgttaagaaaatgaagaaaaaatattattcttttgaggaatgtatgagtctacgtgaagtaaagtctttgcggcgcatgaatcatcctaacattgtgaagctcaaagaggttatcagggaaaatgatatattatacttcataatggaatacatggagtgtaatctctatcaacttatgaaagaaagggtcaagcctttctccgagtctgaagtccgcaactggtgttttcagatatttcaggctcttgcatacatgcaccagaggggctactttcatcgtgacctcaaacctgagaatctgttggttagcaaaggtgtcataaagctagcagactttggtcttgcaagggaagtctcatcattgccaccatatacagaatatgtctcaactcgctggtatcgggcaccagaagtcttgctccagtcatctgcttatgattctgcagttgatatgtgggcaatgggtgccataatggctgagctgttgacactccatcctctctttcctggaaccagaccaaaggcagtcaattgtctgaggtgatgacaacagctagtagcgaggcaattgacctcatctcatcactatgctcatgggatcctagcaagagaccaaaggccacagaagtcctccagcataccttcttccagggttgtacatgtgttccgcttcctgtccgtcggaaagcttcatcgcttcctaaaacacctccatgtgttggatcaaagagaatttccgagaacagtgttgctagaagattctcgaccgggactctatctacgatgaaatctcatagcaatgcacctgcaaaatcaaacggtttatctaggactggtgtacaaagaaaacttcacttggatcgtcagccaccgcagaagagtacaaaaccgaccgagaacagcaataagctagctacaaatcgggtcccagcccggaacagcccagggaatcctgtacttaggcattcacgcagcttgcctgaaactggtcgacgagcagtacagaaggtctcatcaatcacagagaaactgtcgcaaatgtcggtgacctccagaacacgaagcgccgtgaagcctgccgccccgacgatgaaggccggacatggcaagtcagacttcctggggaagtctgacgatatccctccggcaaagaggctgacgagaaaattggtcagctaaacaagggtacgtagagtgaaaatccgatcatctgcaggagggtggagggatatggtgtatagtgtgcaggaaccagtgtgccgaagagaggctagctcatcctgagcgtttgcctgtcgatggtcgcgcggatttgccatcgccacagttttgctgcatcgagtcatcttaggaatggctttgcaaactcctttgtggagtgctagagcctgcttcgagccttaaccctcttcctggccttcgatctgccttttgcctgcgtcaactttgcccccatgttttaataaacatgatgtgtgctattaattttgtcttgttcatatcttgctgggatggacgtttcatgtttggtttgaatgtacaggtacagtgcacaggtgagaacaccgtaaaatgccaatttcacgtactgtatgcacatgagttgtcactctccaatatggataaagtattataccaagtggcgc

SEQ ID NO: 40566 - DNA, 2223 bp, Zea Mays
gcagacagacaggcagaggcaggcaggcaaggccaagagcccaagacggtcggggcggagcgcgagaggcaggcgacgcgaggagaggaggcggtgctgtggtggcctcacctgccctgccatgattataaaaaataacggagcgcgacgcgggtagaaaccggaaggcccgccgctgcccgccccttcttccttcccgtcccacacacgccgccgccgccgccgccgccgctcgcttcctccaccccccggtccgcgcggcgcgggctgcctgcgcgaccagggaggcagggcacgcggcaaccacgtggggaggcgacgacaccacaccaccctatgctctctgtcctcgcccgcagggtaagcagcagtgaatttgggagcttgaagcgttcatccgagacatggaaaaagtgatctgccgggcatatctccttcaatgcaagcgattcttttcgaaagaaactcttgattggtgtgtcttagcccgtgggaacacccatctctcctctctggtgaactacacatagtggttatatgctcctctatgctccacaacaagcaggctgatgcgatattttcctgaagttattatattccagtctatgccagacatctacatgtagatgatgctcatataagggggggttaatatatttgccatcttcagcctacatctgttgctgccctaattagttgatttgtcttctgtgtactatctgaggcaagatattgatcagctagaacttggcaaacccttgcctttcgtgtctgttcatatttctcgtggcttggttattctgaagggtaaaacttgcacaaggcagctttgatattacaacaatggatagattcaagttgattaaggaagttggcgatgggacttttgggagtgtatggcgtgctatgaataaacagaatggcgaagttgttgctgttaagaaaatgaagaaaaaatattattcttttgaggaatgtatgagtctacgtgaagtaaagtctttgcggcgcatgaatcatcctaacattgtgaagctcaaagaggttatcagggaaaatgatatattatacttcataatggaatacatggagtgtaatctctatcaacttatgaaagaaagggtcaagcctttctccgagtctgaagtccgcaactggtgttttcagatatttcaggctcttgcatacatgcaccagaggggctactttcatcgtgacctcaaacctgagaatctgttggttagcaaaggtgtcataaagctagcagactttggtcttgcaagggaagtctcatcattgccaccatatacagaatatgtctcaactcgctggtatcgggcaccagaagtcttgctccagtcatctgcttatgattctgcagttgatatgtgggcaatgggtgccataatggctgagctgttgacactccatcctctctttcctggaaccagaccaaaggcagtcaattgtctgaggtgatgacaacagctagtagcgaggcaattgacctcatctcatcactatgctcatgggatcctagcaagagaccaaaggccacagaagtcctccagcataccttcttccagggttgtacatgtgttccgcttcctgtccgtcggaaagcttcatcgcttcctaaaacacctccatgtgttggatcaaagagaatttccgagaacagtgttgctagaagattctcgaccgggactctatctacgatgaaatctcatagcaatgcacctgcaaaatcaaacggtttatctaggactggtgtacaaagaaaacttcacttggatcgtcagccaccgcagaagagtacaaaaccgaccgagaacagcaataagctagctacaaatcgggtcccagcccggaacagcccagggaatcctgtacttaggcattcacgcagcttgcctgaaactggtcgacgagcagtacagaaggtctcatcaatcacagagaaactgtcgcaaatgtcggtgacctccagaacacgaagcgccgtgaagcctgccgccccgacgatgaaggccggacatggcaagtcagacttcctggggaagtctgacgatatccctccggcaaagaggctgacgagaaaattggtcagctaaacaagggtacagtgcacaggtgagaacaccgtaaaatgccaatttcacgtactgtatgcacatgagttgtcactctccaatatggataaagtattataccaagtggcgc

SEQ ID NO: 40567 - DNA, 2254 bp, Zea Mays
gcagacagacaggcagaggcaggcaggcaaggccaagagcccaagacggtcggggcggagcgcgagaggcaggcgacgcgaggagaggaggcggtgctgtggtggcctcacctgccctgccatgattataaaaaataacggagcgcgacgcgggtagaaaccggaaggcccgccgctgcccgccccttcttccttcccgtcccacacacgccgccgccgccgccgccgccgctcgcttcctccaccccccggtccgcgcggcgcgggctgcctgcgcgaccagggaggcagggcacgcggcaaccacgtggggaggcgacgacaccacaccaccctatgctctctgtcctcgcccgcagggtaagcagcagtgaatttgggagcttgaagcgttcatccgagacatggaaaaagtgatctgccgggcatatctccttcaatgcaagcgattcttttcgaaagaaactcttgattggtgtgtcttagcccgtgggaacacccatctctcctctctggtgaactacacatagtggttatatgctcctctatgctccacaacaagcaggctgatgcgatattttcctgaagttattatattccagtctatgccagacatctacatgtagatgatgctcatataagggggggttaatatatttgccatcttcagcctacatctgttgctgccctaattagttgatttgtcttctgtgtactatctgaggcaagatattgatcagctagaacttggcaaacccttgcctttcgtgtctgttcatatttctcgtggcttggttattctgaagggtaaaacttgcacaaggcagctttgatattacaacaatggatagattcaagttgattaaggaagttggcgatgggacttttgggagtgtatggcgtgctatgaataaacagaatggcgaagttgttgctgttaagaaaatgaagaaaaaatattattcttttgaggaatgtatgagtctacgtgaagtaaagtctttgcggcgcatgaatcatcctaacattgtgaagctcaaagaggttatcagggaaaatgatatattatacttcataatggaatacatgatatttcaggctcttgcatacatgcaccagaggggctactttcatcgtgacctcaaacctgagaatctgttggttagcaaaggtgtcataaagctagcagactttggtcttgcaagggaagtctcatcattgccaccatatacagaatatgtctcaactcgctggtatcgggcaccagaagtcttgctccagtcatctgcttatgattctgcagttgatatgtgggcaatgggtgccataatggctgagctgttgacactccatcctctctttcctggaaccagtgaaccagatgagattcacaagatatgcaatgtcatcggtagtccagatgagcaatcttggcctcaaggattgtctcttgcagaagcaatgaagtatcagttcccacagaccaaaggcagtcaattgtctgaggtgatgacaacagctagtagcgaggcaattgacctcatctcatcactatgctcatgggatcctagcaagagaccaaaggccacagaagtcctccagcataccttcttccagggttgtacatgtgttccgcttcctgtccgtcggaaagcttcatcgcttcctaaaacacctccatgtgttggatcaaagagaatttccgagaacagtgttgctagaagattctcgaccgggactctatctacgatgaaatctcatagcaatgcacctgcaaaatcaaacggtttatctaggactggtgtacaaagaaaacttcacttggatcgtcagccaccgcagaagagtacaaaaccgaccgagaacagcaataagctagctacaaatcgggtcccagcccggaacagcccagggaatcctgtacttaggcattcacgcagcttgcctgaaactggtcgacgagcagtacagaaggtctcatcaatcacagagaaactgtcgcaaatgtcggtgacctccagaacacgaagcgccgtgaagcctgccgccccgacgatgaaggccggacatggcaagtcagacttcctggggaagtctgacgatatccctccggcaaagaggctgacgagaaaattggtcagctaaacaagggtacagtgcacaggtgagaacaccgtaaaatgccaatttcacgtactgtatgcacatgagttgtcactctccaatatggataaagtattataccaagtggcgc

SEQ ID NO: 40568 - DNA, 2573 bp, Zea Mays
gcagacagacaggcagaggcaggcaggcaaggccaagagcccaagacggtcggggcggagcgcgagaggcaggcgacgcgaggagaggaggcggtgctgtggtggcctcacctgccctgccatgattataaaaaataacggagcgcgacgcgggtagaaaccggaaggcccgccgctgcccgccccttcttccttcccgtcccacacacgccgccgccgccgccgccgccgctcgcttcctccaccccccggtccgcgcggcgcgggctgcctgcgcgaccagggaggcagggcacgcggcaaccacgtggggaggcgacgacaccacaccaccctatgctctctgtcctcgcccgcaggattgcagcagcagtgaatttgggagcttgaagcgttcatccgagacatggaaaaagtgatctgccgggcatatctccttcaatgcaagcgattcttttcgaaagaaactcttgattggtgtgtcttagcccgtgggaacacccatctctcctctctggtgaactacacatagtggttatatgctcctctatgctccacaacaagcaggctgatgcgatattttcctgaagttattatattccagtctatgccagacatctacatggttaatatatttgccatcttcagcctacatctgttgctgccctaattagttgatttgtcttctgtgtactatctgaggcaagatattgatcagctagaacttggcaaacccttgcctttcgtgtctgttcatatttctcgtggcttggttattctgaagggtaaaacttgcacaaggcagctttgatattacaacaatggatagattcaagttgattaaggaagttggcgatgggacttttgggagtgtatggcgtgctatgaataaacagaatggcgaagttgttgctgttaagaaaatgaagaaaaaatattattcttttgaggaatgtatgagtctacgtgaagtaaagtctttgcggcgcatgaatcatcctaacattgtgaagctcaaagaggttatcagggaaaatgatatattatacttcataatggaatacatggagtgtaatctctatcaacttatgaaagaaagggtcaagcctttctccgagtctgaagtccgcaactggtgttttcagatatttcaggctcttgcatacatgcaccagaggggctactttcatcgtgacctcaaacctgagaatctgttggttagcaaaggtgtcataaagctagcagactttggtcttgcaagggaagtctcatcattgccaccatatacagaatatgtctcaactcgctggtatcgggcaccagaagtcttgctccagtcatctgcttatgattctgcagttgatatgtgggcaatgggtgccataatggctgagctgttgacactccatcctctctttcctggaaccagtgaaccagatgagattcacaagatatgcaatgtcatcggtagtccagatgagcaatcttggcctcaaggattgtctcttgcagaagcaatgaagtatcagttcccacagaccaaaggccacagaagtcctccagcataccttcttccagggttgtacatgtgttccgcttcctgtccgtcggaaagcttcatcgcttcctaaaacacctccatgtgttggatcaaagagaatttccgagaacagtgttgctagaagattctcgaccgggactctatctacgatgaaatctcatagcaatgcacctgcaaaatcaaacggtttatctaggactggtgtacaaagaaaacttcacttggatcgtcagccaccgcagaagagtacaaaaccgaccgagaacagcaataagctagctacaaatcgggtcccagcccggaacagcccagggaatcctgtacttaggcattcacgcagcttgcctgaaactggtcgacgagcagtacagaaggtctcatcaatcacagagaaactgtcgcaaatgtcggtgacctccagaacacgaagcgccgtgaagcctgccgccccgacgatgaaggccggacatggcaagtcagacttcctggggaagtctgacgatatccctccggcaaagaggctgacgagaaaattggtcagctaaacaagggtacgtagagtgaaaatccgatcatctgcaggagggtggagggatatggtgtatagtgtgcaggaaccagtgtgccgaagagaggctagctcatcctgagcgtttgcctgtcgatggtcgcgcggatttgccatcgccacagttttgctgcatcgagtcatcttaggaatggctttgcaaactcctttgtggagtgctagagcctgcttcgagccttaaccctcttcctggccttcgatctgccttttgcctgcgtcaactttgcccccatgttttaataaacatgatgtgtgctattaattttgtcttgttcatatcttgctgggatggacgtttcatgtttggtttgaatgtacaggtacagtgcacaggtgagaacaccgtaaaatgccaatttcacgtactgtatgcacatgagttgtcactctccaatatggataaagtattataccaagtggcgc

SEQ ID NO: 40569 - DNA, 2697 bp, Zea Mays
gcagacagacaggcagaggcaggcaggcaaggccaagagcccaagacggtcggggcggagcgcgagaggcaggcgacgcgaggagaggaggcggtgctgtggtggcctcacctgccctgccatgattataaaaaataacggagcgcgacgcgggtagaaaccggaaggcccgccgctgcccgccccttcttccttcccgtcccacacacgccgccgccgccgccgccgccgctcgcttcctccaccccccggtccgcgcggcgcgggctgcctgcgcgaccagggaggcagggcacgcggcaaccacgtggggaggcgacgacaccacaccaccctatgctctctgtcctcgcccgcagggtaagattgcagcagcagtgaatttgggagcttgaagcgttcatccgagacatggaaaaagtgatctgccgggcatatctccttcaatgcaagcgattcttttcgaaagaaactcttgattggtgtgtcttagcccgtgggaacacccatctctcctctctggtgaactacacatagtggttatatgctcctctatgctccacaacaagcaggctgatgcgatattttcctgaagttattatattccagtctatgccagacatctacatgtagatgatgctcatataagggggggttaatatatttgccatcttcagcctacatctgttgctgccctaattagttgatttgtcttctgtgtactatctgaggcaagatattgatcagctagaacttggcaaacccttgcctttcgtgtctgttcatatttctcgtggcttggttattctgaagggtaaaacttgcacaaggcagctttgatattacaacaatggatagattcaagttgattaaggaagttggcgatgggacttttgggagtgtatggcgtgctatgaataaacagaatggcgaagttgttgctgttaagaaaatgaagaaaaaatattattcttttgaggaatgtatgagtctacgtgaagtaaagtctttgcggcgcatgaatcatcctaacattgtgaagctcaaagaggttatcagggaaaatgatatattatacttcataatggaatacatggagtgtaatctctatcaacttatgaaagaaagggtcaagcctttctccgagtctgaagtccgcaactggtgttttcagatatttcaggctcttgcatacatgcaccagaggggctactttcatcgtgacctcaaacctgagaatctgttggttagcaaaggtgtcataaagctagcagactttggtcttgcaagggaagtctcatcattgccaccatatacagaatatgtctcaactcgctggtatcgggcaccagaagtcttgctccagtcatctgcttatgattctgcagttgatatgtgggcaatgggtgccataatggctgagctgttgacactccatcctctctttcctggaaccagtgaaccagatgagattcacaagatatgcaatgtcatcggtagtccagatgagcaatcttggcctcaaggattgtctcttgcagaagcaatgaagtatcagttcccacagaccaaaggcagtcaattgtctgaggtgatgacaacagctagtagcgaggcaattgacctcatctcatcactatgctcatgggatcctagcaagagaccaaaggccacagaagtcctccagcataccttcttccagggttgtacatgtgttccgcttcctgtccgtcggaaagcttcatcgcttcctaaaacacctccatgtgttggatcaaagagaatttccgagaacagtgttgctagaagattctcgaccgggactctatctacgatgaaatctcatagcaatgcacctgcaaaatcaaacggtttatctaggactggtgtacaaagaaaacttcacttggatcgtcagccaccgcagaagagtacaaaaccgaccgagaacagcaataagctagctacaaatcgggtcccagcccggaacagcccagggaatcctgtacttaggcattcacgcagcttgcctgaaactggtcgacgagcagtacagaaggtctcatcaatcacagagaaactgtcgcaaatgtcggtgacctccagaacacgaagcgccgtgaagcctgccgccccgacgatgaaggccggacatggcaagtcagacttcctggggaagtctgacgatatccctccggcaaagaggctgacgagaaaattggtcagctaaacaagggtacgtagagtgaaaatccgatcatctgcaggagggtggagggatatggtgtatagtgtgcaggaaccagtgtgccgaagagaggctagctcatcctgagcgtttgcctgtcgatggtcgcgcggatttgccatcgccacagttttgctgcatcgagtcatcttaggaatggctttgcaaactcctttgtggagtgctagagcctgcttcgagccttaaccctcttcctggccttcgatctgccttttgcctgcgtcaactttgcccccatgttttaataaacatgatgtgtgctattaattttgtcttgttcatatcttgctgggatggacgtttcatgtttggtttgaatgtacaggtacagtgcacaggtgagaacaccgtaaaatgccaatttcacgtactgtatgcacatgagttgtcactctccaatatggataaagtattataccaagtggcgc

SEQ ID NO: 40570 - DNA, 2442 bp, Zea Mays
ctccgtttttcgcttgcttggcgggatttggccctggatctgtgcacaggacggcggatctgggcggcgagttgattgcagcagcagtgaatttgggagcttgaagcgttcatccgagacatggaaaaagtgatctgccgggcatatctccttcaatgcaagcgattcttttcgaaagaaactcttgattggtgtgtcttagcccgtgggaacacccatctctcctctctggtgaactacacatagtggttatatgctcctctatgctccacaacaagcaggctgatgcgatattttcctgaagttattatattccagtctatgccagacatctacatgtagatgatgctcatataaggggggtatgcaaatctctctgcactttgccacatacattgggttaatatatttgccatcttcagcctacatctgttgctgccctaattagttgatttgtcttctgtgtactatctgaggcaagatattgatcagctagaacttggcaaacccttgcctttcgtgtctgttcatatttctcgtggcttggttattctgaagggtaaaacttgcacaaggcagctttgatattacaacaatggatagattcaagttgattaaggaagttggcgatgggacttttgggagtgtatggcgtgctatgaataaacagaatggcgaagttgttgctgttaagaaaatgaagaaaaaatattattcttttgaggaatgtatgagtctacgtgaagtaaagtctttgcggcgcatgaatcatcctaacattgtgaagctcaaagaggttatcagggaaaatgatatattatacttcataatggaatacatggagtgtaatctctatcaacttatgaaagaaagggtcaagcctttctccgagtctgaagtccgcaactggtgttttcagatatttcaggctcttgcatacatgcaccagaggggctactttcatcgtgacctcaaacctgagaatctgttggttagcaaaggtgtcataaagctagcagactttggtcttgcaagggaagtctcatcattgccaccatatacagaatatgtctcaactcgctggtatcgggcaccagaagtcttgctccagtcatctgcttatgattctgcagttgatatgtgggcaatgggtgccataatggctgagctgttgacactccatcctctctttcctggaaccagtgaaccagatgagattcacaagatatgcaatgtcatcggtagtccagatgagcaatcttggcctcaaggattgtctcttgcagaagcaatgaagtatcagttcccacagaccaaaggcagtcaattgtctgaggtgatgacaacagctagtagcgaggcaattgacctcatctcatcactatgctcatgggatcctagcaagagaccaaaggccacagaagtcctccagcataccttcttccagggttgtacatgtgttccgcttcctgtccgtcggaaagcttcatcgcttcctaaaacacctccatgtgttggatcaaagagaatttccgagaacagtgttgctagaagattctcgaccgggactctatctacgatgaaatctcatagcaatgcacctgcaaaatcaaacggtttatctaggactggtgtacaaagaaaacttcacttggatcgtcagccaccgcagaagagtacaaaaccgaccgagaacagcaataagctagctacaaatcgggtcccagcccggaacagcccagggaatcctgtacttaggcattcacgcagcttgcctgaaactggtcgacgagcagtacagaaggtctcatcaatcacagagaaactgtcgcaaatgtcggtgacctccagaacacgaagcgccgtgaagcctgccgccccgacgatgaaggccggacatggcaagtcagacttcctggggaagtctgacgatatccctccggcaaagaggctgacgagaaaattggtcagctaaacaagggtacgtagagtgaaaatccgatcatctgcaggagggtggagggatatggtgtatagtgtgcaggaaccagtgtgccgaagagaggctagctcatcctgagcgtttgcctgtcgatggtcgcgcggatttgccatcgccacagttttgctgcatcgagtcatcttaggaatggctttgcaaactcctttgtggagtgctagagcctgcttcgagccttaaccctcttcctggccttcgatctgccttttgcctgcgtcaactttgcccccatgttttaataaacatgatgtgtgctattaattttgtcttgttcatatcttgctgggatggacgtttcatgtttggtttgaatgtacaggtacagtgcacaggtgagaacaccgtaaaatgccaatttcacgtactgtatgcacatgagttgtcactctccaatatggataaagtattataccaagtggcgc

SEQ ID NO: 40571 - DNA, 1316 bp, Zea Mays
ctcctttggatatgtccgaaccatatcaaacagtattggacaagcttatgtgtgatcccatcctctttcaccaaaagtgaaccagatgagattcacaagatatgcaatgtcatcggtagtccagatgagcaatcttggcctcaaggattgtctcttgcagaagcaatgaagtatcagttcccacagaccaaaggcagtcaattgtctgaggtgatgacaacagctagtagcgaggcaattgacctcatctcatcactatgctcatgggatcctagcaagagaccaaaggccacagaagtcctccagcataccttcttccagggttgtacatgtgttccgcttcctgtccgtcggaaagcttcatcgcttcctaaaacacctccatgtgttggatcaaagagaatttccgagaacagtgttgctagaagattctcgaccgggactctatctacgatgaaatctcatagcaatgcacctgcaaaatcaaacggtttatctaggactggtgtacaaagaaaacttcacttggatcgtcagccaccgcagaagagtacaaaaccgaccgagaacagcaataagctagctacaaatcgggtcccagcccggaacagcccagggaatcctgtacttaggcattcacgcagcttgcctgaaactggtcgacgagcagtacagaaggtctcatcaatcacagagaaactgtcgcaaatgtcggtgacctccagaacacgaagcgccgtgaagcctgccgccccgacgatgaaggccggacatggcaagtcagacttcctggggaagtctgacgatatccctccggcaaagaggctgacgagaaaattggtcagctaaacaagggtacgtagagtgaaaatccgatcatctgcaggagggtggagggatatggtgtatagtgtgcaggaaccagtgtgccgaagagaggctagctcatcctgagcgtttgcctgtcgatggtcgcgcggatttgccatcgccacagttttgctgcatcgagtcatcttaggaatggctttgcaaactcctttgtggagtgctagagcctgcttcgagccttaaccctcttcctggccttcgatctgccttttgcctgcgtcaactttgcccccatgttttaataaacatgatgtgtgctattaattttgtcttgttcatatcttgctgggatggacgtttcatgtttggtttgaatgtacaggtacagtgcacaggtgagaacaccgtaaaatgccaatttcacgtactgtatgcacatgagttgtcactctccaatatggataaagtattataccaagtggcgc

SEQ ID NO: 40572 - DNA, 934 bp, Zea Mays
atcaaacagtattggacaagcttatgtgtgatcccatcctctttcaccaaaagtgaaccagatgagattcacaagatatgcaatgtcatcggtagtccagatgagcaatcttggcctcaaggattgtctcttgcagaagcaatgaagtatcagttcccacagaccaaaggcagtcaattgtctgaggtgatgacaacagctagtagcgaggcaattgacctcatctcatcactatgctcatgggatcctagcaagagaccaaaggccacagaagtcctccagcataccttcttccagggttgtacatgtgttccgcttcctgtccgtcggaaagcttcatcgcttcctaaaacacctccatgtgttggatcaaagagaatttccgagaacagtgttgctagaagattctcgaccgggactctatctacgatgaaatctcatagcaatgcacctgcaaaatcaaacggtttatctaggactggtgtacaaagaaaacttcacttggatcgtcagccaccgcagaagagtacaaaaccgaccgagaacagcaataagctagctacaaatcgggtcccagcccggaacagcccagggaatcctgtacttaggcattcacgcagcttgcctgaaactggtcgacgagcagtacagaaggtctcatcaatcacagagaaactgtcgcaaatgtcggtgacctccagaacacgaagcgccgtgaagcctgccgccccgacgatgaaggccggacatggcaagtcagacttcctggggaagtctgacgatatccctccggcaaagaggctgacgagaaaattggtcagctaaacaagggtacagtgcacaggtgagaacaccgtaaaatgccaatttcacgtactgtatgcacatgagttgtcactctccaatatggataaagtattataccaagtggcgc

SEQ ID NO: 40573 - DNA, 1801 bp, Zea Mays
gtttcggccatcggccgttgcttgccacgcctgccagccggcaagtccacacatgacacaacccctctcgtacgcgtagcgcgaccccggtccactccgacggcccgcaccacccttctttaaccccgccacccagatccagccgcgccgcactccaccacggcccccacaactccaccgctagcagcagccaacagactcccgtcgggatggccgtggcgctcctcctcctgctggtgacgcccgtcgggctgctcgccgcgctcgcgctcctcacgcggccccgggccgcgcgggtcccgctcaaaggccgccacgtcttcatcacgggcgggtccagcggcatcgggctcgccatggccacggccgcggcgcgggagggcgcgcgggtctccatcctggcccgcaacctcgcccgcctcgaggacgcgcgcgccgccatccagcgcgactcgggcagggacgacgtcggcgtccacgcggccgacgtgcgggacgccggcgccgtcgcgcgcgcgctccaggaggccggccccgtcgacgtcctcgtctgcaaccacggcgtgttcgtgccgcaggagctcgaggggcaggacgtggatgagatcaagtggatggtggacatcaacctcatgggcagcttccacctcatcaaggccgcgcttccggccatgaaggcgcgcacccgcgagacgcgcctccctggctccatcgccatcatgtcctcccaggccggccaggtagacacccggcgtccgtcgcctgccatgcagcgaaggtgttcgatgttggtatttatggttacactgcctactcagcgagcaagttcgctcttcgcggattgggtgaggcgttgcagcatgaggtcatcgcggacaacattcatgtctcgttgatattccctcctgacaccgagactccaggattggaagaggagcataagaggaggccggaattgacaaacatcatagcagggtcatccggtggaatgaaggccgacgatgttgccaagaaggctctggacggcatcaaatccgcaaaattcattgtcccctgtaatttcgagggcgcaatgttagccgtagccaccgctggtttatccccgcagagctccccgttaatggcattcctagaagtggttggcgctggactcatgcggtttgcggcaatttgtttccagtggaattggttctccaccatcgagagctattatgccaagaaaaagaagagcgagtgatagcacaaaccacagctggacattattttcctagatcccgtgagagtcaaaagaaacaaataagtcacgtctgacctaatgtaaatgtagcgtggtagtattagagaagttgaagctatcttctttttaatggtttttttcatcagatcatgtctacaatatcagattctgttaaaaacaatggttcgtgagattttgatgacatatgtgtggagctctcacccctctccattcctccatgagctggacatcggcccaacaacacattgcagggcgcgatactgacgttgacacttggcattttttgctccttttttgggcggcgagccgacaaacgacgacggtcatcttgtgttgtcctgaagctctgtcgccttccgtctagctcaaggaacaggtgtcagtccatctcagaactgtcatctacatctattcatttatactttgattacgttgcggtctttttccatcaaaacaaaaacaatgttcctttcctatctatcattagattaaaggaaacaccagcttcaacatgttgcatcaaaaggaaaatctacatttctg

SEQ ID NO: 40574 - DNA, 396 bp, Zea Mays
ttctccaaacgctcgttgccctcagcgtcggcgccatcgagatgcttcaagctgggaatcagcgcgaagaccttctacctgtaccccttgactttggtgacggggcactggtacaggtcgagcaactcgactccaaccccggtgagtggcacgagctcctcgacttcggcgaacgagttgttacctagatcgaggtggcgcagcgtggcaccgcaggcctccgcgacagcggcgagcgcagcgggccccgagagacggttgtcggggaaggagaggcgccaaagcgccgggaggcgggcaggcccgtgagagaggagagggcagcccccgtgacggagaactcctcgagggaagcggcgaagcgcccgatgagtgcggcggaggggaggcggcccg

SEQ ID NO: 40575 - DNA, 966 bp, Zea Mays
ccatcttcgactcaggcctcgaccaccaccaccaccagtccacaagaccaccaaacacccttttttgcttgtcgtgccctcctccttcctcccagcttctccggtcatcccagactatttggaagcgtgatgctgaaatcatgtgggttttgctgggtgcggttggcaactctctgctttcgttggttctcaagaagatgctaaaccatgaaagacctgcaccagctttgcggtctgatcctgggatgccatcgtcccatgcacaatccatattctatgctgcgaccgtcctagctctttcattgtactactggcttgggacaaattatctgaccatgattcttgggcctgcaactctgtcgttggctgcctatctgtcttggctacgtgtgtctcggggccttcatacactaaaccaggtcatggtgggagctgttgtaggatctgccgtcggtgctctttggtttgtgctctggcattggcttgtgcaggaggcctttgcttcttctgtgcttgtcagagttgctgtcatccttggatcatcagcattttgtgttagctttgtcgtctacatgattcgtcactggctcaaggatgagtaatgtacttcggagctgcaatgggagatggacagataggcatggtgattttggaaaagtgaatccgttccgattcttatcagaatcgcttgaaaaaatggtgacaaatgggttttggcggagcgattcacgagtggaacaattctcttttccttcagaaactctcggattggggaaaatgaagtttcacaccgattcctaatagtcacatacgcctcgtgtcacactagtaattgtattttttcccagttaatcatttttaagtacaaggaactaaatatgttgtatctagagcaagctcaggagatttatgtcaggaatacaatttttgatgaaaaaatatccttcaacaactcgtttagataga

SEQ ID NO: 40576 - DNA, 1198 bp, Zea Mays
cgactcaggcctcgaccaccaccaccaccagtccacaagaccaccaaacacccttttttgcttgtcgtgccctcctccttcctcccagcttctccggtcatcccagagtacggccattctctatcccgtcaaccacatcagggcaacctgccaaacaccgcacttgcgcaatccatccaaacccccccggcaactccccaattccctctcccggagtcatcgacatgctttcctcctccaacagctcagctcccgccgcgctgtctcgcgggatacctctacaagaaccatgccctgcctattgtttcttctagctccaccgcctcgcccctgtctagctgactcgctatttggaagcgtgatgctgaaatcatgtgggttttgctgggtgcggttggcaactctctgctttcgttggttctcaagaagatgctaaaccatgaaagacctgcaccagctttgcggtctgatcctgggatgccatcgtcccatgcacaatccatattctatgctgcgaccgtcctagctctttcattgtactactggcttgggacaaattatctgaccatgattcttgggcctgcaactctgtcgttggctgcctatctgtcttggctacgtgtgtctcggggccttcatacactaaaccaggtcatggtgggagctgttgtaggatctgccgtcggtgctctttggtttgtgctctggcattggcttgtgcaggaggcctttgcttcttctgtgcttgtcagagttgctgtcatccttggatcatcagcattttgtgttagctttgtcgtctacatgattcgtcactggctcaaggatgagtaatgtacttcggagctgcaatgggagatggacagataggcatggtgattttggaaaagtgaatccgttccgattcttatcagaatcgcttgaaaaaatggtgacaaatgggttttggcggagcgattcacgagtggaacaattctcttttccttcagaaactctcggattggggaaaatgaagtttcacaccgattcctaatagtcacatacgcctcgtgtcacactagtaattgtattttttcccagttaatcatttttaagtacaaggaactaaatatgttgtatctagagcaagctcaggagatttatgtcaggaatacaatttttgatgaaaaaatatccttcaacaactcgtttagataga

SEQ ID NO: 40577 - DNA, 1252 bp, Zea Mays
cgactcaggcctcgaccaccaccaccaccagtccacaagaccaccaaacacccttttttgcttgtcgtgccctcctccttcctcccagcttctccggtcatcccagagtacggccattctctatcccgtcaaccacatcagggcaacctgccaaacaccgcacttgcgcaatccatccaaacccccccggcaactccccaattccctctcccggagtcatcgacatgctttcctcctccaacagctcagctcccgccgcgctgtctcgcgggatacctctacaagaaccatgccctgcctattgtttcttctagctccaccgcctcgcccctgtctagctgactcggtgagtcggtcaccgctccccaacaaatatcggttcttcctgccccagacccgtaggcggccaagtccgcggcttggcgacggcgtgcgaatggcggagatgaccagggtttggagcggcggggaaccgctcgaggttggggtttccatggagagtgacccgattgtcggaggggaggcgccttctcgctcgaggtgggaagcgagccggtgggcgcccgtggaggctgcgctgaatcggatgtgtactactggcttgggacaaattatctgaccatgattcttgggcctgcaactctgtcgttggctgcctatctgtcttggctacgtgtgtctcggggccttcatacactaaaccaggtcatggtgggagctgttgtaggatctgccgtcggtgctctttggtttgtgctctggcattggcttgtgcaggaggcctttgcttcttctgtgcttgtcagagttgctgtcatccttggatcatcagcattttgtgttagctttgtcgtctacatgattcgtcactggctcaaggatgagtaatgtacttcggagctgcaatgggagatggacagataggcatggtgattttggaaaagtgaatccgttccgattcttatcagaatcgcttgaaaaaatggtgacaaatgggttttggcggagcgattcacgagtggaacaattctcttttccttcagaaactctcggattggggaaaatgaagtttcacaccgattcctaatagtcacatacgcctcgtgtcacactagtaattgtattttttcccagttaatcatttttaagtacaaggaactaaatatgttgtatctagagcaagctcaggagatttatgtcaggaatacaatttttgatgaaaaaatatccttcaacaactcgtttagataga

SEQ ID NO: 40578 - DNA, 703 bp, Zea Mays
aggctaacctgattctgctccttaggccctagcaacaaatccgtatcccgagtccggcgacggcagtatccgagctcgcactcgcgcacccgtccatcgcatcgcatctgtcctcccatcccctcagcgccaccgcaccgcaatcacacgcgcgccacccgcgatgacgccggcggcggcgatctccggctccagcagccacgtcgtcgtctcctccgcccgcctcaggcagccgttcacgctccctccgcgcaccgcttgcccaatcgccgccgccgcctcgcccgtgacccgccgcggggtcgcggtcgccgccgtgtcgagccccgttgtgtccgccgccgcggggaaggatggcgcgtgcacgagaacgggaagagatggcgagcgagcgcgctcgtcaaagatgaccagcggccttgacgggatacccagcaggatagagaagcgaggaagaaagagtgtctgttggatcaagttttggacgccgtttttctatttttaccgatactagttgatttagctagactgttggagttgctcttaaaagtcagctgtattctcctctctaaactattaaaattgcctatgccaaatttcaggctcgtttctgttctggtgtagccactagaccaattaggaactcttatgttgagtgatgtatacttatgtcatatgtgaattactgaaccttgcatttttt

SEQ ID NO: 40579 - DNA, 1649 bp, Zea Mays
aggctaacctgattctgctccttaggccctagcaacaaatccgtatcccgagtccggcgacggcagtatccgagctcgcactcgcgcacccgtccatcgcatcgcatctgtcctcccatcccctcagcgccaccgcaccgcaatcacacgcgcgccacccgcgatgacgccggcggcggcgatctccggctccagcagccacgtcgtcgtctcctccgcccgcctcaggcagccgttcacgctccctccgcgcaccgcttgcccaatcgccgccgccgcctcgcccgtgacccgccgcggggtcgcggtcgccgccgtgtcgagccccgttgtgtccgccgccgcggggaaggatgccaaacaggctcctaaggatttccttcaaatcattgattttgacaaggatacaataatgaagattcttaatcgagccatcgaggttaaggcattgataaagtctggagacaagagcttccaaccgttcaaagggaaaacaatggccatgatttttgccaagccatcaatgaggacccgtgtttcatttgagacgggattctttttacttggtgggcatgctatttatttgggtccagatgatatccagatgggcaaacgatattctggacttggcaaaatatgcatctgtacctgtcataaatggtctcactgactataaccatccatgccagataatggctgatgcacttactatgcttgagcagattggtcgtattgaaaacactaaggttgtctatgttggagatgggaacaacattgtgcactcatggctgctattggctgctgtgcttccttttcactttgtatgtgcttgtcccaagggatttgagcctgacgcaaacacagtggagatcgccaggagtgctggaatcagtaagattgaaataacaaacagtcccagggaagcagttaagggagcagacattgtgtacacagatgtttgggccagtatgggacaaaaggaagaagctgattatagaaaacagaagttccagggattcacggtggatgaggccctgatggagattgctggcccacaggcctaccttatgcactgtttgcctgcagagagaggagtggaggtgactgacggcgccattgaggctcccaactcaatcgtgttcccccaggctgagaacagaatgcacgctcagaacgccatcatgcttcacgtgctcggtgcttaactctcctattgcacaccagtgacacgctcctcttagattattgggcattgctgtcttgctgaagcattgaggctgttttggctttagggcatatatgagagcttagttcagacgaactgtttagtaaggtgataacggttcttcagggtgggaatttgttgtgctgtaaaggtttggtaacctgaataaaaaataaacttatgtgctagtttcattcgcgaatcatgacagctttaacattgaaagacacgtttggccgagaccctggatcagttttgcctggctccatccttccttgcctgcactactgcacctgccttctctttttgccgcatcaggttggagttttggaagggtgtggttggagttcggtgtgtttggttggtagatagaggatgcatcgtatatcctggtggagcggattcatatttcataaaaaaaaaa

SEQ ID NO: 40580 - DNA, 2344 bp, Zea Mays
aggctaacctgattctgctccttaggccctagcaacaaatccgtatcccgagtccggcgacggcagtatccgagctcgcactcgcgcacccgtccatcgcatcgcatctgtcctcccatcccctcagcgccaccgcaccgcaatcacacgcgcgccacccgcgatgacgccggcggcggcgatctccggctccagcagccacgtcgtcgtctcctccgcccgcctcaggcagccgttcacgctccctccgcgcaccgcttgcccaatcgccgccgccgcctcgcccgtgacccgccgcggggtcgcggtcgccgccgtgtcgagccccgttgtgtccgccgccgcggggaaggatgccaaacaggctcctaaggatttccttcaaatcattgattttgacaaggatacaataatgaagattcttaatcgagccatcgaggttaaggcattgataaagtctggagacaagagcttccaaccgttcaaagggaaaacaatggccatgatttttgccaagccatcaatgaggacccgtgtttcatttgagacgggattctttttacttggtgggcatgctatttatttgggtccagatgatatccagatgggcaaacgtgaggagactcgtgatgttgctagagtactttctggctataatgacatcattatggctagggtctttgctcaccaagtatggtcatgagttgcataattaagatttcttttatgtggtctttttaccaacataaccaacaagggcacataacctggatcatttttctttttacatatttgatctgtcttctccgtgctgcttaagcacaacaattggatatcaatctcaaaactacaagcactatagtcgttagttaaagtaaaattttgccagtgggaatatattattatgaaacaacaacttcaatttggtatatatttaactgaaacagtaagtgtgtttaattctaataaaccaacttgggtcctgatatgtatatggatgtgtggtgtttttgaactgatatcatcatcttggcagttttcttcagtgttttcttggtttgtctgtgttctatctgatatgaagatcaaacttgttttatctggatgtaaacaaataattggtgttttgagttgatatcttgcctcgagatcatgtttgtttagttgtcttggatattgttactttatcttcataatttaccgctctcatttgtccttctcatattgatgttaggtagttccagttggttttgattccttttgtttccatccaaacattgtctcctaacttctcatatggttttggtaggatattctggacttggcaaaatatgcatctgtacctgtcataaatggtctcactgactataaccatccatgccagataatggctgatgcacttactatgcttgagcagattggtcgtattgaaaacactaaggttgtctatgttggagatgggaacaacattgtgcactcatggctgctattggctgctgtgcttccttttcactttgtatgtgcttgtcccaagggatttgagcctgacgcaaacacagtggagatcgccaggagtgctggaatcagtaagattgaaataacaaacagtcccagggaagcagttaagggagcagacattgtgtacacagatgtttgggccagtatgggacaaaaggaagaagctgattatagaaaacagaagttccagggattcacggtggatgaggccctgatggagattgctggcccacaggcctaccttatgcactgtttgcctgcagagagaggagtggaggtgactgacggcgccattgaggctcccaactcaatcgtgttcccccaggctgagaacagaatgcacgctcagaacgccatcatgcttcacgtgctcggtgcttaactctcctattgcacaccagtgacacgctcctcttagattattgggcattgctgtcttgctgaagcattgaggctgttttggctttagggcatatatgagagcttagttcagacgaactgtttagtaaggtgataacggttcttcagggtgggaatttgttgtgctgtaaaggtttggtaacctgaataaaaaataaacttatgtgctagtttcattcgcgaatcatgacagctttaacattgaaagacacgtttggccgagaccctggatcagttttgcctggctccatccttccttgcctgcactactgcacctgccttctctttttgccgcatcaggttggagttttggaagggtgtggttggagttcggtgtgtttggttggtagatagaggatgcatcgtatatcctggtggagcggattcatatttcataaaaaaaaaa

SEQ ID NO: 40581 - DNA, 1594 bp, Zea Mays
aggctaacctgattctgctccttaggccctagcaacaaatccgtatcccgagtccggcgacggcagtatccgagctcgcactcgcgcacccgtccatcgcatcgcatctgtcctcccatcccctcagcgccaccgcaccgcaatcacacgcgcgccacccgcgatgacgccggcggcggcgatctccggctccagcagccacgtcgtcgtctcctccgcccgcctcaggcagccgttcacgctccctccgcgcaccgcttgcccaatcgccgccgccgcctcgcccgtgacccgccgcggggtcgcggtcgccgccgtgtcgagccccgttgtgtccgccgccgcggggaaggatgccaaacaggctcctaaggatttccttcaaatcattgattttgacaaggatacaataatgaagattcttaatcgagccatcgaggttaaggcattgataaagtctggagacaagagcttccaaccgttcaaagggaaaacaatggccatgatttttgccaagccatcaatgaggacccgtgtttcatttgagacgggattctttttacttggtgggcatgctatttatttgggtccagatgatatccagatgggcaaacgtgaggagactcgtgatgttgctagagtactttctggctataatgacatcattatggctagggtctttgctcaccaagttgtctatgttggagatgggaacaacattgtgcactcatggctgctattggctgctgtgcttccttttcactttgtatgtgcttgtcccaagggatttgagcctgacgcaaacacagtggagatcgccaggagtgctggaatcagtaagattgaaataacaaacagtcccagggaagcagttaagggagcagacattgtgtacacagatgtttgggccagtatgggacaaaaggaagaagctgattatagaaaacagaagttccagggattcacggtggatgaggccctgatggagattgctggcccacaggcctaccttatgcactgtttgcctgcagagagaggagtggaggtgactgacggcgccattgaggctcccaactcaatcgtgttcccccaggctgagaacagaatgcacgctcagaacgccatcatgcttcacgtgctcggtgcttaactctcctattgcacaccagtgacacgctcctcttagattattgggcattgctgtcttgctgaagcattgaggctgttttggctttagggcatatatgagagcttagttcagacgaactgtttagtaaggtgataacggttcttcagggtgggaatttgttgtgctgtaaaggtttggtaacctgaataaaaaataaacttatgtgctagtttcattcgcgaatcatgacagctttaacattgaaagacacgtttggccgagaccctggatcagttttgcctggctccatccttccttgcctgcactactgcacctgccttctctttttgccgcatcaggttggagttttggaagggtgtggttggagttcggtgtgtttggttggtagatagaggatgcatcgtatatcctggtggagcggattcatatttcataaaaaaaaaa

SEQ ID NO: 40582 - DNA, 1404 bp, Zea Mays
ccctcataccaatacatgcactcaaatgttttagccaaacaggctcctaaggatttccttcaaatcattgattttgacaaggatacaataatgaagattcttaatcgagccatcgaggttaaggcattgataaagtctggagacaagagcttccaaccgttcaaagggaaaacaatggccatgatttttgccaagccatcaatgaggacccgtgtttcatttgagacgggattctttttacttggtgggcatgctatttatttgggtccagatgatatccagatgggcaaacgtgaggagactcgtgatgttgctagagtactttctggctataatgacatcattatggctagggtctttgctcaccaagatattctggacttggcaaaatatgcatctgtacctgtcataaatggtctcactgactataaccatccatgccagataatggctgatgcacttactatgcttgagcagattggtcgtattgaaaacactaaggttgtctatgttggagatgggaacaacattgtgcactcatggctgctattggctgctgtgcttccttttcactttgtatgtgcttgtcccaagggatttgagcctgacgcaaacacagtggagatcgccaggagtgctggaatcagtaagattgaaataacaaacagtcccagggaagcagttaagggagcagacattgtgtacacagatgtttgggccagtatgggacaaaaggaagaagctgattatagaaaacagaagttccagggattcacggtggatgaggccctgatggagattgctggcccacaggcctaccttatgcactgtttgcctgcagagagaggagtggaggtgactgacggcgccattgaggctcccaactcaatcgtgttcccccaggctgagaacagaatgcacgctcagaacgccatcatgcttcacgtgctcggtgcttaactctcctattgcacaccagtgacacgctcctcttagattattgggcattgctgtcttgctgaagcattgaggctgttttggctttagggcatatatgagagcttagttcagacgaactgtttagtaaggtgataacggttcttcagggtgggaatttgttgtgctgtaaaggtttggtaacctgaataaaaaataaacttatgtgctagtttcattcgcgaatcatgacagctttaacattgaaagacacgtttggccgagaccctggatcagttttgcctggctccatccttccttgcctgcactactgcacctgccttctctttttgccgcatcaggttggagttttggaagggtgtggttggagttcggtgtgtttggttggtagatagaggatgcatcgtatatcctggtggagcggattcatatttcataaaaaaaaaa

SEQ ID NO: 40583 - DNA, 684 bp, Zea Mays
gattgagttacaactagagaaatcatcgtatatgttctgtccttcatatgattcaaggtggatgaggccctgatggagattgctggcccacaggcctaccttatgcactgtttgcctgcagagagaggagtggaggtgactgacggcgccattgaggctcccaactcaatcgtgttcccccaggctgagaacagaatgcacgctcagaacgccatcatgcttcacgtgctcggtgcttaactctcctattgcacaccagtgacacgctcctcttagattattgggcattgctgtcttgctgaagcattgaggctgttttggctttagggcatatatgagagcttagttcagacgaactgtttagtaaggtgataacggttcttcagggtgggaatttgttgtgctgtaaaggtttggtaacctgaataaaaaataaacttatgtgctagtttcattcgcgaatcatgacagctttaacattgaaagacacgtttggccgagaccctggatcagttttgcctggctccatccttccttgcctgcactactgcacctgccttctctttttgccgcatcaggttggagttttggaagggtgtggttggagttcggtgtgtttggttggtagatagaggatgcatcgtatatcctggtggagcggattcatatttcataaaaaaaaaa

SEQ ID NO: 40584 - DNA, 2312 bp, Zea Mays
gtcgatttgtcaaaggagaaaaaactctaaggttccgtttgtttcattggaattgaatttccattctaataaatcataatttagacacaaactaattaagctaatatatttgtatattatcctaaatcatatgagagagatagttatacactacacttatgctatagagaatcaagtagaagagtgtgctataatttgtatattagaaaagtagcattcaaatatatagaatcaattttcatctctcatcctataaatttgaggttgatttatatataaactttggaaagttgtgggatgactaattctaaaaaaatagtctactctattagtttagattccaattccttaaaataaaggaacaaaccgggcctaatcagaaactggataacttttggagccatcaggcatggagagtaaacaaattgagaacgcagtcaacctagcacgtcgtggatggccgcaccaaccatcttgcgccctatgcaatagacctatagaatcagaactccatctatgcctaacctgccccttcgctcatgaggtctggaacacagttcttgcttgggaaagcttttccctgccgcaacatgtggatttgagcaacatctccagcattggcgagtggtgagagaagacggagactctctttccgcaagatcgcaaaagggagttcaatggcctggtcatctacactacgtggaacctttggaaggagcgcaaccgaagaatctttgagcatcgctcgctgtcaccgctccggatcgcagggagagtgagagagtgtgtcttgctctataaaagtgcgtctaaccgctttggcttgtactagggttgcatgtcgtgttccttcttaggtgcccgatactaagacctgagtgtgttccttcttaggtgcccgatactaaggcctgagtagctcctgccacttcgttccaaaaaaaaaattgagaacgcagaaaagctctgtctcctgagtaacttcaaagccatacaaaagcagaaaaggacaaacggaaagtggccttctacgttactgcagatagcataaagaaagatgccaatgaacaatgccaagtgaaattaatgtatgtacgggattgccacagggcgcgatttgattagtacatacatactcaagctttttctatgcaagctacctaatcaaaactagcatgatcttagtcaagcaatatacgaagagatgacatcagtatcctaaacaactccgcacgagacaacatgaacaaccaagtcctgaacaattgcagcaccaccttctacaaaaataggaatcgtgcacacacggtagtgctagtacaaaaaaaacacatgctcgcaagtactgaataatcgcagcaccgccttctacaaacatggagtagaaccagatgggaaacagaacaattgtcatcaccaaaaaaaaaaacagaggacggatagagtgccaacgaggttgtagtgcagtgcagtgctgctacatgtttatagcaaactcagcatgcataacaagaaagggacgctctcgaaaagtgaagcaaacaaaagccacacagcgtaatgatcctgtccagaacaaatcgaagccgatccagagtaacataattacataactcgatcgccagagtagcataactaccgagccgtgtaaacaaatccactattggttttacgtagagcaaaacccaatacaggagtgaaatcaaaacaagcctaataaaaaaaaaaggatccatgcggaaagttcagattgaaataggatctaaaacaaggaagagcacattcgttggttatcagaagcatcccaaaagcgtatttccgaatttcgccagacgtttttccattatactactgataaagtggggaacaaaaatgttgatgccgtttgtgatactactagcagtagtaaagactagtactgaagggcaccagagtttaggaaaaggaattagggaaaaatgaatcagaaacaggatataagaaaaacacatgaaacctgcataaaaacgtagaaaagggggaggggatcaacgaagagaaacggtcgcaaactaaactacccgcctctgatcactaaatacatcaccaacagattaagcacaggaaagcgcaccatagaagcgtcaaggccaagctaaggacccaaccgaacgggcgcatgcgcatcggcgagaaacaaaaacacacacacacacgaacgcgctcagggggcagggcaggcgcacgaaaacggaaaaagcagcgtcatcaaaaggtgagaagcacgagcaagcgatggatcaaaagggaaacaggaaggaggaggcgccctc

SEQ ID NO: 40585 - DNA, 2007 bp, Zea Mays
ctgggacgagaataggcacagatatggacccctgctgaattatggaaagcttttctcagatgtattgcatagaggagtgttacaatatatagaggcacaggaaccctaaccctaatgggccggcagcccaacggtggtgccagcccacctacacataggaacacacactctaacatccctccgcagttgcaacgggagcaccgtgaacgatgagactggagcagaagccgaaggtacgagcagacgggttgaaatccccccgcagtcgcagcgtcgtgagcatgtgaatgttgcggctagagcagagaccgatgtccactccaagaagacaatagcccctgtatgccgaggtagccaaagtcgaggtggtcgtggtcaggagacacgcagtggtagcctgttcttcgggaggggacgacgttcgatcgtcaacgatcggcagggcgatgcaacaaaagaagagtagcagtagatcggggaccttcttccttcctctgtcatccggtcgtcgaggagccctgccaaggaggccagaggcagcgcgcgcgtctacgccagtcagggtggtcgtgcccgcggcagagtagaaggggtatcgacggatccggtcgggaaagctacgacagcgacggatccagccatgaagaccgtgatccggccaaagggacaacgaatctagccgagaaggtcgcggcagcggtggatccgaccgggaaagccgcggcagtgacagatccaatgatgacggctatggaggcggaggccgacggggtgggaccagccgggcaggggcctgcgccgggtctggcaaggggtgtcgacgccagcgacggaagaagctttaaggagaggcgcaggacgcttctgatcgggcggccggcggcgctaggaggcgcggcagaggcggattggggacaagggcagccatcgtgctcacacccagagaggagggagggtcgtgcggatctgggcgcctagcagtgggaggcgtgaccagggggcgacggcgcaaccaggcggaggagggggcaggcggcgccaaggggaaagcagcaggggcggacttgagcagaggaggcgcatgtgtcatgtgctagaataggggtgccagggaagggggccggcacatcccgcggttgaggaaggcgggcatgggatagcaggagcttggagctcaggcgcgtccgtgggggggtgcccgagaaagagcagggagcgggcctggcggacttgaggaaggggaaggaggcagagggaagggcggcatcggtcgccggagcagcagcagatccggggggagacgaccgccagccatgagtggggaggaggcgacagcgactccgcgggtgcgcaggcctgcacgcgcggtggcgacagctcgtgcccgcatgcctgctcgcgcagcgccgacgactctggccggatctcggcggggagatgtaggtggcacgcggggcggagctccgccggcgagtcggcgctgaccagatctcggcgggaggggaggtgcgtagggccccgcggcttgggcgggtggtgtcggccaggcggagcacgggcgcgtcctccgagggaggagcatggggtggccgttaggcatgcattgtggtcgggcacacggacactagctagtggcacacgggaagaggcggtcggtaggcgtcaggggaagcagggctggcgactgggctgggggccaaccccgggagtgaagggagaggctcccgaggccgacagcgccgaagcagtggtcgtctactgttcctaggcaagggtgggcgacgcctgtggtgggaatggtgggtggaaacctagtttgataccatgtaagaatgtgattgtttgattgatgcattgcatagaggaggtttacaatatatagagatacaggaaccctaaccctaatgggccggtggcccaacagtggtgccagcccagcaacacataggaacacacactctaacaataagcattaatgacagaacagacctggccattgcagctctt

SEQ ID NO: 40586 - DNA, 2574 bp, Zea Mays
ataatactaattgtccatcttcagcagcgatggctagactttgacgccggtgatgtcccccagcagctgcacgagccatatagcctggcatgctccagctgcatccaccatatactctgcttcacaagttgagaagacctcagtttttgtttctgaaactaccaagacacatgcatgtctcctaagaagaagataacgccgccggtgattctcctctcatcgatgtctcccccaagttgtagtttgtgtattcggtcagcgtgtagcccaccaacctgaagtcagtgttgcagcgcttggggcagacaagaccgtagtcgactgtaacaacgaagcagtgtaggatgtgcttgacggtggctaagtgctcttgttgtggtctctccatgaaacggctcacaaaacccaccgcaaacataatgtctggcctgttatgaaccagatagcgcagacttactaccacacttttgtacatcgtcgcattgacctctagtgttgcctcttcgttgaaagcttcagtctggcctccattgacgtgtggcatcggttacaatcccacatgttggacttctccaacaacttgcggatgtacgccacttgccttaacatgatggaggtgtgtccttgcttgacctccatcccaagatagaaagataagagaccaaggtcactcatccgaagcagacgacgcatctcctccttgaatgcatcgacatccactagccttgctccaatgatgattaggtcgtcgacatagacccagaccagcacacgcaatgttgtggcgcccttagtgtacatcccatgctcgctaaagcacttgatgaagccgagtttgcgtaggttgttgtccagctttgcgtttcacgcccgtggtgcttagggaagtttgtacaacgccttatttagccatagaaccttcgctttgtgcctagtagtgacaaagtcgggcgtccgccagacgtacacctcctccttgagctcgccattcaagaacgttgtcttggcatacatgtgtgcacaagccaacccattgccacaacatcaagcagtatccacacatattacatctgtgcgaccagatcaaacacctcatcatagtctatccccggacctcggttgtaccccttggcgagaatctaggccttgtgcctgacgacgatgccctgctcattgcgctccagtttgtacacccacttcagaccaattgggcgatggcctagatgaaggtcgacaagagcccatgtctcgttctcctcaatggatgtcatctcctctatcgtcgccttgcaccagtgggaatcgtctcgagcctccttgaacgtagtcgattcataatcaccgatgataatgagcaactcctcattcaccacaaactcccattctgtacaacaacaacaacaacaacaacaacaaagcctttttgtcccaagcacgttggggtaggctagagatgaaaccccgtatgaaaacctcagagctcaacccccaaagaacagaaaagggaaacaaaggcaaaggagaaccgaaaacaacgaaacagggaaacacataaaagagataaaacccacaatgaccagcaagatctaaaatggacacaagaaaaggtcaaacgattaaggaggaaaagcgaaactatcaatcagggttctggcacgtgaattgcacacttccaccccttcctatctgcggcgagctctttgtcaatattccactccttcaggtctctcttcacaaactcccattctgtcaagccaggaatttccattgactcgagcacattatccaacgttctaaaccggagagacatctcattgtcgtggtcggcgtcgaggtctagaggtagtgacatgaactccacctgcgtcggtgatggaggtgtatcggccgccgctggaggtgtactaagtactggtgcaaatgtgtcgcatgctgttggcatccttgtccaccaagatcgtactgtttagtaacattcttccactgccttgatcctcccgatcaactcctccatagctagtgtattgagatcaagaagggtttagatcaccatcacgatctgtgagtccttggtggagtggcccgtaggaatttgcgcacgacctctggctcctagtaccaggtcggtgatgtgcatgtcgaagtcgtcaacagattcactatccttgaatctgagtgagttgaactcgtgtcgtagccttcgcttggtgcacttggtccacaccgagatttgttttattttgacgtccacgcgatcttggtggtcgcccttgcttgtgatcaccccttacatctccagaggtaccatgagggcgatggcctctagagcattgcgaccgtcatcgtcgatgtagtcattggtgtcgacgttcaccgccatccacatgcctctcgcctgcaacttcaacttcatgagcaccacccatgagtagtagttggtcttggtcagcaacaggtactgatcgctgtcgccactctccctcacggcctaatggatcaccaagccacagtcagtcgccattggcagagctgctccccgtctcttgacagcgatgttgcatgattgcaagcatg

SEQ ID NO: 40587 - DNA, 260 bp, Zea Mays
aggagactaggggtgccacgcatttacctcgagcagagtggcgtcagcggctacgagcaagtaggagagtcggggcgtgctaagtggtggcctggtggggccggacgaacgcgaaggttcggtggccgacggcgaggctggcccgagcgacgcttacgccgaggcggccggtggcgccgccgaccaccaggacccggctcctcgtcctcgctgtctccctgacatctccgtcgcctatagaagggcaatagtgccggcta

SEQ ID NO: 40588 - DNA, 2185 bp, Zea Mays
gaagttgagatctggagctcctggggagcaacgagaagcagctggaaaatctcatggtaacggttggcagagggggtccttgatctcttcctgagctggaggactccatctttcgagccgcggacccggagaaacttggatctctaggccatccaagggaaggtttactcattccttgctggtagcctactgcattgctgcctgccctcagatccgagctgccgcaagaagaaaggtggaatctttgctcgccttctggacaaatccgtccaaatttgggggtttcttgagctgttcttgggagcgccgtgcttcaagtttttttggggggaaaatgtcgttttctttgccggggtagatgcgggagtgatgtcgaccactttatgagctttccccctgctattttggggtttagattcgctctagttatggcggatcttgacatggagcattaggagtttctttcgtcgaaggcggaaggagcttgctgtaagctgcaatgtctctcaagagcattgtgcgggagctgaaggagatgagggacggtatcgggagcatgtcgagacgcggcggcagcggctccgacgggcgtgccttccacggccgctcggggtcgcggcattcttggcccagcctgtgggcggagcagcaacagtcgcatcggcagggccagggcctgggtccgggcccggaggggccgcatcatcagcatcaggggcggtgggcgaacttgcctccggaactgctgctggatgtgatacagagggtggagtccagcgaggcgacgtggccggcgcggcgccaggtcgtggcatgcgcagccatttgccgatcatggcgcgaggtcaccaaggaggtggtgaagacgctcgaggagtgtggcaggatcaccttccccatatcccttaagcaggagggagagggcaacatccacatatctactctacctagggctcagcccatctatgaatgtggagaaagacaagttattgcttgctgcccgtaaggtcaggcgtgccacaaggacttattttgtgatatcactggtctctgatgatttctctcactctagtagcacctacgttggcaaactgaagtaagatgcttattatgccaacttatgtggcatgattgtttttctttgtcttagtgacctaacctcgccattgcttctcataaaaccaggccaaacttcctcggcacaaagttcacaatcttcgacagccagcctcctcctgacgctgtagtgctaccaaacaataagacaagcaaaaggcagtccaagcaagtatcaccgagactgccgctaggcaattacaatgttgctacagtcacgtacgagctcaccgtcctacgcaacaggggtccaaggagaatgcaatgcaccatgcactcaataccagctgagtgcatccaggagggcgggaaggcccctacccctacaggcgccatccagtcgcttgacgagccagtgtcgtccaccttacctagtgccaaagggaaggaagtggctgtagaattctcttcgacaagcctcagcgccgatctgtctggaccggcctgcgtgaacggaacacctctagtgctgaagaacaaagctcctcgttggcatgagcagctgcagtgttggtgcctcaacttccgggggcgtgtcaccgtcgcgtcagtgaagaacttccagctcgtcgcctctgttgatccttccctaaacatccccgcagcggagcaggagaaggtgatcctccagtttgggaagataggcaaggatatattcaccatggactaccggtacccactctcggcgttccaggcctttgcgatctgcctgaccagcttcgacaccaaaccggcctgcgaatgattgacggtagtttaaaatcgcgggtggagtcttgtgtacgtccgtgttcttccagggcgatgtaaattctttatcttgccatgctgggcctctgctgcccaggcgaaatggtagcttgtgaggtggagatgagcgatagcatctgtaccataggaagagatttgagcgaccttgtttacccaactgttatatgtattattgctgggatgtttggctgtgaaatatcactgccgtatcgataatggacgttgaccattttgctcgctcgctctcattttgagccgtgatgttcaacgatgtggttcctgcgttaaaaaaaaaaaa

SEQ ID NO: 40589 - DNA, 965 bp, Zea Mays
atttttatgagcatgcgtttgggcaagataacgggtttttagtttttacccattggcatcgcccgtctgtactgtacaacatccgatccgaaacctagcaacacccccggacagacgggcgcgaactcaaaccctagaaacggtagccatggattcgggaggcggaggagggagcggcgcgcacaaggcggcctcgggctccgcgccctcgccggcgcctaaccccacggcgatgctttcggcgctcatgagcaagcgcgccaagctccaggaggagctccgctccatcgagcgccaggtttatgatatggagaccacctacctacaggagactaatcaatttggaagtgtgctgaagggtttcgaatcttttttgtcatcctcaaaaaacacctctaaccttaagcgctctcggaaatttcaggctgacgagaggttattctccctgtcatccgttacttctccagcggttgatgaacatttggctggacgagatgatggaagagagtatggagcaggtcgttctaagggtggaagcacccctgcgaacgggcaaggcaaaccgaagaagggagggcgccctggcgggcgagacggcaagagactacggccgtcgaatgacccagacctggacgacgaagatgactactaactcctccatcatgtaggcctactgtagcgggttaacttcaatttagcgtctagcagcacatgattctttacgaattgcttcccttctcgtttgttttgcttggttgcatcttcgcttccttccccaactcttccgatttgtaatataacataggtcaatgaaaattagccagattgttaaaattttgtgcaaactttgttctcagacggtagctttttctggatttccgagttaatatatcttcgttacatccttgaatcctagtgaccgaggcgtatttggatttgtagtgtgttagacattcttcagcaag

SEQ ID NO: 40590 - DNA, 1439 bp, Zea Mays
gataacgggtttttagtttttacccattggcatcgcccgtctgtactgtacaacatccgatccgaaacctagcaacacccccggacagacgggcgcgaactcaaaccctagaaacggtagccatggattcgggaggcggaggagggagcggcgcgcacaaggcggcctcgggctccgcgccctcgccggcgcctaaccccacggcgatgctttcggcgctcatgagcaagcgcgccaagctccaggaggagctccgctccatcgagcgccaggtttatgatatggagaccacctacctacaggagactaatcaatttggaagtgtgctgaagggtttcgaatcttttttgtcatcctcaaaaaacacctctaagtaagacatctaagttttcatcatcttgttattcagtaactgatgcaatcttcaatatttcgagatcttcatttttttgtcatatagtactctttgcatgttgtaccaattttttttgacatttcaatgtatctgttcttactatatgattgagacctgaccttagaaatgtatatatcagcatgggtcatgtataataatctatatattgcaggaaaatttgggtgcaaggaatgtttttatgctcatgttaagttttgtcatgccagttcctttacctactgcgtgtagtatcagcaactcagcatgagagctttatatgtctgcaaatatagtttagactatagtgatcattggccatttgagattatggtgtgatgtggttattctgtagaagcaaatggtcttttatttttcgattttgcatttttgagtcagttcatgtaaatatgtaatgctgttcacatagaacattcgtgatggcttctgattgatttcagccttaagcgctctcggaaatttcaggctgacgagaggttattctccctgtcatccgttacttctccagcggttgatgaacatttggctggacgagatgatggaagagagtatggagcaggtcgttctaagggtggaagcacccctgcgaacgggcaaggcaaaccgaagaagggagggcgccctggcgggcgagacggcaagagactacggccgtcgaatgacccagacctggacgacgaagatgactactaactcctccatcatgtaggcctactgtagcgggttaacttcaatttagcgtctagcagcacatgattctttacgaattgcttcccttctcgtttgttttgcttggttgcatcttcgcttccttccccaactcttccgatttgtaatataacataggtcaatgaaaattagccagattgttaaaattttgtgcaaactttgttctcagacggtagctttttctggatttccgagttaatatatcttcgttacatccttgaatcctagtgaccgaggcgtatttggatttgtagtgtgttagacattcttcagcaag

SEQ ID NO: 40591 - DNA, 897 bp, Zea Mays
ttagtttttacccattggcatcgcccgtctgtactgtacaacatccgatccgaaacctagcaacacccccggacagacgggcgcgaactcaaaccctagaaacggtagccatggattcgggaggcggaggagggagcggcgcgcacaaggcggcctcgggctccgcgccctcgccggcgcctaaccccacggcgatgctttcggcgctcatgagcaagcgcgccaagctccaggaggagctccgctccatcgagcgccaggagactaatcaatttggaagtgtgctgaagggtttcgaatcttttttgtcatcctcaaaaaacacctctaaccttaagcgctctcggaaatttcaggctgacgagaggttattctccctgtcatccgttacttctccagcggttgatgaacatttggctggacgagatgatggaagagagtatggagcaggtcgttctaagggtggaagcacccctgcgaacgggcaaggcaaaccgaagaagggagggcgccctggcgggcgagacggcaagagactacggccgtcgaatgacccagacctggacgacgaagatgactactaactcctccatcatgtaggcctactgtagcgggttaacttcaatttagcgtctagcagcacatgattctttacgaattgcttcccttctcgtttgttttgcttggttgcatcttcgcttccttccccaactcttccgatttgtaatataacataggtcaatgaaaattagccagattgttaaaattttgtgcaaactttgttctcagacggtagctttttctggatttccgagttaatatatcttcgttacatccttgaatcctagtgaccgaggcgtatttggatttgtagtgtgttagacattcttcagcaag

SEQ ID NO: 40592 - DNA, 902 bp, Zea Mays
ttagtttttacccattggcatcgcccgtctgtactgtacaacatccgatccgaaacctagcaacacccccggacagacgggcgcgaactcaaaccctagaaacggtagccatggattcgggaggcggaggagggagcggcgcgcacaaggcggcctcgggctccgcgccctcgccggcgcctaaccccacggcgatgctttcggcgctcatgagcaagcgcgccaagctccaggaggagctccgctccatcgagcgccaggtttatgatatggagaccacctacctacaggagactaatcaatttggaagtgtgctgaagggtttcgaatcttttttgtcatcctcaaaaaacacctctaagctgacgagaggttattctccctgtcatccgttacttctccagcggttgatgaacatttggctggacgagatgatggaagagagtatggagcaggtcgttctaagggtggaagcacccctgcgaacgggcaaggcaaaccgaagaagggagggcgccctggcgggcgagacggcaagagactacggccgtcgaatgacccagacctggacgacgaagatgactactaactcctccatcatgtaggcctactgtagcgggttaacttcaatttagcgtctagcagcacatgattctttacgaattgcttcccttctcgtttgttttgcttggttgcatcttcgcttccttccccaactcttccgatttgtaatataacataggtcaatgaaaattagccagattgttaaaattttgtgcaaactttgttctcagacggtagctttttctggatttccgagttaatatatcttcgttacatccttgaatcctagtgaccgaggcgtatttggatttgtagtgtgttagacattcttcagcaag

SEQ ID NO: 40593 - DNA, 787 bp, Zea Mays
gggaccctgccgccttcacaacttgggtttatgatatggagaccacctacctacaggagactaatcaatttggaagtgtgctgaagggtttcgaatcttttttgtcatcctcaaaaaacacctctaaccttaagcgctctcggaaatttcaggctgacgagaggttattctccctgtcatccgttacttctccagcggttgatgaacatttggctggacgagatggtaagctttctttgatttccttcttgtttgaaatttaatccatggtgctaaagaaagcacacttcattttttggtacttgtataatcctggcagatggaagagagtatggagcaggtcgttctaagggtggaagcacccctgcgaacgggcaaggcaaaccgaagaagggagggcgccctggcgggcgagacggcaagagactacggccgtcgaatgacccagacctggacgacgaagatgactactaactcctccatcatgtaggcctactgtagcgggttaacttcaatttagcgtctagcagcacatgattctttacgaattgcttcccttctcgtttgttttgcttggttgcatcttcgcttccttccccaactcttccgatttgtaatataacataggtcaatgaaaattagccagattgttaaaattttgtgcaaactttgttctcagacggtagctttttctggatttccgagttaatatatcttcgttacatccttgaatcctagtgaccgaggcgtatttggatttgtagtgtgttagacattcttcagcaag

SEQ ID NO: 40594 - DNA, 2591 bp, Zea Mays
cttcttgcgtctgtaactctgtattacccagtcgaccgtgccgccaaaaaccctgggtctcccctacgcttcgctcgtcatgctgcgccgcctccgcctgcgcttgccggggagggcggcgtcggctgccgccggcgcggccgctgcaatggcgtcgctcaccaacgtcgcctacgccgacggcctcttccgccgccagtccgcgccgtcgaatccaggcgacgaggacaatttgggagcctccgcgttcggccgcgatccggagaccctggagcgcatggcccgagcgctgcgggagatcaacaactcaccgctcgccaagcaggtgtttgaactgatgcggaagcaggaggagacgcgcctcactgagctggaggtcgagaaggtccaatacgccatctatgagaagctgagggacatcgaaaggatgcagaaaaaagctgaagattacagaaatagtttgcaacaagaagcacaagcaaaagctcaagcattacgctttgaggatgaattagctagaaaaagaatgcagacagatcatgctgcacagaggcgacaggatgctgaactcgtgaagatgcaagaggcatctgccctcaggagagaagaagctaggcgtgcaacagaacagaagattttggaagaaatgatacgtactgagaaggaaaaggctgaaatagatcaggaaacaaacagagttaaagctatagctgaagcagaagctcgtgttcatgaagacaagcaatcagaagaagttgttaaaagaatgttattggaacgcatgaagggtgaaaaggaaaagtggctcactgcaataaatacaacattttcgcacattgaaggtggattcaaagcactgttaactgataggagcaaactaatgatgggtattggaggagttactgcactggctgctggagtttatactactagggaaggtgcgagggttacatggagttacataaatagaatcttgggtcagccttcgctgatccgtgagtcatcaatgtcaaagttcccactaccaatgtctaggctactcaaacctagttcagcatctttgtcggagggagcaggctttgagaaagttatcctgcacccttcactaaagcggaggattgaacatcttgcacgagcaactgcaaatacgaagtctcatggtgcaccattccgcaacatgctgttctatggacctcctggaactggcaaaactttagtagccagggagatggctcgcaaatctggcctggactatgccatgatgacgggaggagatgttgcacccttaggatcagaggctgttaccaagatccatcaaatatttgactgggctaagaagtccaaaaaaggcgtaacagtacccatatgagcgaagctcagcggagtgctctcaatgcattattgtttcgaactggcgaccagtccagggatattgtccttgtcctggcaacaaacagaccgggtgaccttgatgctgctatcactgaccgcattgatgaagtcatagagttccccctgcctggggaggaggagaggtttcaactgctcaagctatacttgaaccaatatatactcaaggaagagggcaaaggatcttcttggagtgcattattcaagaagcagcagcggaagattcaggtcaatggcataagcgatgatttgctcagggaagctgcaaggaagatcgacggtttctctggcagggagattgcgaagctggtggctagtgtgcaagctgctgtttatgggcggcctgactgtatattggacccccagttattttcagaggtagttgactacaaagtgactgagcatcaccaacgcatcaagcttgcttcagagggtatggtttgatcagtaagaaatatttacctcccactgactctagtagtgcatgttttggatcccgtgggagtgggacattttgtagcccccgtctattcccaccagttttgttccatgtgctttgcctgcagcaagggttggtcccggatggacatccaaataggccggttgtggtcaattgaatttagggtgtatttggttcagctttctaaattagattcgccgccaaaaacaggaatctcaatcaaacgggaacgacaatagaatagatttatgaaaatttatagattcctctagttctattcaaaatcaccttatttttaggattcctgttatccatgggctatcatgctcttttacagtttgtttcaaacaaaaatattttctctctccacaaccgttagttttcaagggctatcttcaacaatcaacatgacatttttctaccatggctacaatctcatgctcgtctacctcgacatcggtacaaatagctactatcttcaatgaactacttatcagttcatgtcagccacaagaatctaattgtctacaatgttactgcagtcctgctacgaatgcaggggggagcttagaataatatatcactaccggaatagagttagctaggattatgatcttgatccccgaatcatgtaaactctacgtatacacaccggccttgggatcaatgcaaatatccaacatgttgttcgctacatgttcgcttggctttaatctaaaat

SEQ ID NO: 40595 - DNA, 2535 bp, Zea Mays
ctgtattacccagtcgaccgtgccgccaaaaaccctgggtctcccctacgcttcgctcgtcatgctgcgccgcctccgcctgcgcttgccggggagggcggcgtcggctgccgccggcgcggccgctgcaatggcgtcgctcaccaacgtcgcctacgccgacggcctcttccgccgccagtccgcgccgtcgaatccaggcgacgaggacaatttgggagcctccgcgttcggccgcgatccggagaccctggagcgcatggcccgagcgctgcgggagatcaacaactcaccgctcgccaagcaggtgtttgaactgatgcggaagcaggaggagacgcgcctcactgagctggaggtcgagaaggtccaatacgccatctatgagaagctgagggacatcgaaaggatgcagaaaaaagctgaagattacagaaatagtttgcaacaagaagcacaagcaaaagctcaagcattacgctttgaggatgaattagctagaaaaagaatgcagacagatcatgctgcacagaggcgacaggatgctgaactcgtgaagatgcaagaggcatctgccctcaggagagaagaagctaggcgtgcaacagaacagaagattttggaagaaatgatacgtactgagaaggaaaaggctgaaatagatcaggaaacaaacagagttaaagctatagctgaagcagaagctcgtgttcatgaagacaagcaatcagaagaagttgttaaaagaatgttattggaacgcatgaagggtgaaaaggaaaagtggctcactgcaataaatacaacattttcgcacattgaaggtggattcaaagcactgttaactgataggagcaaactaatgatgggtattggaggagttactgcactggctgctggagtttatactactagggaaggtgcgagggttacatggagttacataaatagaatcttgggtcagccttcgctgatccgctttgagaaagttatcctgcacccttcactaaagcggaggattgaacatcttgcacgagcaactgcaaatacgaagtctcatggtgcaccattccgcaacatgctgttctatggacctcctggaactggcaaaactttagtagccagggagatggctcgcaaatctggcctggactatgccatgatgacgggaggagatgttgcacccttaggatcagaggctgttaccaagatccatcaaatatttgactgggctaagaagtccaaaaaaggcatgcttgttttcattgatgaagctgatgcattcttgtgcgagcgtaacagtacccatatgagcgaagctcagcggagtgctctcaatgcattattgtttcgaactggcgaccagtccagggatattgtccttgtcctggcaacaaacagaccgggtgaccttgatgctgctatcactgaccgcattgatgaagtcatagagttccccctgcctggggaggaggagaggtttcaactgctcaagctatacttgaaccaatatatactcaaggaagagggcaaaggatcttcttggagtgcattattcaagaagcagcagcggaagattcaggtcaatggcataagcgatgatttgctcagggaagctgcaaggaagatcgacggtttctctggcagggagattgcgaagctggtggctagtgtgcaagctgctgtttatgggcggcctgactgtatattggacccccagttattttcagaggtagttgactacaaagtgactgagcatcaccaacgcatcaagcttgcttcagagggtatggtttgatcagtaagaaatatttacctcccactgactctagtagtgcatgttttggatcccgtgggagtgggacattttgtagcccccgtctattcccaccagttttgttccatgtgctttgcctgcagcaagggttggtcccggatggacatccaaataggccggttgtggtcaattgaatttagggtgtatttggttcagctttctaaattagattcgccgccaaaaacaggaatctcaatcaaacgggaacgacaatagaatagatttatgaaaatttatagattcctctagttctattcaaaatcaccttatttttaggattcctgttatccatgggctatcatgctcttttacagtttgtttcaaacaaaaatattttctctctccacaaccgttagttttcaagggctatcttcaacaatcaacatgacatttttctaccatggctacaatctcatgctcgtctacctcgacatcggtacaaatagctactatcttcaatgaactacttatcagttcatgtcagccacaagaatctaattgtctacaatgttactgcagtcctgctacgaatgcaggggggagcttagaataatatatcactaccggaatagagttagctaggattatgatcttgatccccgaatcatgtaaactctacgtatacacaccggccttgggatcaatgcaaatatccaacatgttgttcgctacatgttcgcttggctttaatctaaaat

SEQ ID NO: 40596 - DNA, 2563 bp, Zea Mays
tacccagtcgaccgtgccgccaaaaaccctgggtctcccctacgcttcgctcgtcatgctgcgccgcctccgcctgcgcttgccggggagggcggcgtcggctgccgccggcgcggccgctgcaatggcgtcgctcaccaacgtcgcctacgccgacggcctcttccgccgccagtccgcgccgtcgaatccaggcgacgaggacaatttgggagcctccgcgttcggccgcgatccggagaccctggagcgcatggcccgagcgctgcgggagatcaacaactcaccgctcgccaagcaggtgtttgaactgatgcggaagcaggaggagacgcgcctcactgagctggaggtcgagaaggtccaatacgccatctatgagaagctgagggacatcgaaaggatgcagaaaaaagctgaagattacagaaatagtttgcaacaagaagcacaagcaaaagctcaagcattacgctttgaggatgaattagctagaaaaagaatgcagatcatgctgcacagaggcgacaggatgctgaactcgtgaagatgcaagaggcatctgccctcaggagagaagaagctaggcgtgcaacagaacagaagattttggaagaaatgatacgtactgagaaggaaaaggctgaaatagatcaggaaacaaacagagttaaagctatagctgaagcagaagctcgtgttcatgaagacaagcaatcagaagaagttgttaaaagaatgttattggaacgcatgaagggtgaaaaggaaaagtggctcactgcaataaatacaacattttcgcacattgaaggtggattcaaagcactgttaactgataggagcaaactaatgatgggtattggaggagttactgcactggctgctggagtttatactactagggaaggtgcgagggttacatggagttacataaatagaatcttgggtcagccttcgctgatccgtgagtcatcaatgtcaaagttcccactaccaatgtctaggctactcaaacctagttcagcatctttgtcggagggagcaggctttgagaaagttatcctgcacccttcactaaagcggaggattgaacatcttgcacgagcaactgcaaatacgaagtctcatggtgcaccattccgcaacatgctgttctatggacctcctggaactggcaaaactttagtagccagggagatggctcgcaaatctggcctggactatgccatgatgacgggaggagatgttgcacccttaggatcagaggctgttaccaagatccatcaaatatttgactgggctaagaagtccaaaaaaggcgtaacagtacccatatgagcgaagctcagcggagtgctctcaatgcattattgtttcgaactggcgaccagtccagggatattgtccttgtcctggcaacaaacagaccgggtgaccttgatgctgctatcactgaccgcattgatgaagtcatagagttccccctgcctggggaggaggagaggtttcaactgctcaagctatacttgaaccaatatatactcaaggaagagggcaaaggatcttcttggagtgcattattcaagaagcagcagcggaagattcaggtcaatggcataagcgatgatttgctcagggaagctgcaaggaagatcgacggtttctctggcagggagattgcgaagctggtggctagtgtgcaagctgctgtttatgggcggcctgactgtatattggacccccagttattttcagaggtagttgactacaaagtgactgagcatcaccaacgcatcaagcttgcttcagagggtatggtttgatcagtaagaaatatttacctcccactgactctagtagtgcatgttttggatcccgtgggagtgggacattttgtagcccccgtctattcccaccagttttgttccatgtgctttgcctgcagcaagggttggtcccggatggacatccaaataggccggttgtggtcaattgaatttagggtgtatttggttcagctttctaaattagattcgccgccaaaaacaggaatctcaatcaaacgggaacgacaatagaatagatttatgaaaatttatagattcctctagttctattcaaaatcaccttatttttaggattcctgttatccatgggctatcatgctcttttacagtttgtttcaaacaaaaatattttctctctccacaaccgttagttttcaagggctatcttcaacaatcaacatgacatttttctaccatggctacaatctcatgctcgtctacctcgacatcggtacaaatagctactatcttcaatgaactacttatcagttcatgtcagccacaagaatctaattgtctacaatgttactgcagtcctgctacgaatgcaggggggagcttagaataatatatcactaccggaatagagttagctaggattatgatcttgatccccgaatcatgtaaactctacgtatacacaccggccttgggatcaatgcaaatatccaacatgttgttcgctacatgttcgcttggctttaatctaaaat

SEQ ID NO: 40597 - DNA, 2606 bp, Zea Mays
tacccagtcgaccgtgccgccaaaaaccctgggtctcccctacgcttcgctcgtcatgctgcgccgcctccgcctgcgcttgccggggagggcggcgtcggctgccgccggcgcggccgctgcaatggcgtcgctcaccaacgtcgcctacgccgacggcctcttccgccgccagtccgcgccgtcgaatccaggcgacgaggacaatttgggagcctccgcgttcggccgcgatccggagaccctggagcgcatggcccgagcgctgcgggagatcaacaactcaccgctcgccaagcaggtgtttgaactgatgcggaagcaggaggagacgcgcctcactgagctggaggtcgagaaggtccaatacgccatctatgagaagctgagggacatcgaaaggatgcagaaaaaagctgaagattacagaaatagtttgcaacaagaagcacaagcaaaagctcaagcattacgctttgaggatgaattagctagaaaaagaatgcagatcatgctgcacagaggcgacaggatgctgaactcgtgaagatgcaagaggcatctgccctcaggagagaagaagctaggcgtgcaacagaacagaagattttggaagaaatgatacgtactgagaaggaaaaggctgaaatagatcaggaaacaaacagagttaaagctatagctgaagcagaagctcgtgttcatgaagacaagcaatcagaagaagttgttaaaagaatgttattggaacgcatgaagggtgaaaaggaaaagtggctcactgcaataaatacaacattttcgcacattgaaggtggattcaaagcactgttaactgataggagcaaactaatgatgggtattggaggagttactgcactggctgctggagtttatactactagggaaggtgcgagggttacatggagttacataaatagaatcttgggtcagccttcgctgatccgtgagtcatcaatgtcaaagttcccactaccaatgtctaggctactcaaacctagttcagcatctttgtcggagggagcaggctttgagaaagttatcctgcacccttcactaaagcggaggattgaacatcttgcacgagcaactgcaaatacgaagtctcatggtgcaccattccgcaacatgctgttctatggacctcctggaactggcaaaactttagtagccagggagatggctcgcaaatctggcctggactatgccatgatgacgggaggagatgttgcacccttaggatcagaggctgttaccaagatccatcaaatatttgactgggctaagaagtccaaaaaaggcatgcttgttttcattgatgaagctgatgcattcttgtgcgagcgtaacagtacccatatgagcgaagctcagcggagtgctctcaatgcattattgtttcgaactggcgaccagtccagggatattgtccttgtcctggcaacaaacagaccgggtgaccttgatgctgctatcactgaccgcattgatgaagtcatagagttccccctgcctggggaggaggagaggtttcaactgctcaagctatacttgaaccaatatatactcaaggaagagggcaaaggatcttcttggagtgcattattcaagaagcagcagcggaagattcaggtcaatggcataagcgatgatttgctcagggaagctgcaaggaagatcgacggtttctctggcagggagattgcgaagctggtggctagtgtgcaagctgctgtttatgggcggcctgactgtatattggacccccagttattttcagaggtagttgactacaaagtgactgagcatcaccaacgcatcaagcttgcttcagagggtatggtttgatcagtaagaaatatttacctcccactgactctagtagtgcatgttttggatcccgtgggagtgggacattttgtagcccccgtctattcccaccagttttgttccatgtgctttgcctgcagcaagggttggtcccggatggacatccaaataggccggttgtggtcaattgaatttagggtgtatttggttcagctttctaaattagattcgccgccaaaaacaggaatctcaatcaaacgggaacgacaatagaatagatttatgaaaatttatagattcctctagttctattcaaaatcaccttatttttaggattcctgttatccatgggctatcatgctcttttacagtttgtttcaaacaaaaatattttctctctccacaaccgttagttttcaagggctatcttcaacaatcaacatgacatttttctaccatggctacaatctcatgctcgtctacctcgacatcggtacaaatagctactatcttcaatgaactacttatcagttcatgtcagccacaagaatctaattgtctacaatgttactgcagtcctgctacgaatgcaggggggagcttagaataatatatcactaccggaatagagttagctaggattatgatcttgatccccgaatcatgtaaactctacgtatacacaccggccttgggatcaatgcaaatatccaacatgttgttcgctacatgttcgcttggctttaatctaaaat

SEQ ID NO: 40598 - DNA, 2689 bp, Zea Mays
tacccagtcgaccgtgccgccaaaaaccctgggtctcccctacgcttcgctcgtcatgctgcgccgcctccgcctgcgcttgccggggagggcggcgtcggctgccgccggcgcggccgctgcaatggcgtcgctcaccaacgtcgcctacgccgacggcctcttccgccgccagtccgcgccgtcgaatccaggcgacgaggacaatttgggagcctccgcgttcggccgcgatccggagaccctggagcgcatggcccgagcgctgcgggagatcaacaactcaccgctcgccaagcaggcaaggtgcccgcccttttgctccaccaaacggagtctgccccctcctgacgttgttgtgttgttgttgctcgtgtgcaggtgtttgaactgatgcggaagcaggaggagacgcgcctcactgagctggaggtcgagaaggtccaatacgccatctatgagaagctgagggacatcgaaaggatgcagaaaaaagctgaagattacagaaatagtttgcaacaagaagcacaagcaaaagctcaagcattacgctttgaggatgaattagctagaaaaagaatgcagcagatcatgctgcacagaggcgacaggatgctgaactcgtgaagatgcaagaggcatctgccctcaggagagaagaagctaggcgtgcaacagaacagaagattttggaagaaatgatacgtactgagaaggaaaaggctgaaatagatcaggaaacaaacagagttaaagctatagctgaagcagaagctcgtgttcatgaagacaagcaatcagaagaagttgttaaaagaatgttattggaacgcatgaagggtgaaaaggaaaagtggctcactgcaataaatacaacattttcgcacattgaaggtggattcaaagcactgttaactgataggagcaaactaatgatgggtattggaggagttactgcactggctgctggagtttatactactagggaaggtgcgagggttacatggagttacataaatagaatcttgggtcagccttcgctgatccgtgagtcatcaatgtcaaagttcccactaccaatgtctaggctactcaaacctagttcagcatctttgtcggagggagcaggctttgagaaagttatcctgcacccttcactaaagcggaggattgaacatcttgcacgagcaactgcaaatacgaagtctcatggtgcaccattccgcaacatgctgttctatggacctcctggaactggcaaaactttagtagccagggagatggctcgcaaatctggcctggactatgccatgatgacgggaggagatgttgcacccttaggatcagaggctgttaccaagatccatcaaatatttgactgggctaagaagtccaaaaaaggcatgcttgttttcattgatgaagctgatgcattcttgtgcgagcgtaacagtacccatatgagcgaagctcagcggagtgctctcaatgcattattgtttcgaactggcgaccagtccagggatattgtccttgtcctggcaacaaacagaccgggtgaccttgatgctgctatcactgaccgcattgatgaagtcatagagttccccctgcctggggaggaggagaggtttcaactgctcaagctatacttgaaccaatatatactcaaggaagagggcaaaggatcttcttggagtgcattattcaagaagcagcagcggaagattcaggtcaatggcataagcgatgatttgctcagggaagctgcaaggaagatcgacggtttctctggcagggagattgcgaagctggtggctagtgtgcaagctgctgtttatgggcggcctgactgtatattggacccccagttattttcagaggtagttgactacaaagtgactgagcatcaccaacgcatcaagcttgcttcagagggtatggtttgatcagtaagaaatatttacctcccactgactctagtagtgcatgttttggatcccgtgggagtgggacattttgtagcccccgtctattcccaccagttttgttccatgtgctttgcctgcagcaagggttggtcccggatggacatccaaataggccggttgtggtcaattgaatttagggtgtatttggttcagctttctaaattagattcgccgccaaaaacaggaatctcaatcaaacgggaacgacaatagaatagatttatgaaaatttatagattcctctagttctattcaaaatcaccttatttttaggattcctgttatccatgggctatcatgctcttttacagtttgtttcaaacaaaaatattttctctctccacaaccgttagttttcaagggctatcttcaacaatcaacatgacatttttctaccatggctacaatctcatgctcgtctacctcgacatcggtacaaatagctactatcttcaatgaactacttatcagttcatgtcagccacaagaatctaattgtctacaatgttactgcagtcctgctacgaatgcaggggggagcttagaataatatatcactaccggaatagagttagctaggattatgatcttgatccccgaatcatgtaaactctacgtatacacaccggccttgggatcaatgcaaatatccaacatgttgttcgctacatgttcgcttggctttaatctaaaat

SEQ ID NO: 40599 - DNA, 4377 bp, Zea Mays
caaaagcaacagcacgtagtaggccacagggggacacgggggtgagtgagtgagagagagagagaggccaggcggctgctgcagcagagtgcagacgtgccgagacgttattccaagctcgcattgaactgctccaaagggatcccaaagcgccagcctttctcgcggcccgacgagggagagggaggatggggcggcagcgggcatcatcatgccatgacagcagctgagctgagtgagagtcggctcgtgatgaaaaacaaaatcgcaaagtaatcgctcggttcaaaccggcgccttcagctccccatcataaaacgaccagcactcccctcggtgcccaagagtgcgacacccaaacggccgaaccattttcttcgagggagagcgtggtggtggcatatatcagcagctagcagcttgagagagcgccgagaaccaaggatatgcctgaccccacggtctactaccccgcgtcctccaacgccgtcctgcgcgcgcgggcgccttccacgaccgccaagggctcgttcggcccggtcttcgccgtgctcgcggcgatctccttcctcgccgtggccgcctgcgtcgccggcaggctgtgcgggcgccggctctccaggaagaggtacgccgccgaccaggactcctacgcctccgactccgtcggaggcgacctggagaagggcggcggattcgagatcaagtgcccggcgatgaagcccgtggcgagctcccgcgccacgatccacgacatcgacgacggcttcgagatcaagttcgcgccggggaagcctccggcgtggaagagcgacggcaagcttgctggcagcaacaaggggcgtcagcttaagcatcagcaacagccccagctcgtcggcgttcccaaaggctacgccgtgccaaaggactacgcgggcttcaggtaccctgctcaagctgtggctgtggctgtggacgggcaggggcaaataaggggcggggcgttcgttccagcgaagcctggcacatgagcgaacaataatgtagcggcagctttttaggttcacgagactcgatcgatgtatcacgtacaatctctcgtcgtccctcggcggacgacggcgttttacatcttcaactctagtttttgggggcgcagtgtgcaagagttggaaccctccgcgaactagttccaggcaccacttccatatcgtattttgtacatcaacccattataaaagcagtgaagaagaacatctcattctccagtgacatggcatggcttggcttggaagcatcaatcgtcgacagggtcctgaggagcttcggtagcgttccgttttatggtgatgacggggcattcggcatgcttaacgcagaactcgctcaccgtgcccacgaaaaccctacatggagtccattcagactcggtgcatgtaaattccatgtacatttttcttactgaaattaattccgtaaatagaatgcagcgacaaaaaaaaacttttgcgtagtctcgataatctactagtaccatccagatactagatgaatagactatggtagactatagtatgtttgaatgcactaaagctaatagttagctgctaaaatttgctgaagtcatccaacagtctagctaacaattcagctattagctacttttagcaaattaattaatagttagctagatatttttaccaacaatttttttagtcaattaactattagttctagtgcaacgactaatatgcaaacatgtaagtagacttttttgtacattagatctaaatccaacggtaaatataattgtggattgttaaggtttttttataaatatatatcaggtggtggtggaagagttgaagtgttaaatatgatatatcgttggatctagatctaacaaagtagaatatctatttgcacgcttgcacctagtacatgcttgcatattagtcatcgcctttaaacacccctatgccaacaaactttggtattgaatttcccatttaacaaataaaaaagcacattatagcgtacaaaagacacttgaaaatagttcatgttcttgaagataaaactcccacattgcacaaaattatgcctactctacacagtttccatcatatagttcatagtgactaaacactatgtgacaccaccacctaggtaaataaaacattgactgacaaaagagttgcgatcatatagttcatagtgactaaacactatgtgacaccaccacctaggtaaataaaacattgactgacaaaagagttgcgaagaagtcatgcatgacaaaacgaaattagatctcaaatgcacatgacaaaacgaaattagatcccaaatgcaccttcaaacaggataaaagtaacgaatcagtctatataattagtcttgcctcttacttatcaagataaataaggtattccctctattagtattgactaaactgtgatgaaaggtaatccgagtgccggaggctcacacgagtggtgtacgaggagggataaaccgaggcaagtctttaccccacaaatacaaagagtctgccgacccggtgacttagcgagatagctctcgccactgcacgaggtttgtcctgatgaaaaaaacttgttcaccagaaatttagcaaagaaatagatgaagggtgtcaatgagaactacacaacttgttctagacagacgtgacaaatcaggagatataatcagccctacatgtataggccactaaattgcaaaatctttcaattagtgcatatggctttcacagtaggcacgctacacactgctcattgatttgtacggcacaatcttatctagggtgcacgaataccaaaaggcatcggcataatcatatgagtttatgcatgcacacaaataataaatgtagaacaacatcttgcatgcaataaagccttggaaagttgagaaacatactatcgtgattagtgagatgatttgagcacaacacaaccaaagagaagagggtgacaggatcataacaaaggcaataattacacttcactagaagcaacatggcaaagtagacaaaagagtgtcctgtttttccttttcatacatggcacctttctatttcaaaatatttggacaaaatgttgtttgtatgcttgatcactgatttggttttaaactacgtagattccattataaagggaaatcttatacctatttttttacaagaagataatccctgttacagaggatgatgtgcaacttaggccatgagaatgggacaacccaaaagggtacagtggtattagataaagcgttactggagcaagaaagatctctaggtcacagtcagaccttattggttcattcagaaatcatatacagtatcctacaaggctaaagtgcatatatcgttctaatttctaagatgttatagagaaacattataccaccaattgaagttcacaaatgaaacataggatttcatgttctaatactcttcatctacaattgacatgttacagccaggctcgacaaattcaatattaactgtgagatgttagctgcaatccttttattaattgacattgtactccacataaatccagaggaaaaactcttgctcttcttaaatattttgtattgttatatgcaatatgcaaactttcattgcttcttcccactttcctaggtctctcaaaaactatataagaaaaatactcaaaacaactttagaaaagaggctaactagttaacatctgacaattttgtaatgcgtaatggtatttaagaataatcactcaacaacctgaaagtcatatgcgtttgtacaacttgcaaaaaggcagaagctacatgagtgctgacaggtttattctgttttgaaatagagaaatattaagtataataaaaaaaagttcaatattttccttgtgctacatcaaggtactaaataatagagacagaaaagcaatgctgaaaattgctggtagtaagcaccagacatgttcatatgatgggccaactggccaaagtcaagcccaagctccgaccagacttagcttgaggccaggtacagatcccagaaaagcccaaatattgatatgaataggttttggattacaaaagcatatttttccatgaaatatttccagaacaaattggtaagtgcaaacattttatttcctatttcttggaatatattggtaaaagcatgctgggcctcaagtacaattaaatcgagtgaccacacaacaacaaacacattatccttggataatcaaagcgcaaaggaaatgtaagatatggagcacaatgagcagggagcaagataatgtgagaggttgaattaccgcaacatgcacttttctgtctatgccattctgaataaaatgctgtgcgatatggctgaac

SEQ ID NO: 40600 - DNA, 2731 bp, Zea Mays
agtcctccggcgaagcatagatgctatccatgtcatcaaatcctttcaattggcatcaaaacaaaaaatcgtcttatattaagacacaaaatagtgatgcattaaagtttcaagcgagcatccaatatttatccattgtacagaaagataaactggggaaatgtttgaaaacctataagcattaattaatgcatgttccagaaatattttttcagtacatacacagacactggacactggaaaaaaaacatgaaaggttaccaaagtttattgtattaataattaactgagttctgaactactgcaaaagaagaccaggagcccaatggaagatctctaagttagtagttatgtagtagaagaataatgttgtccagtacaacgccaaactagctaagtttggcgttactaactaagtttggcgttacaacaaaatgcccctaagtttggcgtaatgttgtccagtaccccactttgctctttcagaccatcactgattttcttcatcttgcaggctagcgcagatggtaaagcaacagaaaaaggaaatatatgagaacaaacaaagcaaacaaattaaggcaccgagagaattgccatataaacatccatgatgcacaaatcctctgttcaatttcttgtatcagctaaactgcattgtgatccccctaaaaaatcctaacaggacttttttttgacacggaaccattaagctcaaaatgggatgaaaacatagtacaagaaaatatggtacaagaggcaaatgctgctgccacagtaacattctcagaaggccagacaccagtaaaagagttgctaacaaaattcttgagagaagaaaaagagcaaagtgatatggtagacaatgtctaaaaaaataggtgtaagttgttaggttattgaaacccaagctgaacaataatcatgtgatttgatgacaaagggatggtctgaaagaggtaaaaagaaatcaggatggaagcctgttgtaagggcattactaatgcaattggagatgaggaacaaatgcacatgagcacaaacagtagcatgatactacctatctgatcacaaaaactataccacattcctgtatgaaagagtcgtatttgtgtggtactctgttccacagttggttgggctgcagcagtatgctccaggcttaagggacaacctttttactgaatggtggtgtcaggccgcacaacaggtacctaagcaatctcgtaagggcttcaatctgttactcgtaggtagttttagtggcttggtggatctggaaacatagaaatgcatgtgtgtttgagggaacctcacctagttttcatagcatcgtgagaaatgtaaaagaaaaagctaaactttgctgtatggtgggagccacacagctctgtagtttatggccatgatgcccctccttggtgttggtcacgtactagagtgtgtgtggcaaattctagtgtggtgtttgccccttcaggggttgtatgagtagtcctcctctgcttaatataatgatgtatagctctcttgtgtgtttgagaaaaaaaaaaagagtcgcatttgaagtaccattaaacattttcctacatgaatggttgtgatacaaagtattgattcgaagtaacataaacttccacatattaaaagccctcgttgtcaaaatgtcatccttacccaaaaaaataccagtacaagaagtccacatttttgtcaaagtagaaattataagattgcttgcctagaaattaactgaggggcattttgtttccattttatttcaaccaacaggctagtcctgcatacatcatttcgagtagagaaactctacaaccatacaagtatacaacttctgatacaccagaattgagccaggccatttaggatcaagtaaatcgtcagaagcaatttgctgatcttttttttatctctaactttctgaaaaaacaaatgatgcaattagccacaaaagatgagatattcaatgcagcagccaacaattctgatcaaggtatgccaaatccagaattccagatgccaggccacctaacagtaaccaacacaacatagtcggaacagaacaagttggatgctgtgagcacgcagaaaaattggatgctgtgactgtgagcgaatacaatggctcagcacatcagaagatggaaccaaaactatcatgcacaggtgctgctttttttgaaaaaatggttttgacacggcatttaccaaaataatcattgctattactgaatttcttgttctagccgtgtctattgtggaattttttgtcatatggcctggcagttaattataatttctgcaatttcgtcaatcttaatattatttttgtaattgttggagcaagtgatctttttgagaaaaaaagctgcaaattttcgcggattaatctacataaacagtgaggtcgcagtaaggacaacattaaccaatactatcagtgcgtggctacccgtgcacgggggagagctagtatccacagttccacacagcacgcatagaggcatacaccgcatacggcatacccaaatcacatacttagtcggtaccatgtaccaacgcgaacgcgtgaatggagggagaaaccacacatttcgcgtgatttcgctgagtagcacgcgcgcggataaatagcgagcaagtcacaggggcaccgggcaagcgagtgtacttaccgtcctcgtcggggacctgaacgtggacgaagaggaag

SEQ ID NO: 40601 - DNA, 1691 bp, Zea Mays
tgtccgctgcgtctccaaaacagagaagccaacaccaacgccaccccttctgtcttcttccataatggcaattatctcgccgtgcgaacccctgcacccgaaccctcacttaaaaactagtccccttgcgaaaaaattggtccgtccctgcctcagtctgcactctacgatggcggcgcctccggccacggctcccgcgaccgcccgatgtctgtccgtcgccaagtcgtgctgggctgccgagcggagctccagctcgtttgtcctctcggctcctgcgactggcctccggcaaagtgggagccgcgtcctcagcatccgtgccaaggttgccactggcctgcagagggcctgcattgcggatgatggagcggaaaggccgtggaagctcagtgatgctcgtcttgtcctggaagatggatcagtgtggacggccaagtcttttggtgcttcaggaacacaagttggtgaagttgttttcaacacatcactgacaggctatcaggagattttgaccgatccaagttatgctggtcagtttgtcctaatgaccaatcctcatattgggaacactggcgttaatcctgatgatgaagaatcaaaccaatgttttcttggtggcttaatcataagaaatctaagcatatgtacttccaactggcgatgcaaagaaacacttgagaagtatctgattaagaggaacatcatgggaatatatgatgtggatacacgtgctataacacgaagattaagagaagatggtagtcttattggtgtcttgagtactgatcagtctctgacagacaatgagttgttagaaatggcccaaaagtggaaaattgttggagttgatttgattagtggtgtcacatgtgatgctccatatgaatggtcggacaagactgattcagaatgggagtttaagagggatccgtcaagtgaaacttttcatgtggttgcctacgactttggtatcaagcataatattttgagacgattgacatcatatggatgcaaaataacagttgttccagcaaattggcctgcttcagaggctcttggtgggaagacatttaaaatgaaatttggacatcatggcgggaatcaccctgtctgtgatctccgtagtggacgtgtagacataagtgcacagaaccataactacgcagttgacccagaatcactcccagaaggagcaaaagtaactcacgtcaatctcaacgataatagttgcgctggcctccagtactccaagatgaagcttatgtctctccagtaccatcccgagtcttcccctggtccgcatgactccgacacagccttcggcgagtttatagagctcatgaagagcaacagattgtaagaaaggggatcaggggagtacttgaaaaggtcaataattgtattggtgctccctcgcaccaacctcaaaagaatttgttgtatctgtagtgtttttcttttggttttgggacgttcatgtgcttgaatttttgggtccagaggacatagcataagatgctctgcgcattgtaccatgaaatggcctggttggatttcgtgaagataacatgtcatcaaactgtacggtacggtacactcactcggacagcgcctcgcgaatttcttaacggcagttcactcgttgatgctctgtctgaccagattggcggtgtgacgaagagaaaagg

SEQ ID NO: 40602 - DNA, 906 bp, Zea Mays
tttttttttttgagggggtcctctcaagaaaggccaggccagcagcaggtggctggatttgctcgctgtttttttctctctctcgttcgtccggttgtcagtcagtatgaaaaaaaaagaaggtgcagcgcggcgggcggcagctggccagagtggacgatcggttggcgcgaaagcgacgggacggcggaaacgaaggttgtcatgctgcgattacactgtgtatatatcaacaattactccagagtataaaacacactggtcgcagtcgcggcgccggcgcgcgaggaggacaaggatggcaacttcagagtaggcgagctagagttgctcgccaacgaccgccgaccggccggccggcgagctcgatcgacccccccgaacttttctctccattttcctcgctggctgcctggctggctgcattccgagatgcgcgtgaaccgcatcgcatcggtgatcagtcccatccgcgacgcgacgaggtggacccatggtcgcaccacggacacgagcaccgtcctacgatcgtgtcatcatgtgaatctgcctgagagacgttggcatgtacggtggttggccagtggctgtgatcttgcgcaggtatgtacagccgaccggcgtgacgaattatcgagcgacgccgcgcgtgatacggggctccgtcggccggcgtgggtcacgacaaccggacggtacgggtttattgccgttgtttcgagggaaatagagtcatagagatatgtatgctatctaggccgcgtttgcttcctttatcaggtgactaaaataatcactgaggtaccctgcttagttttagtgactaaatttatgtacatagcattaattactggatataaatgtataatgactgtattatctctgttcaatgctttgatgttgttg

SEQ ID NO: 40603 - DNA, 5390 bp, Zea Mays
gttttccttcaccggactaccaggggcgaatcgcggacgccgcccacctcccccatctccttccccagcacgtcgcaaacccttcgtcgccacccccgcctcccgccgcggctcccgtcgtcgcgtggccgtcgcgagccaccgctggcgtctctcgtccggttctctgagtctcggcgacctgttcctccgccgagttctcggggccctgctgtcgccaccgccgaatcctgctgtcctcgccgcagccggggaacgcggtgtgttgcgggagctggcaccgcctccttcgagaactaagtcaacagtctttatgggcttcatgctagtagatgatagttcctggcttcctgcactgcttttggaagacctgccttttcaatcatagaggattggtagaccagatcctggcaaagcaatgctgatggaccctcctgttatgcaaatggactgcaagttgaaaaatgctatggataaaacaccacaaatcgcctatgataggaagctgaccgtctcacatgatgattatgggtgggcaggctctgatgtccacctaaaagatgatacaatagggacagaactaagagagaagaatagcgacagttcttactccgatgtaaaacttcagttaaatttaagtgctggaaattataatggcttgcaaactgatgattatagctttaataaacagagttttggtaagaaggatatgcatcatcctcaggaagagatacattcttctcccaatacaatgtcattaccaagtccatgcagactcaatggagacgtcacaccttgtgaagcggagaaaatagcagaggatcgtggcaaagtagatgggattgtagatgctgtaagtaaggaagtcaaaactgacttggtaggatgccatgcacggcaggaagaattgcaatgcacgctccaagatctatcagaaatagcctgcagtattgatttaggcaggagctcaatatggggaatgttggagatgaggatcatgctgtagcactttgggtgaagtggagaggaaaatggcaaactggaatccgatgctgtagagcagattgtcctttacctactctaagggcaaaaccaacacatgacaggaagacctatatagttgttttcttcccacgaacaaaaacttactcttgggtagacatgctacttgttcttccaatagaggaatgtcctttgccacttgtgaatggaactcatcgtaaatggagaaagctggtaaaggatttgaacattcctcgacgattcaacatacagaatcttgccattttaatgataaatttaattgatgagcttcatattgaggctgtagttgataatgcacggaaggctacaacatggaaagaatttgccctggaagcatcttgctgtagagattacactgatcttgggaagatgctcctcaaatttcaaaatatgattcttcctgactgcataagctgtgaatgggtacaaaattctattgagacgtggaatcaaaagtgtatgaacgcacatgatgccgagactattgaaatgctttgtgaggaacttcgacagtccattcttgggaacaagcttaaggaattgcgggatgcatcagtgcagcctgaattagtccctgagtggaagacgtggaaacaagaattgctgaaacagtacttttcattacatcctgctggtaatgttggcaacttcgagaaaactaattgttacgacgatccagctttagatcaacaaggtagtagaaagcgtccaaaacttgaggttcgaagaggagagatccaaattttacacatgggtgaagctgactacaggactccaactgaggacccaaaccaaaataagcttcctagtaactctgtcatgcatgaaaatataggggcattaggagcaacaagtcaaaaaaatgctgtcatgttccctggaagttctggcaccaatgagaatacaatatctggtagttccaatgcagctttacagaatgctagacttgatttagattcattcaagagctctcggcagtgttctgcgtacattgaagcaaaggggaggcagtgtggtaggtgggcaaatgatggtgatatttactgttgtgtgcatcaaagtatgcattttcttgatcattcttcaagggaggataagacacttaccattgaagctccattgtgtagtggtatgactaacatgggtagaaaatgcaagcatcgagctcagcatggttctactttttgtaaaaagcaccgcctacagacaaacttggatgtaatgcacccaggaaatttgttggatccatctgaggtactccatatgggcgaagaacctccgaataagtgggtggaaggaatttctaagtcgcaagcattgtatagcatagacttagaaacagacaaaaatgtccaggctgttgtacaagtgaaactgatgcccactgtggctatagagaactctggtgaaaaaggttgtgcaatggagaaaactgatatgtgtgctgcgtcaacgtccatgacaaatactgatgatacttctctttgtattggaattcgctctcatgacagtattgttgaatgccaggattatgccaaacgacatactctttattgtgagaagcaccttccaaagttccttaaacgtgccaggaatggaaagagtcgactcgtttctaaagatgtctttgtcaatctgttgaagggctgctcatcaagaaaagataagatatgtttacaccaggcttgcgaatttctttattggttcttgagaaacaacctttctcatcaacgcaccggtcttgctagtgaacatatgccccagatactggctgaagtgtcgaaaaatccagattttggagaatttttgttaaagttgatatctactgagagagagaaactagcaaatatctggggatttggtacagatagatctaagcaaatatattctgaaaacaaagaaggatctgtagcgttgcaggaagagaaaactaatctttcatctggtcctaagtgcaaaatctgtggtcaccagttctctgatgatcaagctcttggattacattggacaactgtccacaaaaaggaagcccggtggctgtttagaggttactcttgtgctgcatgcatggaatcatttaccaacaaaaaagtccttgaaagacatgtacaggatgtacatggggctcaatacctccagtattcaattctcattcgatgtatgtcatgtaacagcaattttttgaacactgatctgctataccctcacattgtttccgaccatgcccaacagttcaggcttcttgatgtccctcagcgaccaagtggtcaatctgctcaacaaacagaagggatgagtggtctgcccctttatgatagccacaacgttgaggatgaaaatggctcacagaagtttgtctgcagattatgtgggctcaaatttgatcttctgccagatcttggccgccaccataaagtcgctcatatggtctcaggtgctgttggccacattccactgggccgtgggaagtaccagcttaaccgcggccgacactactattccgctttcaagaaaagtttgcgaccaacaagtacattaaagaagagcagtagctctggaatcgataaaaatttgaagtttcagatctctggcttaacatctcaaatagttgaatctgaaacatccagccttggtaagttacaggatttccaatgcttagatgttgcacaaactttattttccaagattcaaaagacaagaccccatccaagcaactttgatgttttatcggttgcccgctctgtatgctgtaagacaagtcttcttgctgcgttggaagttaaatacggacctttacctgagaacatatttgtgaaagctgcaaagctttgcagtgacaatggcatccaaattgattggcatcaagagggattcatatgccctaaagggtgcaagtctagatataattcaaatgctctgcttcctatgcaactcacggcagttgattttcttgaagctcctgttgattcccgtaatgatgatgaaatgtggggaatggaagaataccattatgttcttgattcaaagcacttcggatggaagcctaaaaatgagagtgttgttctctgtgaagacataagctttggcagggagaaagttccaattgtctgtgtcattgatgtggatgcaaaagattctttaggtatgaagcctgaagaacttttgccacatggcagttctttgccttgggaaggatttcactatatcacaaaccgtgtgatggattcatctcttattgattcagagaactctatgcctgggtgtgcatgttctcatcctgaatgttctcctgagaactgtggtcacgtgagtctctttgatggtgtctacaatagcctggtggatatcaatggaacaccaatgcatggcagatttgcatatgatgaagatagtaaaattattttacaggaagggtatccaatatatgagtgcaattcatcatgtatttgtgactcgtcctgccagaataaagtattgcagaaagggctgcttgttaagttggaactctttagaagtgagaataagggttgggctattagggctgctgaacctattctacagggtacctttgtctgcgagtatattggtgaagttgtgaaggctgacaaggctatgaaaaatgcagaaagtgtgtcatcaaagggtgggtgcagttacttgtttagcattgcttcccagattgatagggaaagagttcggactgtaggggctattgaatactttattgatgccacaaggtctggaaatgtttcccgttatattagtcacagttgttccccgaatctcagtacccggttggttttggtagagagcaaagattgccagcttgctcacattggattgtttgctaatcaagatattgccgtaggagaagaactcgcctatgattaccgacaaaagcttgtagcaggcgatggctgcccatgccattgtggaactaccaattgccgaggccgtgtctattgattttgcaggaatacactaactgttcaatgctcggttgcagaactccagagatttcaacagttgtgtaggcttgctgagcgatttagcattgcaattttcctacagcttgagtgcagggctaggatctcattgttaatgctacaaatagtgattgtgatataggactcaggcaagcattaggcaataacatagtgtcgattttagtcatggtaccatcatgtttaactgattatttgttagaagcagcctgaaatgaaactgattcaggctgctctgttcgtaggcgagaattctctctgtaaaattccttcattcatattttatggttcatgagcaccatcattgacgtgaagtaataaactagttatcccaaaaaaata

SEQ ID NO: 40604 - DNA, 679 bp, Zea Mays
caccggactaccaggggcgaatcgcggacgccgcccacctcccccatctccttccccagcacgtcgcaaacccttcgtcgccacccccgcctcccgccgcggctcccgtcgtcgcgtggccgtcgcgagccaccgctggcgtctctcgtccggttctctgagtctcggcgacctgttcctccgccgagttctcggggccctgctgtcgccaccgccgaatcctgctgtcctcgccgcagccggggaacgcggtgtgttgcgggagctggcaccgcctccttcgaggtgcgtcgtcacggagggtagtttccgtttcgtctccatctccccaaggatcggtcatggtcatgctcagcttcgttgggatttctaagaccgttgagcattctgccgagcctatggtcccaatccataaccgaaatcgcttcatggatcctaatgggcgcgtcgaacatctcggggtttctattttcactggcacaattttattgcacgttgaaacatatagttagggttttatgacaaatgtatttaatggccatggtatccgtacgaaaatggcactacattttgtacagttttgcatgcttaccatatgctgtgccctcttgaaattttggtgtagctagaccaggagagagagtcgcactgtgatttcatgcatgtaattaaaatggac

SEQ ID NO: 40605 - DNA, 5029 bp, Zea Mays
cgcaaacccttcgtcgccacccccgcctcccgccgcggctcccgtcgtcgcgtggccgtcgcgagccaccgctggcgtctctcgtccggttctctgagtctcggcgacctgttcctccgccgagttctcggggccctgctgtcgccaccgccgaatcctgctgtcctcgccgcagccggggaacgcggtgtgttgcgggagctggcaccgcctccttcgagagttttggtaagaaggatatgcatcatcctcaggaagagatacattcttctcccaatacaatgtcattaccaagtccatgcagactcaatggagacgtcacaccttgtgaagcggagaaaatagcagaggatcgtggcaaagtagatgggattgtagatgctgtaagtaaggaagtcaaaactgacttggtaggatgccatgcacggcaggaagaattgcaatgcacgctccaagatctatcagaaatagcctgcagtattgatttagtacgtaataaatcttctccacaagaagagaagaagtctgtttcccctttgaatgacatgggccataatgtggataacaatagttgtaatggtgataccaattataaagggcaggagctcaatatggggaatgttggagatgaggatcatgctgtagcactttgggtgaagtggagaggaaaatggcaaactggaatccgatgctgtagagcagattgtcctttacctactctaagggcaaaaccaacacatgacaggaagacctatatagttgttttcttcccacgaacaaaaacttactcttgggtagacatgctacttgttcttccaatagaggaatgtcctttgccacttgtgaatggaactcatcgtaaatggagaaagctggtaaaggatttgaacattcctcgacgattcaacatacagaatcttgccattttaatgataaatttaattgatgagcttcatattgaggctgtagttgataatgcacggaaggctacaacatggaaagaatttgccctggaagcatcttgctgtagagattacactgatcttgggaagatgctcctcaaatttcaaaatatgattcttcctgactgcataagctgtgaatgggtacaaaattctattgagacgtggaatcaaaagtgtatgaacgcacatgatgccgagactattgaaatgctttgtgaggaacttcgacagtccattcttgggaacaagcttaaggaattgcgggatgcatcagtgcagcctgaattagtccctgagtggaagacgtggaaacaagaattgctgaaacagtacttttcattacatcctgctggtaatgttggcaacttcgagaaaactaattgttacgacgatccagctttagatcaacaaggtagtagaaagcgtccaaaacttgaggttcgaagaggagagatccaaattttacacatgggtgaagctgactacaggactccaactgaggacccaaaccaaaataagcttcctagtaactctgtcatgcatgaaaatataggggcattaggagcaacaagtcaaaaaaatgctgtcatgttccctggaagttctggcaccaatgagaatacaatatctggtagttccaatgcagctttacagaatgctagacttgatttagattcattcaagagctctcggcagtgttctgcgtacattgaagcaaaggggaggcagtgtggtaggtgggcaaatgatggtgatatttactgttgtgtgcatcaaagtatgcattttcttgatcattcttcaagggaggataagacacttaccattgaagctccattgtgtagtggtatgactaacatgggtagaaaatgcaagcatcgagctcagcatggttctactttttgtaaaaagcaccgcctacagacaaacttggatgtaatgcacccaggaaatttgttggatccatctgaggtactccatatgggcgaagaacctccgaataagtgggtggaaggaatttctaagtcgcaagcattgtatagcatagacttagaaacagacaaaaatgtccaggctgttgtacaagtgaaactgatgcccactgtggctatagagaactctggtgaaaaaggttgtgcaatggagaaaactgatatgtgtgctgcgtcaacgtccatgacaaatactgatgatacttctctttgtattggaattcgctctcatgacagtattgttgaatgccaggattatgccaaacgacatactctttattgtgagaagcaccttccaaagttccttaaacgtgccaggaatggaaagagtcgactcgtttctaaagatgtctttgtcaatctgttgaagggctgctcatcaagaaaagataagatatgtttacaccaggcttgcgaatttctttattggttcttgagaaacaacctttctcatcaacgcaccggtcttgctagtgaacatatgccccagatactggctgaagtgtcgaaaaatccagattttggagaatttttgttaaagttgatatctactgagagagagaaactagcaaatatctggggatttggtacagatagatctaagcaaatatattctgaaaacaaagaaggatctgtagcgttgcaggaagagaaaactaatctttcatctggtcctaagtgcaaaatctgtggtcaccagttctctgatgatcaagctcttggattacattggacaactgtccacaaaaaggaagcccggtggctgtttagaggttactcttgtgctgcatgcatggaatcatttaccaacaaaaaagtccttgaaagacatgtacaggatgtacatggggctcaatacctccagtattcaattctcattcgatgtatgtcatgtaacagcaattttttgaacactgatctgctataccctcacattgtttccgaccatgcccaacagttcaggcttcttgatgtccctcagcgaccaagtggtcaatctgctcaacaaacagaagggatgagtggtctgcccctttatgatagccacaacgttgaggatgaaaatggctcacagaagtttgtctgcagattatgtgggctcaaatttgatcttctgccagatcttggccgccaccataaagtcgctcatatggtctcaggtgctgttggccacattccactgggccgtgggaagtaccagcttaaccgcggccgacactactattccgctttcaagaaaagtttgcgaccaacaagtacattaaagaagagcagtagctctggaatcgataaaaatttgaagtttcagatctctggcttaacatctcaaatagttgaatctgaaacatccagccttggtaagttacaggatttccaatgcttagatgttgcacaaactttattttccaagattcaaaagacaagaccccatccaagcaactttgatgttttatcggttgcccgctctgtatgctgtaagacaagtcttcttgctgcgttggaagttaaatacggacctttacctgagaacatatttgtgaaagctgcaaagctttgcagtgacaatggcatccaaattgattggcatcaagagggattcatatgccctaaagggtgcaagtctagatataattcaaatgctctgcttcctatgcaactcacggcagttgattttcttgaagctcctgttgattcccgtaatgatgatgaaatgtggggaatggaagaataccattatgttcttgattcaaagcacttcggatggaagcctaaaaatgagagtgttgttctctgtgaagacataagctttggcagggagaaagttccaattgtctgtgtcattgatgtggatgcaaaagattctttaggtatgaagcctgaagaacttttgccacatggcagttctttgccttgggaaggatttcactatatcacaaaccgtgtgatggattcatctcttattgattcagagaactctatgcctgggtgtgcatgttctcatcctgaatgttctcctgagaactgtggtcacgtgagtctctttgatggtgtctacaatagcctggtggatatcaatggaacaccaatgcatggcagatttgcatatgatgaagatagtaaaattattttacaggaagggtatccaatatatgagtgcaattcatcatgtatttgtgactcgtcctgccagaataaagtattgcagaaagggctgcttgttaagttggaactctttagaagtgagaataagggttgggctattagggctgctgaacctattctacagggtacctttgtctgcgagtatattggtgaagttgtgaaggctgacaaggctatgaaaaatgcagaaagtgtgtcatcaaagggtgggtgcagttacttgtttagcattgcttcccagattgatagggaaagagttcggactgtaggggctattgaatactttattgatgccacaaggtctggaaatgtttcccgttatattagtcacagttgttccccgaatctcagtacccggttggttttggtagagagcaaagattgccagcttgctcacattggattgtttgctaatcaagatattgccgtaggagaagaactcgcctatgattaccgacaaaagcttgtagcaggcgatggctgcccatgccattgtggaactaccaattgccgaggccgtgtctattgattttgcaggaatacactaactgttcaatgctcggttgcagaactccagagatttcaacagttgtgtaggcttgctgagcgatttagcattgcaattttcctacagcttgagtgcagggctaggatctcattgttaatgctacaaatagtgattgtgatataggactcaggcaagcattaggcaataacatagtgtcgattttagtcatggtaccatcatgtttaactgattatttgttagaagcagcctgaaatgaaactgattcaggctgctctgttcgtaggcgagaattctctctgtaaaattccttcattcatattttatggttcatgagcaccatcattgacgtgaagtaataaactagttatcccagtggccta

SEQ ID NO: 40606 - DNA, 3298 bp, Zea Mays
cgcaaacccttcgtcgccacccccgcctcccgccgcggctcccgtcgtcgcgtggccgtcgcgagccaccgctggcgtctctcgtccggttctctgagtctcggcgacctgttcctccgccgagttctcggggccctgctgtcgccaccgccgaatcctgctgtcctcgccgcagccggggaacgcggtgtgttgcgggagctggcaccgcctccttcgagagttttggtaagaaggatatgcatcatcctcaggaagagatacattcttctcccaatacaatgtcattaccaagtccatgcagactcaatggagacgtcacaccttgtgaagcggagaaaatagcagaggatcgtggcaaagtagatgggattgtagatgctgtaagtaaggaagtcaaaactgacttggtaggatgccatgcacggcaggaagaattgcaatgcacgctccaagatctatcagaaatagcctgcagtattgatttagtacgtaataaatcttctccacaagaagagaagaagtctgtttcccctttgaatgacatgggccataatgtggataacaatagttgtaatggtgataccaattataaagggcaggagctcaatatggggaatgttggagatgaggatcatgctgtagcactttgggtgaagtggagaggaaaatggcaaactggaatccgatgctgtagagcagattgtcctttacctactctaagggcaaaaccaacacatgacaggaagacctatatagttgttttcttcccacgaacaaaaacttactcttgggtagacatgctacttgttcttccaatagaggaatgtcctttgccacttgtgaatggaactcatcgtaaatggagaaagctggtaaaggatttgaacattcctcgacgattcaacatacagaatcttgccattttaatgataaatttaattgatgagcttcatattgaggctgtagttgataatgcacggaaggctacaacatggaaagaatttgccctggaagcatcttgctgtagagattacactgatcttgggaagatgctcctcaaatttcaaaatatgattcttcctgactgcataagctgtgaatgggtacaaaattctattgagacgtggaatcaaaagtgtatgaacgcacatgatgccgagactattgaaatgctttgtgagttcaggcttcttgatgtccctcagcgaccaagtggtcaatctgctcaacaaacagaagggatgagtggtctgcccctttatgatagccacaacgttgaggatgaaaatggctcacagaagtttgtctgcagattatgtgggctcaaatttgatcttctgccagatcttggccgccaccataaagtcgctcatatggtctcaggtgctgttggccacattccactgggccgtgggaagtaccagcttaaccgcggccgacactactattccgctttcaagaaaagtttgcgaccaacaagtacattaaagaagagcagtagctctggaatcgataaaaatttgaagtttcagatctctggcttaacatctcaaatagttgaatctgaaacatccagccttggtaagttacaggatttccaatgcttagatgttgcacaaactttattttccaagattcaaaagacaagaccccatccaagcaactttgatgttttatcggttgcccgctctgtatgctgtaagacaagtcttcttgctgcgttggaagttaaatacggacctttacctgagaacatatttgtgaaagctgcaaagctttgcagtgacaatggcatccaaattgattggcatcaagagggattcatatgccctaaagggtgcaagtctagatataattcaaatgctctgcttcctatgcaactcacggcagttgattttcttgaagctcctgttgattcccgtaatgatgatgaaatgtggggaatggaagaataccattatgttcttgattcaaagcacttcggatggaagcctaaaaatgagagtgttgttctctgtgaagacataagctttggcagggagaaagttccaattgtctgtgtcattgatgtggatgcaaaagattctttaggtatgaagcctgaagaacttttgccacatggcagttctttgccttgggaaggatttcactatatcacaaaccgtgtgatggattcatctcttattgattcagagaactctatgcctgggtgtgcatgttctcatcctgaatgttctcctgagaactgtggtcacgtgagtctctttgatggtgtctacaatagcctggtggatatcaatggaacaccaatgcatggcagatttgcatatgatgaagatagtaaaattattttacaggaagggtatccaatatatgagtgcaattcatcatgtatttgtgactcgtcctgccagaataaagtattgcagaaagggctgcttgttaagttggaactctttagaagtgagaataagggttgggctattagggctgctgaacctattctacagggtacctttgtctgcgagtatattggtgaagttgtgaaggctgacaaggctatgaaaaatgcagaaagtgtgtcatcaaagggtgggtgcagttacttgtttagcattgcttcccagattgatagggaaagagttcggactgtaggggctattgaatactttattgatgccacaaggtctggaaatgtttcccgttatattagtcacagttgttccccgaatctcagtacccggttggttttggtagagagcaaagattgccagcttgctcacattggattgtttgctaatcaagatattgccgtaggagaagaactcgcctatgattaccgacaaaagcttgtagcaggcgatggctgcccatgccattgtggaactaccaattgccgaggccgtgtctattgattttgcaggaatacactaactgttcaatgctcggttgcagaactccagagatttcaacagttgtgtaggcttgctgagcgatttagcattgcaattttcctacagcttgagtgcagggctaggatctcattgttaatgctacaaatagtgattgtgatataggactcaggcaagcattaggcaataacatagtgtcgattttagtcatggtaccatcatgtttaactgattatttgttagaagcagcctgaaatgaaactgattcaggctgctctgttcgtaggcgagaattctctctgtaaaattccttcattcatattttatggttcatgagcaccatcattgacgtgaagtaataaactagttatcccagtggccta

SEQ ID NO: 40607 - DNA, 3577 bp, Zea Mays
ctaagtcaacagtctttatgggcttcatgctagtagatgatagttcctggcttcctgcactgcttttggaagacctgccttttcaatcatagaggattggtagaccagatcctggcaaagcaatgctgatggaccctcctgttatgcaaatggactgcaagttgaaaaatgctatggataaaacaccacaaatcgcctatgataggaagctgaccgtctcacatgatgattatgggtgggcaggctctgatgtccacctaaaagatgatacaatagtatgtagccctgtcgatcttagcgatgcttgtcaatcaggcatggatcgggtattagattctgcttccaaaaattcatctcttaatttgggcgatttatctcaggggacagaactaagagagaagaatagcgacagttcttactccgatgtaaaacttcagttaaatttaagtgctggaaattataatggcttgcaaactgatgattatagctttaataaacagagttttggtaagaaggatatgcatcatcctcaggaagagatacattcttctcccaatacaatgtcattaccaagtccatgcagactcaatggagacgtcacaccttgtgaagcggagaaaatagcagaggatcgtggcaaagtagatgggattgtagatgctgtaagtaaggaagtcaaaactgacttggtaggatgccatgcacggcaggaagaattgcaatgcacgctccaagatctatcagaaatagcctgcagtattgatttagtacgtaataaatcttctccacaagaagagaagaagtctgtttcccctttgaatgacatgggccataatgtggataacaatagttgtaatggtgataccaattataaagggcaggagctcaatatggggaatgttggagatgaggatcatgctgtagcactttgggtgaagtggagaggaaaatggcaaactggaatccgatgctgtagagcagattgtcctttacctactctaagggcaaaaccaacacatgacaggaagacctatatagttgttttcttcccacgaacaaaaacttactcttgggtagacatgctacttgttcttccaatagaggaatgtcctttgccacttgtgaatggaactcatcgtaaatggagaaagctggtaaaggatttgaacattcctcgacgattcaacatacagaatcttgccattttaatgataaatttaattgatgagcttcatattgaggctgtagttgataatgcacggaaggctacaacatggaaagaatttgccctggaagcatcttgctgtagagattacactgatcttgggaagatgctcctcaaatttcaaaatatgattcttcctgactgcataagctgtgaatgggtacaaaattctattgagacgtggaatcaaaagtgtatgaacgcacatgatgccgagactattgaaatgctttgtgagttcaggcttcttgatgtccctcagcgaccaagtggtcaatctgctcaacaaacagaagggatgagtggtctgcccctttatgatagccacaacgttgaggatgaaaatggctcacagaagtttgtctgcagattatgtgggctcaaatttgatcttctgccagatcttggccgccaccataaagtcgctcatatggtctcaggtgctgttggccacattccactgggccgtgggaagtaccagcttaaccgcggccgacactactattccgctttcaagaaaagtttgcgaccaacaagtacattaaagaagagcagtagctctggaatcgataaaaatttgaagtttcagatctctggcttaacatctcaaatagttgaatctgaaacatccagccttggtaagttacaggatttccaatgcttagatgttgcacaaactttattttccaagattcaaaagacaagaccccatccaagcaactttgatgttttatcggttgcccgctctgtatgctgtaagacaagtcttcttgctgcgttggaagttaaatacggacctttacctgagaacatatttgtgaaagctgcaaagctttgcagtgacaatggcatccaaattgattggcatcaagagggattcatatgccctaaagggtgcaagtctagatataattcaaatgctctgcttcctatgcaactcacggcagttgattttcttgaagctcctgttgattcccgtaatgatgatgaaatgtggggaatggaagaataccattatgttcttgattcaaagcacttcggatggaagcctaaaaatgagagtgttgttctctgtgaagacataagctttggcagggagaaagttccaattgtctgtgtcattgatgtggatgcaaaagattctttaggtatgaagcctgaagaacttttgccacatggcagttctttgccttgggaaggatttcactatatcacaaaccgtgtgatggattcatctcttattgattcagagaactctatgcctgggtgtgcatgttctcatcctgaatgttctcctgagaactgtggtcacgtgagtctctttgatggtgtctacaatagcctggtggatatcaatggaacaccaatgcatggcagatttgcatatgatgaagatagtaaaattattttacaggaagggtatccaatatatgagtgcaattcatcatgtatttgtgactcgtcctgccagaataaagtattgcagaaagggctgcttgttaagttggaactctttagaagtgagaataagggttgggctattagggctgctgaacctattctacagggtacctttgtctgcgagtatattggtgaagttgtgaaggctgacaaggctatgaaaaatgcagaaagtgtgtcatcaaagggtgggtgcagttacttgtttagcattgcttcccagattgatagggaaagagttcggactgtaggggctattgaatactttattgatgccacaaggtctggaaatgtttcccgttatattagtcacagttgttccccgaatctcagtacccggttggttttggtagagagcaaagattgccagcttgctcacattggattgtttgctaatcaagatattgccgtaggagaagaactcgcctatgattaccgacaaaagcttgtagcaggcgatggctgcccatgccattgtggaactaccaattgccgaggccgtgtctattgattttgcaggaatacactaactgttcaatgctcggttgcagaactccagagatttcaacagttgtgtaggcttgctgagcgatttagcattgcaattttcctacagcttgagtgcagggctaggatctcattgttaatgctacaaatagtgattgtgatataggactcaggcaagcattaggcaataacatagtgtcgattttagtcatggtaccatcatgtttaactgattatttgttagaagcagcctgaaatgaaactgattcaggctgctctgttcgtaggcgagaattctctctgtaaaattccttcattcatattttatggttcatgagcaccatcattgacgtgaagtaataaactagttatcccagtggccta

SEQ ID NO: 40608 - DNA, 5224 bp, Zea Mays
tttcaatcatagaggattggtagaccagatcctggcaaagcaatgctgatggaccctcctgttatgcaaatggactgcaagttgaaaaatgctatggataaaacaccacaaatcgcctatgataggaagctgaccgtctcacatgatgattatgggtgggcaggctctgatgtccacctaaaagatgatacaatagtatgtagccctgtcgatcttagcgatgcttgtcaatcaggcatggatcgggtattagattctgcttccaaaaattcatctcttaatttgggcgatttatctcaggggacagaactaagagagaagaatagcgacagttcttactccgatgtaaaacttcagttaaatttaagtgctggaaattataatggcttgcaaactgatgattatagctttaataaacagagttttggtaagaaggatatgcatcatcctcaggaagagatacattcttctcccaatacaatgtcattaccaagtccatgcagactcaatggagacgtcacaccttgtgaagcggagaaaatagcagaggatcgtggcaaagtagatgggattgtagatgctgtaagtaaggaagtcaaaactgacttggtaggatgccatgcacggcaggaagaattgcaatgcacgctccaagatctatcagaaatagcctgcagtattgatttagtacgtaataaatcttctccacaagaagagaagaagtctgtttcccctttgaatgacatgggccataatgtggataacaatagttgtaatggtgataccaattataaagggcaggagctcaatatggggaatgttggagatgaggatcatgctgtagcactttgggtgaagtggagaggaaaatggcaaactggaatccgatgctgtagagcagattgtcctttacctactctaagggcaaaaccaacacatgacaggaagacctatatagttgttttcttcccacgaacaaaaacttactcttgggtagacatgctacttgttcttccaatagaggaatgtcctttgccacttgtgaatggaactcatcgtaaatggagaaagctggtaaaggatttgaacattcctcgacgattcaacatacagaatcttgccattttaatgataaatttaattgatgagcttcatattgaggctgtagttgataatgcacggaaggctacaacatggaaagaatttgccctggaagcatcttgctgtagagattacactgatcttgggaagatgctcctcaaatttcaaaatatgattcttcctgactgcataagctgtgaatgggtacaaaattctattgagacgtggaatcaaaagtgtatgaacgcacatgatgccgagactattgaaatgctttgtgaggaacttcgacagtccattcttgggaacaagcttaaggaattgcgggatgcatcagtgcagcctgaattagtccctgagtggaagacgtggaaacaagaattgctgaaacagtacttttcattacatcctgctggtaatgttggcaacttcgagaaaactaattgttacgacgatccagctttagatcaacaaggtagtagaaagcgtccaaaacttgaggttcgaagaggagagatccaaattttacacatgggtgaagctgactacaggactccaactgaggacccaaaccaaaataagcttcctagtaactctgtcatgcatgaaaatataggggcattaggagcaacaagtcaaaaaaatgctgtcatgttccctggaagttctggcaccaatgagaatacaatatctggtagttccaatgcagctttacagaatgctagacttgatttagattcattcaagagctctcggcagtgttctgcgtacattgaagcaaaggggaggcagtgtggtaggtgggcaaatgatggtgatatttactgttgtgtgcatcaaagtatgcattttcttgatcattcttcaagggaggataagacacttaccattgaagctccattgtgtagtggtatgactaacatgggtagaaaatgcaagcatcgagctcagcatggttctactttttgtaaaaagcaccgcctacagacaaacttggatgtaatgcacccaggaaatttgttggatccatctgaggtactccatatgggcgaagaacctccgaataagtgggtggaaggaatttctaagtcgcaagcattgtatagcatagacttagaaacagacaaaaatgtccaggctgttgtacaagtgaaactgatgcccactgtggctatagagaactctggtgaaaaaggttgtgcaatggagaaaactgatatgtgtgctgcgtcaacgtccatgacaaatactgatgatacttctctttgtattggaattcgctctcatgacagtattgttgaatgccaggattatgccaaacgacatactctttattgtgagaagcaccttccaaagttccttaaacgtgccaggaatggaaagagtcgactcgtttctaaagatgtctttgtcaatctgttgaagggctgctcatcaagaaaagataagatatgtttacaccaggcttgcgaatttctttattggttcttgagaaacaacctttctcatcaacgcaccggtcttgctagtgaacatatgccccagatactggctgaagtgtcgaaaaatccagattttggagaatttttgttaaagttgatatctactgagagagagaaactagcaaatatctggggatttggtacagatagatctaagcaaatatattctgaaaacaaagaaggatctgtagcgttgcaggaagagaaaactaatctttcatctggtcctaagtgcaaaatctgtggtcaccagttctctgatgatcaagctcttggattacattggacaactgtccacaaaaaggaagcccggtggctgtttagaggttactcttgtgctgcatgcatggaatcatttaccaacaaaaaagtccttgaaagacatgtacaggatgtacatggggctcaatacctccagtattcaattctcattcgatgtatgtcatgtaacagcaattttttgaacactgatctgctataccctcacattgtttccgaccatgcccaacagttcaggcttcttgatgtccctcagcgaccaagtggtcaatctgctcaacaaacagaagggatgagtggtctgcccctttatgatagccacaacgttgaggatgaaaatggctcacagaagtttgtctgcagattatgtgggctcaaatttgatcttctgccagatcttggccgccaccataaagtcgctcatatggtctcaggtgctgttggccacattccactgggccgtgggaagtaccagcttaaccgcggccgacactactattccgctttcaagaaaagtttgcgaccaacaagtacattaaagaagagcagtagctctggaatcgataaaaatttgaagtttcagatctctggcttaacatctcaaatagttgaatctgaaacatccagccttggtaagttacaggatttccaatgcttagatgttgcacaaactttattttccaagattcaaaagacaagaccccatccaagcaactttgatgttttatcggttgcccgctctgtatgctgtaagacaagtcttcttgctgcgttggaagttaaatacggacctttacctgagaacatatttgtgaaagctgcaaagctttgcagtgacaatggcatccaaattgattggcatcaagagggattcatatgccctaaagggtgcaagtctagatataattcaaatgctctgcttcctatgcaactcacggcagttgattttcttgaagctcctgttgattcccgtaatgatgatgaaatgtggggaatggaagaataccattatgttcttgattcaaagcacttcggatggaagcctaaaaatgagagtgttgttctctgtgaagacataagctttggcagggagaaagttccaattgtctgtgtcattgatgtggatgcaaaagattctttaggtatgaagcctgaagaacttttgccacatggcagttctttgccttgggaaggatttcactatatcacaaaccgtgtgatggattcatctcttattgattcagagaactctatgcctgggtgtgcatgttctcatcctgaatgttctcctgagaactgtggtcacgtgagtctctttgatggtgtctacaatagcctggtggatatcaatggaacaccaatgcatggcagatttgcatatgatgaagatagtaaaattattttacagggtatccaatatatgagtgcaattcatcatgtatttgtgactcgtcctgccagaataaagtattgcagaaagggctgcttgttaagttggaactctttagaagtgagaataagggttgggctattagggctgctgaacctattctacagggtacctttgtctgcgagtatattggtgaagttgtgaaggctgacaaggctatgaaaaatgcagaaagtgtgtcatcaaagggtgggtgcagttacttgtttagcattgcttcccagattgatagggaaagagttcggactgtaggggctattgaatactttattgatgccacaaggtctggaaatgtttcccgttatattagtcacagttgttccccgaatctcagtacccggttggttttggtagagagcaaagattgccagcttgctcacattggattgtttgctaatcaagatattgccgtaggagaagaactcgcctatgattaccgacaaaagcttgtagcaggcgatggctgcccatgccattgtggaactaccaattgccgaggccgtgtctattgattttgcaggaatacactaactgttcaatgctcggttgcagaactccagagatttcaacagttgtgtaggcttgctgagcgatttagcattgcaattttcctacagcttgagtgcagggctaggatctcattgttaatgctacaaatagtgattgtgatataggactcaggcaagcattaggcaataacatagtgtcgattttagtcatggtaccatcatgtttaactgattatttgttagaagcagcctgaaatgaaactgattcaggctgctctgttcgtaggcgagaattctctctgtaaaattccttcattcatattttatggttcatgagcaccatcattgacgtgaagtaataaactagttatcccagtggccta

SEQ ID NO: 40609 - DNA, 4448 bp, Zea Mays
catagactcatttctaaaccactcattgcaacaactttgggttgctaccctttcatagccttctaattgacgcttcctagacccattcttttactaactttcctcatttgtgtttgccatttatgggcaaatttgtctatgcttatagcaaattgggcaatgaattatatagtttcttagatttaggggaggcccaagatgggtgggtggcccgtggactggcccctttatttttgctttccatggaggcacaatacgaccaggagaacctgtgggacccattatcctcactcaccatctattgcagaccaatcctttcgcaagacttcctccctctacttctgtttctcgccgccgcctctcattctttcttaagcacatccagatctggtagactggtcacagcggcgtgtagagaaggtgcctaggtcgtagagggctagcagcacaagcagaggtggggtgcagaaaattttctttgggggcgcttctggcttgtggtcttgatctatctgcagccatagtgcgtggaaaccaccaaggcggctctgcatctgtatgcaaccatggattcctggcttctttttcagttctgttgcataggaacttcgacagtccattcttgggaacaagcttaaggaattgcgggatgcatcagtgcagcctgaattagtccctgagtggaagacgtggaaacaagaattgctgaaacagtacttttcattacatcctgctggtaatgttggcaacttcgagaaaactaattgttacgacgatccagctttagatcaacaaggtagtagaaagcgtccaaaacttgaggttcgaagaggagagatccaaattttacacatgggtgaagctgactacaggactccaactgaggacccaaaccaaaataagcttcctagtaactctgtcatgcatgaaaatataggggcattaggagcaacaagtcaaaaaaatgctgtcatgttccctggaagttctggcaccaatgagaatacaatatctggtagttccaatgcagctttacagaatgctagacttgatttagattcattcaagagctctcggcagtgttctgcgtacattgaagcaaaggggaggcagtgtggtaggtgggcaaatgatggtgatatttactgttgtgtgcatcaaagtatgcattttcttgatcattcttcaagggaggataagacacttaccattgaagctccattgtgtagtggtatgactaacatgggtagaaaatgcaagcatcgagctcagcatggttctactttttgtaaaaagcaccgcctacagacaaacttggatgtaatgcacccaggaaatttgttggatccatctgaggtactccatatgggcgaagaacctccgaataagtgggtggaaggaatttctaagtcgcaagcattgtatagcatagacttagaaacagacaaaaatgtccaggctgttgtacaagtgaaactgatgcccactgtggctatagagaactctggtgaaaaaggttgtgcaatggagaaaactgatatgtgtgctgcgtcaacgtccatgacaaatactgatgatacttctctttgtattggaattcgctctcatgacagtattgttgaatgccaggattatgccaaacgacatactctttattgtgagaagcaccttccaaagttccttaaacgtgccaggaatggaaagagtcgactcgtttctaaagatgtctttgtcaatctgttgaagggctgctcatcaagaaaagataagatatgtttacaccaggcttgcgaatttctttattggttcttgagaaacaacctttctcatcaacgcaccggtcttgctagtgaacatatgccccagatactggctgaagtgtcgaaaaatccagattttggagaatttttgttaaagttgatatctactgagagagagaaactagcaaatatctggggatttggtacagatagatctaagcaaatatattctgaaaacaaagaaggatctgtagcgttgcaggaagagaaaactaatctttcatctggtcctaagtgcaaaatctgtggtcaccagttctctgatgatcaagctcttggattacattggacaactgtccacaaaaaggaagcccggtggctgtttagaggttactcttgtgctgcatgcatggaatcatttaccaacaaaaaagtccttgaaagacatgtacaggatgtacatggggctcaatacctccagtattcaattctcattcgatgtatgtcatgtaacagcaattttttgaacactgatctgctataccctcacattgtttccgaccatgcccaacagttcaggcttcttgatgtccctcagcgaccaagtggtcaatctgctcaacaaacagaagggatgagtggtctgcccctttatgatagccacaacgttgaggatgaaaatggctcacagaagtttgtctgcagattatgtgggctcaaatttgatcttctgccagatcttggccgccaccataaagtcgctcatatggtctcaggtgctgttggccacattccactgggccgtgggaagtaccagcttaaccgcggccgacactactattccgctttcaagaaaagtttgcgaccaacaagtacattaaagaagagcagtagctctggaatcgataaaaatttgaagtttcagatctctggcttaacatctcaaatagttgaatctgaaacatccagccttggtaagttacaggatttccaatgcttagatgttgcacaaactttattttccaagattcaaaagacaagaccccatccaagcaactttgatgttttatcggttgcccgctctgtatgctgtaagacaagtcttcttgctgcgttggaagttaaatacggacctttacctgagaacatatttgtgaaagctgcaaagctttgcagtgacaatggcatccaaattgattggcatcaagagggattcatatgccctaaagggtgcaagtctagatataattcaaatgctctgcttcctatgcaactcacggcagttgattttcttgaagctcctgttgattcccgtaatgatgatgaaatgtggggaatggaagaataccattatgttcttgattcaaagcacttcggatggaagcctaaaaatgagagtgttgttctctgtgaagacataagctttggcagggagaaagttccaattgtctgtgtcattgatgtggatgcaaaagattctttaggtatgaagcctgaagaacttttgccacatggcagttctttgccttgggaaggatttcactatatcacaaaccgtgtgatggattcatctcttattgattcagagaactctatgcctgggtgtgcatgttctcatcctgaatgttctcctgagaactgtggtcacgtgagtctctttgatggtgtctacaatagcctggtggatatcaatggaacaccaatgcatggcagatttgcatatgatgaagatagtaaaattattttacaggaagggtatccaatatatgagtgcaattcatcatgtatttgtgactcgtcctgccagaataaagtattgcagaaagggctgcttgttaagttggaactctttagaagtgagaataagggttgggctattagggctgctgaacctattctacagggtacctttgtctgcgagtatattggtgaagttgtgaaggctgacaaggctatgaaaaatgcagaaagtgtgtcatcaaagggtgggtgcagttacttgtttagcattgcttcccagattgatagggaaagagttcggactgtaggggctattgaatactttattgatgccacaaggtctggaaatgtttcccgttatattagtcacagttgttccccgaatctcagtacccggttggttttggtagagagcaaagattgccagcttgctcacattggattgtttgctaatcaagatattgccgtaggagaagaactcgcctatgattaccgacaaaagcttgtagcaggcgatggctgcccatgccattgtggaactaccaattgccgaggccgtgtctattgattttgcaggaatacactaactgttcaatgctcggttgcagaactccagagatttcaacagttgtgtaggcttgctgagcgatttagcattgcaattttcctacagcttgagtgcagggctaggatctcattgttaatgctacaaatagtgattgtgatataggactcaggcaagcattaggcaataacatagtgtcgattttagtcatggtaccatcatgtttaactgattatttgttagaagcagcctgaaatgaaactgattcaggctgctctgttcgtaggcgagaattctctctgtaaaattccttcattcatattttatggttcatgagcaccatcattgacgtgaagtaataaactagttatcccagtggccta

SEQ ID NO: 40610 - DNA, 4130 bp, Zea Mays
ctttcgcaagacttcctccctctacttctgtttctcgccgccgcctctcattctttcttaagcacatccagatctggtagactggtcacagcggcgtgtagagaaggtgcctaggtcgtagagggctagcagcacaagcagaggtggggtgcagaaaattttctttgggggcgcttctggcttgtggtcttgatctatctgcagccatagtgcgtggaaaccaccaaggcggctctgcatctgtatgcaaccatggattcctggcttctttttcagttctgttgcataggaacttcgacagtccattcttgggaacaagcttaaggaattgcgggatgcatcagtgcagcctgaattagtccctgagtggaagacgtggaaacaagaattgctgaaacagtacttttcattacatcctgctggtaatgttggcaacttcgagaaaactaattgttacgacgatccagctttagatcaacaaggtagtagaaagcgtccaaaacttgaggttcgaagaggagagatccaaattttacacatgggtgaagctgactacaggactccaactgaggacccaaaccaaaataagcttcctagtaactctgtcatgcatgaaaatataggggcattaggagcaacaagtcaaaaaaatgctgtcatgttccctggaagttctggcaccaatgagaatacaatatctggtagttccaatgcagctttacagaatgctagacttgatttagattcattcaagagctctcggcagtgttctgcgtacattgaagcaaaggggaggcagtgtggtaggtgggcaaatgatggtgatatttactgttgtgtgcatcaaagtatgcattttcttgatcattcttcaagggaggataagacacttaccattgaagctccattgtgtagtggtatgactaacatgggtagaaaatgcaagcatcgagctcagcatggttctactttttgtaaaaagcaccgcctacagacaaacttggatgtaatgcacccaggaaatttgttggatccatctgaggtactccatatgggcgaagaacctccgaataagtgggtggaaggaatttctaagtcgcaagcattgtatagcatagacttagaaacagacaaaaatgtccaggctgttgtacaagtgaaactgatgcccactgtggctatagagaactctggtgaaaaaggttgtgcaatggagaaaactgatatgtgtgctgcgtcaacgtccatgacaaatactgatgatacttctctttgtattggaattcgctctcatgacagtattgttgaatgccaggattatgccaaacgacatactctttattgtgagaagcaccttccaaagttccttaaacgtgccaggaatggaaagagtcgactcgtttctaaagatgtctttgtcaatctgttgaagggctgctcatcaagaaaagataagatatgtttacaccaggcttgcgaatttctttattggttcttgagaaacaacctttctcatcaacgcaccggtcttgctagtgaacatatgccccagatactggctgaagtgtcgaaaaatccagattttggagaatttttgttaaagttgatatctactgagagagagaaactagcaaatatctggggatttggtacagatagatctaagcaaatatattctgaaaacaaagaaggatctgtagcgttgcaggaagagaaaactaatctttcatctggtcctaagtgcaaaatctgtggtcaccagttctctgatgatcaagctcttggattacattggacaactgtccacaaaaaggaagcccggtggctgtttagaggttactcttgtgctgcatgcatggaatcatttaccaacaaaaaagtccttgaaagacatgtacaggatgtacatggggctcaatacctccagtattcaattctcattcgatgtatgtcatgtaacagcaattttttgaacactgatctgctataccctcacattgtttccgaccatgcccaacagttcaggcttcttgatgtccctcagcgaccaagtggtcaatctgctcaacaaacagaagggatgagtggtctgcccctttatgatagccacaacgttgaggatgaaaatggctcacagaagtttgtctgcagattatgtgggctcaaatttgatcttctgccagatcttggccgccaccataaagtcgctcatatggtctcaggtgctgttggccacattccactgggccgtgggaagtaccagcttaaccgcggccgacactactattccgctttcaagaaaagtttgcgaccaacaagtacattaaagaagagcagtagctctggaatcgataaaaatttgaagtttcagatctctggcttaacatctcaaatagttgaatctgaaacatccagccttggtaagttacaggatttccaatgcttagatgttgcacaaactttattttccaagattcaaaagacaagaccccatccaagcaactttgatgttttatcggttgcccgctctgtatgctgtaagacaagtcttcttgctgcgttggaagttaaatacggacctttacctgagaacatatttgtgaaagctgcaaagctttgcagtgacaatggcatccaaattgattggcatcaagagggattcatatgccctaaagggtgcaagtctagatataattcaaatgctctgcttcctatgcaactcacggcagttgattttcttgaagctcctgttgattcccgtaatgatgatgaaatgtggggaatggaagaataccattatgttcttgattcaaagcacttcggatggaagcctaaaaatgagagtgttgttctctgtgaagacataagctttggcagggagaaagttccaattgtctgtgtcattgatgtggatgcaaaagattctttaggtatgaagcctgaagaacttttgccacatggcagttctttgccttgggaaggatttcactatatcacaaaccgtgtgatggattcatctcttattgattcagagaactctatgcctgggtgtgcatgttctcatcctgaatgttctcctgagaactgtggtcacgtgagtctctttgatggtgtctacaatagcctggtggatatcaatggaacaccaatgcatggcagatttgcatatgatgaagatagtaaaattattttacagggtatccaatatatgagtgcaattcatcatgtatttgtgactcgtcctgccagaataaagtattgcagaaagggctgcttgttaagttggaactctttagaagtgagaataagggttgggctattagggctgctgaacctattctacagggtacctttgtctgcgagtatattggtgaagttgtgaaggctgacaaggctatgaaaaatgcagaaagtgtgtcatcaaagggtgggtgcagttacttgtttagcattgcttcccagattgatagggaaagagttcggactgtaggggctattgaatactttattgatgccacaaggtctggaaatgtttcccgttatattagtcacagttgttccccgaatctcagtacccggttggttttggtagagagcaaagattgccagcttgctcacattggattgtttgctaatcaagatattgccgtaggagaagaactcgcctatgattaccgacaaaagcttgtagcaggcgatggctgcccatgccattgtggaactaccaattgccgaggccgtgtctattgattttgcaggaatacactaactgttcaatgctcggttgcagaactccagagatttcaacagttgtgtaggcttgctgagcgatttagcattgcaattttcctacagcttgagtgcagggctaggatctcattgttaatgctacaaatagtgattgtgatataggactcaggcaagcattaggcaataacatagtgtcgattttagtcatggtaccatcatgtttaactgattatttgttagaagcagcctgaaatgaaactgattcaggctgctctgttcgtaggcgagaattctctctgtaaaattccttcattcatattttatggttcatgagcaccatcattgacgtgaagtaataaactagttatcccagtggccta

SEQ ID NO: 40611 - DNA, 3263 bp, Zea Mays
aagcagtcatgattctctttgtgaatagaacggatgcagggatggatctggtttatccgtcttcatgaacttcgacagtccattcttgggaacaagcttaaggaattgcgggatgcatcagtgcagcctgaattagtccctgagtggaagacgtggaaacaagaattgctgaaacagtacttttcattacatcctgctggtaatgttggcaacttcgagaaaactaattgttacgacgatccagctttagatcaacaaggtagtagaaagcgtccaaaacttgaggttcgaagaggagagatccaaattttacacatgggtgaagctgactacaggactccaactgaggacccaaaccaaaataagcttcctagtaactctgtcatgcatgaaaatataggggcattaggagcaacaagtcaaaaaaatgctgtcatgttccctggaagttctggcaccaatgagaatacaatatctggtagttccaatgcagctttacagaatgctagacttgatttagattcattcaagagctctcggcagtgttctgcgtacattgaagcaaaggggaggcagtgtggtaggtgggcaaatgatggtgatatttactgttgtgtgcatcaaagtatgcattttcttgatcattcttcaagggaggataagacacttaccattgaagctccattgtgtagtggtatgactaacatgggtagaaaatgcaagcatcgagctcagcatggttctactttttgtaaaaagcaccgcctacagacaaacttggatgtaatgcacccaggaaatttgttggatccatctgaggtactccatatgggcgaagaacctccgaataagtgggtggaaggaatttctaagtcgcaagcattgtatagcatagacttagaaacagacaaaaatgtccaggctgttgtacaagtgaaactgatgcccactgtggctatagagaactctggtgaaaaaggttgtgcaatggagaaaactgatatgtgtgctgcgtcaacgtccatgacaaatactgatgatacttctctttgtattggaattcgctctcatgacagtattgttgaatgccaggattatgccaaacgacatactctttattgtgagaagcaccttccaaagttccttaaacgtgccaggaatggaaagagtcgactcgtttctaaagatgtctttgtcaatctgttgaagggctgctcatcaagaaaagataagatatgtttacaccaggcttgcgaatttctttattggttcttgagaaacaacctttctcatcaacgcaccggtcttgctagtgaacatatgccccagatactggctgaagtgtcgaaaaatccagattttggagaatttttgttaaagttgatatctactgagagagagaaactagcaaatatctggggatttggtacagatagatctaagcaaatatattctgaaaacaaagaaggatctgtagcgttgcaggaagagaaaactaatctttcatctggtcctaagtgcaaaatctgtggtcaccagttctctgatgatcaagctcttggattacattggacaactgtccacaaaaaggaagcccggtggctgtttagaggttactcttgtgctgcatgcatggaatcatttaccaacaaaaaagtccttgaaagacatgtacaggatgtacatggggctcaatacctccagtattcaattctcattcgatgtatgtcatgtaacagcaattttttgaacactgatctgctataccctcacattgtttccgaccatgcccaacagttcaggcttcttgatgtccctcagcgaccaagtggtcaatctgctcaacaaacagaagggatgagtggtctgcccctttatgatagccacaacgttgaggatgaaaatggctcacagaagtttgtctgcagattatgtgggctcaaatttgatcttctgccagatcttggccgccaccataaagtcgctcatatggtctcaggtgctgttggccacattccactgggccgtgggaagtaccagcttaaccgcggccgacactactattccgctttcaagaaaagtttgcgaccaacaagtacattaaagaagagcagtagctctggaatcgataaaaatttgaagtttcagatctctggcttaacatctcaaatagttgaatctgaaacatccagccttggtaagttacaggatttccaatgcttagatgttgcacaaactttattttccaagattcaaaagacaagaccccatccaagcaactttgatgttttatcggttgcccgctctgtatgctgtaagacaagtcttcttgctgcgttggaagttaaatacggacctttacctgagaacatatttgtgaaagctgcaaagctttgcagtgacaatggcatccaaattgattggcatcaagagggattcatatgccctaaagggtgcaagtctagatataattcaaatgctctgcttcctatgcaactcacggcagttgattttcttgaagctcctgttgattcccgtaatgatgatgaaatgtggggaatggaagaataccattatgttcttgattcaaagcacttcggatggaagcctaaaaatgagagtgttgttctctgtgaagacataagctttggcagggagaaagttccaattgtctgtgtcattgatgtggatgcaaaagattctttaggtatgaagcctgaagaacttttgccacatggcagttctttgccttgggaaggatttcactatatcacaaaccgtgtgatggattcatctcttattgattcagagaactctatgcctgggtgtgcatgttctcatcctgaatgttctcctgagaactgtggtcacgtgagtctctttgatggtgtctacaatagcctggtggatatcaatggaacaccaatgcatggcagatttgcatatgatgaagatagtaaaattattttacaggaagggtatccaatatatgagtgcaattcatcatgtatttgtgactcgtcctgccagaataaagtattgcagaaagggctgcttgttaagttggaactctttagaagtgagaataagggttgggctattagggctgctgaacctattctacagggtacctttgtctgcgagtatattggtgaagttgtgaaggctgacaaggctatgaaaaatgcagaaaggaaaatccatcactggagcgagttgattctggaaccagtattcatttgtgcttattactttgataacag

SEQ ID NO: 40612 - DNA, 3884 bp, Zea Mays
gaacggatgcagggatggatctggtttatccgtcttcatgaacttcgacagtccattcttgggaacaagcttaaggaattgcgggatgcatcagtgcagcctgaattagtccctgagtggaagacgtggaaacaagaattgctgaaacagtacttttcattacatcctgctggtaatgttggcaacttcgagaaaactaattgttacgacgatccagctttagatcaacaaggtagtagaaagcgtccaaaacttgaggttcgaagaggagagatccaaattttacacatgggtgaagctgactacaggactccaactgaggacccaaaccaaaataagcttcctagtaactctgtcatgcatgaaaatataggggcattaggagcaacaagtcaaaaaaatgctgtcatgttccctggaagttctggcaccaatgagaatacaatatctggtagttccaatgcagctttacagaatgctagacttgatttagattcattcaagagctctcggcagtgttctgcgtacattgaagcaaaggggaggcagtgtggtaggtgggcaaatgatggtgatatttactgttgtgtgcatcaaagtatgcattttcttgatcattcttcaagggaggataagacacttaccattgaagctccattgtgtagtggtatgactaacatgggtagaaaatgcaagcatcgagctcagcatggttctactttttgtaaaaagcaccgcctacagacaaacttggatgtaatgcacccaggaaatttgttggatccatctgaggtactccatatgggcgaagaacctccgaataagtgggtggaaggaatttctaagtcgcaagcattgtatagcatagacttagaaacagacaaaaatgtccaggctgttgtacaagtgaaactgatgcccactgtggctatagagaactctggtgaaaaaggttgtgcaatggagaaaactgatatgtgtgctgcgtcaacgtccatgacaaatactgatgatacttctctttgtattggaattcgctctcatgacagtattgttgaatgccaggattatgccaaacgacatactctttattgtgagaagcaccttccaaagttccttaaacgtgccaggaatggaaagagtcgactcgtttctaaagatgtctttgtcaatctgttgaagggctgctcatcaagaaaagataagatatgtttacaccaggcttgcgaatttctttattggttcttgagaaacaacctttctcatcaacgcaccggtcttgctagtgaacatatgccccagatactggctgaagtgtcgaaaaatccagattttggagaatttttgttaaagttgatatctactgagagagagaaactagcaaatatctggggatttggtacagatagatctaagcaaatatattctgaaaacaaagaaggatctgtagcgttgcaggaagagaaaactaatctttcatctggtcctaagtgcaaaatctgtggtcaccagttctctgatgatcaagctcttggattacattggacaactgtccacaaaaaggaagcccggtggctgtttagaggttactcttgtgctgcatgcatggaatcatttaccaacaaaaaagtccttgaaagacatgtacaggatgtacatggggctcaatacctccagtattcaattctcattcgatgtatgtcatgtaacagcaattttttgaacactgatctgctataccctcacattgtttccgaccatgcccaacagttcaggcttcttgatgtccctcagcgaccaagtggtcaatctgctcaacaaacagaagggatgagtggtctgcccctttatgatagccacaacgttgaggatgaaaatggctcacagaagtttgtctgcagattatgtgggctcaaatttgatcttctgccagatcttggccgccaccataaagtcgctcatatggtctcaggtgctgttggccacattccactgggccgtgggaagtaccagcttaaccgcggccgacactactattccgctttcaagaaaagtttgcgaccaacaagtacattaaagaagagcagtagctctggaatcgataaaaatttgaagtttcagatctctggcttaacatctcaaatagttgaatctgaaacatccagccttggtaagttacaggatttccaatgcttagatgttgcacaaactttattttccaagattcaaaagacaagaccccatccaagcaactttgatgttttatcggttgcccgctctgtatgctgtaagacaagtcttcttgctgcgttggaagttaaatacggacctttacctgagaacatatttgtgaaagctgcaaagctttgcagtgacaatggcatccaaattgattggcatcaagagggattcatatgccctaaagggtgcaagtctagatataattcaaatgctctgcttcctatgcaactcacggcagttgattttcttgaagctcctgttgattcccgtaatgatgatgaaatgtggggaatggaagaataccattatgttcttgattcaaagcacttcggatggaagcctaaaaatgagagtgttgttctctgtgaagacataagctttggcagggagaaagttccaattgtctgtgtcattgatgtggatgcaaaagattctttaggtatgaagcctgaagaacttttgccacatggcagttctttgccttgggaaggatttcactatatcacaaaccgtgtgatggattcatctcttattgattcagagaactctatgcctgggtgtgcatgttctcatcctgaatgttctcctgagaactgtggtcacgtgagtctctttgatggtgtctacaatagcctggtggatatcaatggaacaccaatgcatggcagatttgcatatgatgaagatagtaaaattattttacaggaagggtatccaatatatgagtgcaattcatcatgtatttgtgactcgtcctgccagaataaagtattgcagaaagggctgcttgttaagttggaactctttagaagtgagaataagggttgggctattagggctgctgaacctattctacagggtacctttgtctgcgagtatattggtgaagttgtgaaggctgacaaggctatgaaaaatgcagaaagtgtgtcatcaaagggtgggtgcagttacttgtttagcattgcttcccagattgatagggaaagagttcggactgtaggggctattgaatactttattgatgccacaaggtctggaaatgtttcccgttatattagtcacagttgttccccgaatctcagtacccggttggttttggtagagagcaaagattgccagcttgctcacattggattgtttgctaatcaagatattgccgtaggagaagaactcgcctatgattaccgacaaaagcttgtagcaggcgatggctgcccatgccattgtggaactaccaattgccgaggccgtgtctattgattttgcaggaatacactaactgttcaatgctcggttgcagaactccagagatttcaacagttgtgtaggcttgctgagcgatttagcattgcaattttcctacagcttgagtgcagggctaggatctcattgttaatgctacaaatagtgattgtgatataggactcaggcaagcattaggcaataacatagtgtcgattttagtcatggtaccatcatgtttaactgattatttgttagaagcagcctgaaatgaaactgattcaggctgctctgttcgtaggcgagaattctctctgtaaaattccttcattcatattttatggttcatgagcaccatcattgacgtgaagtaataaactagttatcccagtggccta

SEQ ID NO: 40613 - DNA, 1215 bp, Zea Mays
aacaccgaaattcaccttacaactagattaaaaaaaaagacaaaacaaccctgtgacctgtgcctcgccgatgacgtcacccgcttgcgcgacgaaaagcatttccctccgtctcttcccgcgcgcactttggccatgtcagcgatccgctccaaaacgcatctgagccgtccaaggcaagaagcacgaacgcctcgcgcgcctcctcccccagcgatccgcggcatccaccacctttccaccaaccagcgcgcaccacatttcctctataagtacccgccccacatctgcgccattttctcatcgcagaaatcctccgcaacttcacagcgtatcatcgttttccatcgctcctactcctatcatccagaaaatctgagcggtattgatggcgcccaaggcggagaagcggctacctgcgggcaagtccgccggcaaggagggcggcgacaagaagggtaggaagaaggcgaagaagagcgtggagacctacaagatctacatcttcaaggtcctgaagcaggtgcaccccgacatcggcatctcctccaaggccatgtccatcatgaactccttcatcaacgacatcttcgagaagctcgccgcggaggccgccaagctcgcccggtacaacaagaagcccaccatcacctcccgcgagatccagacctccgtccgcctcgtcctccccggcgagctcgccaagcacgccgtctcggagggtaccaaggccgtcaccaagttcacctcgtcttagccgccttgttgtaggcgtcgttgttgtctgcttctcaagcaagcactgtcatgtgccgcttctcatggcagtagtggtggttggctggtgtgtgtaagtggtgcagtggcttttgcctgtgttatgaatttagtcatggtggtaatgtattgctatggttatttgaatgttgatcagtgatcttatgtccgcctaccatatatgtcagttgttaatcttgttaggtcttattcggttagctttcaatctatatagattgagtgagattgagtgagtttaaatctcaaacaagtcaaattttttttaaattttttcaatcccatccaatctatgtataatgggaataagcaaagaaggtatggtgtggttctactaacaacagctcaatctgatacgttctttaaagccacaccctaaaccctaagaccacgttgtaaagtgtttgcgtttgttttttg

SEQ ID NO: 40614 - DNA, 1309 bp, Zea Mays
agcataattttccttcttttagagtcacggttctacatagtctaaacaacaataaattagaagtggtctcttggaaccaatccggaaccaaatgatcccaacaccgtgtctatatatttggcgtgcacttcctctgggttgtcctcacattctttaccaccttttcaaaacagtgtcctcgctcctcagagtattcagacgcgcgcgttcttgtgtactacaccaaccatctcaccaagcaccctttccatgttgatctccactgccgcgatcaacagaaaagcatacctcgcaggctttctccctgagctttaccgcgccgctcctcctctaatccttggacacgtcgccggctcacaaagcagctgggccgcctgcaagcacgacgacttgaagcactcagctgctgcttgccagctcaccagtcgggcagtcactacccagtacccaccacccacccacccaccactgttacatcgtgtgctccgaatgcgacgatggcggcgagctccaccagcgcgcccacgatgccggcgatggtcacgcctctgccgggctacggctaccagggctctgccgcgggcgcgggcgcgggcggcgagcctctgtacagctcctcggggtcgtcgtccatgggcaccttcttcggggtgctcgtcgcggtcgtggtgctcaccctgctgtcctgcgtcttcggccgggtgtgcgcgggccacgccgaggggcccgacgagcgctacgactgcacgaggctggccccgcggtggtggtgcggctggcggcgggcgcctcgccggaccgctgtgaagcgcgaggcgaaggcgccgcccgtgttggaattggaagcgcctgccgcatcgccgccgcccggggagccgtaaacaagctcccggcgaagagatctcggtcgaaagctaaggtgacgatccgagtgctgatctgaagagcaccacgcctacagaggagtgcgatgatcatgaaccggtgacgacagatagttctttgctgctttggcattagatttgaaggccaatcgtgtgcagcagagttaggctgtccccgctgggccactgtgtctgtatgtgttacgtaaaaccagctgcaacagcgtacttgatccccacgctatatatcatccagtaggatggatggaacgcgaaacacagcgttgtacgacatcaacgccatctgctctcgcgcgcgtcttcgcatgctcgaatgaaagtagagatttagggttcggacagccttagacgtagttcggtgacgactaatatgccaatacagaaacacaacccgaccttattag

SEQ ID NO: 40615 - DNA, 202 bp, Zea Mays
aggagatagaagatctgatggagagctgaggtaaaacctggggttccatacagaatagtgaaagtatcaattacaggtttatcaaggtagtatatacacacaactctaggttttcatgattcttccaaacttacaacggatcacatttatgacgacgacgaaagcactactggataaaaacttgcgatgcttctatgcaatt

SEQ ID NO: 40616 - DNA, 1790 bp, Zea Mays
ataagcagtaacgacgcgatgagagcgatcagaaccctgatcatccgattagtcgtttgatcaggtcgcggacgatcagtttgcctagaaattttcagttttggactgaccagctggcccacttcggtttttttcccattcgtttttgcccgctgcaaccgggcttgtttgaaaccactcattttaaagaaactgatttataaaaattgagttggctacaaacataacaatttatatctcagtttataaaagttagatttatagtttcttaaaatcaagaagttaatctctcgtagctaaaaaaactggtttgttaaaaagtcaaacagacctaagtcctgtacgcagggcccatgcacggttttgagacgagagcagctcagcagcatagcgccagccgccggattcctgcgcagcacgcacggacgccatcgaggaaccctaaccagagcacagcacacggagcgacggcggcgcgccaccggcgactggcggctggtgccccctctcggtccccactccccagcacggcgacggcctgctgcatcagatggtaaattatttttcagactcagagtgcaaaaaagttggttcgtccagggaagaggaatagaggttatgcttttgtgtgagcgtgttgctcttcagcggcggcggcggtgctggcattcttgctacctcagctctgccaggaaataaatcgcagcagcgcggaatttgtgtggagattcatgtttacgaatgcgcagcgccaggtcgagcgcaccggccgttctggcactccgcgagaccagtaccttcaggatctcgtgacccagttccagaacgccacggatgaagaatctaaggagaagatagttgctaacctggcaaattttgcttatgacccttttaattatgccttcatgcgccagctgaatgttctggagttattcttggactgcattacagagcctaatgaaaggcttatcgagttcggcattggtggaatatgtaactcctgtgttgatcctgcaaatgctttaatcattactcagtgtggtggaatcccattggttatacaatgcttatcgagcccagtgcggaatactgtgacttatgcgcttggggctttgtattacctttgtaacccttcgacaaagaaggagatcctgaaaccagatgtagttagtactataagagagtatgcttcagctggaactgtgaataacaactttagcaatctggctaatgctttcttggagaaacatgttgatccatgatatgacaattttacagggtagactaaagcttacacatttcgtgtacctgtggtgttttcatattctggatatgaactaaagaaactagagcttagatctcatgctttcattgttttgggcacgatgctttgcctggaattgagcaagggctcctttttagatgagagttatgcacagtttttcagttgggaagctaatttgtcatagttcagttttttcccagttatctgttggacgatttgaacattgtaaggccctgtttggaaacaaagtttttgaaaaccacagtttttaaaatactacagtatactttagttatgataatatcgtagtttacaataccacaattttggaaactgaggttcagacctaagtttagaatactttaaaacaactatagtatttgcaatacttcagttttgaaaacagagattttagccagcttgccaaacaccattctgtatataatactgcagtatttgagaataatgcagtattcttctaaaactgtgaaaaaacttcgcttcc

SEQ ID NO: 40617 - DNA, 2134 bp, Zea Mays
acgcagggcccatgcacggttttgagacgagagcagctcagcagcatagcgccagccgccggattcctgcgcagcacgcacggacgccatcgaggaaccctaaccagagcacagcacacggagcgacggcggcgcgccaccggcgactggcggctggtgccccctctcggtccccactccccagcacggcgacggcctgctgcatcaggtgatctctgatgtctgactctcttctccagttctccccagtccccgtttccccgacttcctgttcagtgttcaccgtcgagtggcctgctaccctgctgtgctcatgtgatgtgctcgttgtgaacttgtgattgtgaatttgtgatccgatccgagtcagtccccagtccccacccagttattaatgaaattgacatccttgaagatgatgaagaatctgaggaaatgcaaatgaatggggaagatggttctgggccttctagctcatttgggactgaaaatgcatttcaagtggatgaagatttactttagctagtagatcatttatcacttatcaagtggatgaatatttgctcatttgtttcatgtttgactttgctgcagttggactttgattttagaactttaaacttatgtcatttatgttgtactcttttgctggacaacctgcaacaatacagttttacttatgtaatggcttattaacctgttcctgtgagtttagaatggctggactgttttttttactatgttttacttttacctatggtaatgtctgacagccatacagtgcaggagaaagcagatggtacacttatcctgtgatttttgttgtgttcctaactttgcttggatgtttgtttgattaattgattccattggtttgtatgcttgttgctgcagatggtaaattatttttcagactcagagtgcaaaaaagttggttcgtccagggaagaggaatagaggttatgcttttgtgtgagcgtgttgctcttcagcggcggcggcggtgctggcattcttgctacctcagctctgccaggaaataaatcgcagcagcgcggaatttgtgtggagattcatgtttacgaatgcgcagcgccaggtcgagcgcaccggccgttctggcactccgcgagaccagtaccttcaggatctcgtgacccagttccagaacgccacggatgaagaatctaaggagaagatagttgctaacctggcaaattttgcttatgacccttttaattatgccttcatgcgccagctgaatgttctggagttattcttggactgcattacagagcctaatgaaaggcttatcgagttcggcattggtggaatatgtaactcctgtgttgatcctgcaaatgctttaatcattactcagtgtggtggaatcccattggttatacaatgcttatcgagcccagtgcggaatactgtgacttatgcgcttggggctttgtattacctttgtaacccttcgacaaagaaggagatcctgaaaccagatgtagttagtactataagagagtatgcttcagctggaactgtgaataacaactttagcaatctggctaatgctttcttggagaaacatgttgatccatgatatgacaattttacagggtagactaaagcttacacatttcgtgtacctgtggtgttttcatattctggatatgaactaaagaaactagagcttagatctcatgctttcattgttttgggcacgatgctttgcctggaattgagcaagggctcctttttagatgagagttatgcacagtttttcagttgggaagctaatttgtcatagttcagttttttcccagttatctgttggacgatttgaacattgtaaggccctgtttggaaacaaagtttttgaaaaccacagtttttaaaatactacagtatactttagttatgataatatcgtagtttacaataccacaattttggaaactgaggttcagacctaagtttagaatactttaaaacaactatagtatttgcaatacttcagttttgaaaacagagattttagccagcttgccaaacaccattctgtatataatactgcagtatttgagaataatgcagtattcttctaaaactgtgaaaaaacttcgcttcc

SEQ ID NO: 40618 - DNA, 1398 bp, Zea Mays
acgcagggcccatgcacggttttgagacgagagcagctcagcagcatagcgccagccgccggattcctgcgcagcacgcacggacgccatcgaggaaccctaaccagagcacagcacacggagcgacggcggcgcgccaccggcgactggcggctggtgccccctctcggtccccactccccagcacggcgacggcctgctgcatcagatggtaaattatttttcagactcagagtgcaaaaaagttggttcgtccagggaagaggaatagaggttatgcttttgtgtgagctctgccaggaaataaatcgcagcagcgcggaatttgtgtggagattcatgtttacgaatgcgcagcgccaggtcgagcgcaccggccgttctggcactccgcgagaccagtaccttcaggatctcgtgacccagttccagaacgccacggatgaagaatctaaggagaagatagttgctaacctggcaaattttgcttatgacccttttaattatgccttcatgcgccagctgaatgttctggagttattcttggactgcattacagagcctaatgaaaggcttatcgagttcggcattggtggaatatgtaactcctgtgttgatcctgcaaatgctttaatcattactcagtgtggtggaatcccattggttatacaatgcttatcgagcccagtgcggaatactgtgacttatgcgcttggggctttgtattacctttgtaacccttcgacaaagaaggagatcctgaaaccagatgtagttagtactataagagagtatgcttcagctggaactgtgaataacaactttagcaatctggctaatgctttcttggagaaacatgttgatccatgatatgacaattttacagggtagactaaagcttacacatttcgtgtacctgtggtgttttcatattctggatatgaactaaagaaactagagcttagatctcatgctttcattgttttgggcacgatgctttgcctggaattgagcaagggctcctttttagatgagagttatgcacagtttttcagttgggaagctaatttgtcatagttcagttttttcccagttatctgttggacgatttgaacattgtaaggccctgtttggaaacaaagtttttgaaaaccacagtttttaaaatactacagtatactttagttatgataatatcgtagtttacaataccacaattttggaaactgaggttcagacctaagtttagaatactttaaaacaactatagtatttgcaatacttcagttttgaaaacagagattttagccagcttgccaaacaccattctgtatataatactgcagtatttgagaataatgcagtattcttctaaaactgtgaaaaaacttcgcttcc

SEQ ID NO: 40619 - DNA, 1041 bp, Zea Mays
ttcgagacgacatggcgtcgaacgcaagcatttggacggttcaacaccgcaccccacggggctacagtatgcagtgtctcggtctacaagctcggtgttgcctagtagatctatagttgttgttagcatgattgggtgtgtggctgcgtgagtgagtgatcgagtggccacctcatcccggacctgttggataaagaacactagtcccggcggtggcgccgccgcggaggcagcgagcaaggagaagcaggccgccgtccggtcgggcgagagtgaccgggactgcgagctcatggggctcatgtggctgctgcagcgcaacgccacgcgctacggagcgacggccacggccgtcatccaggcgctgatggccgtggacgaggcgtccgccgcgggtgtcgcggtggcggcagacgcggggccggccgcggcgtgctcgctgcccgtggacgacatgcccctcccggccgaatacgcgcaggtcggcggggccagcgacgcgcctcgcggcgtctgctgcttcttctgcctgctcgtgctgttctccgttctaagcttccgctccgtgtactcgctgtagcaattttgtggttcaattgaagttcgttatatgctccggccactgtgttttgctcatggaaaattatctgattatgtcctgcacgcatgggatgagcacgtgtcaccgcatcgatcaccttgtgagttgtgaggcatgcatgcggccgttgccatctgttccatggacactggttcttcactggagatccagcatgtatccctctttttagtttttacccggtgggcggtggctctatccatctttgttttgcgagcgaacctcttcaaagaaggcaggcatgtaggtccaaaagttcacctaaaaataaataattgatcggattttatagggaaaaatgaatccaaaaaactaacagcagtataatttattaaaggaaaaccaacgaaaacctctagcaagacacaccggttgactatccaggcgtaccacactaagggcatgtttcgtcaattgcctaa

SEQ ID NO: 40620 - DNA, 774 bp, Zea Mays
cccctttctattaagaagttgcctagaagtgtttttctggagctcatgacaaggtggctgataagttacctggtttgaaagctgcgttaattagcccagctgggagggcgaccttggttaaatcagtgcttacggcagtccctatctaccattttataacacttctgtgccccaaatgggttgtcaaggctatagataaattcggagaggattcctttggacaggaagaactgacatcaaaggaggtcattgtgcagtgggttgggctaaggtatgcaaaccagtgaaccaaggaggtctgggtctgcacaacttgaatgttctagggtgggctctaaacttgaggtggctctggcttaaaaaacacaaccggacagaccctggacagtgtttgacatccaaatacatccgtacgcagcagcccttttctcagcctgtgtgtgttccattgttggcaatggtgcttcaactcttttctggacagatcgctgtctccacgggcaatcctttaagcagattgctccttccctgctaagccatatacccaaaagagttcagaattgcagaactgtcaaggaagctttgattgataatagatgggtgaatgatatctctggaagtctgccggagcaagttctatttgagtacttcagggtttaggacttgattcaggggattcatcttcatccaggggttcttgattggcacagacggctacccacgtcctctggggaatactccgccaaatctgcatataaacggtttctagctggg

SEQ ID NO: 40621 - DNA, 1780 bp, Zea Mays
gaaccaaaagcgccggcatctcaaacccgacggcgctctcttctctatcctctgtcccctccaccaaaaccgacggcgacgtcgctctcctccaccggtgcttggagctctccctccaccagcggcggtccacggacgctcggcgagctccaccggcgggcgctgccgaagctcccagcgtcctcctgcaggccgagctgaaggttcagcgcgccggtggagttcgacgacgaaactccgtcacgtcatacctctccgcctcccgtcttccagacgtctccaatcggggctcccagcgtctcggagaagaggagcagcacggcacggcggctgtggcgaggaaggctcctgtcccatcccaacccagttagcagccgcccaaggaggaggagatccaatcggcgtgcgggcgtccgcggtccatccatcgatccaattccaatctgcaggccagcggaagctgtcacagtcgtcgattttagttgttggagctggaggtttgggctctcccctggcattgtatctagcagcttgtggtgtcggttgcttgggcattgtggatggtgatgatgttgaattgaataatcttcatcgacagataattcataaagaagcatatgttggacaatctaaagtgaagtcagcagctgatgcttgccgtgatcaggattaattcctctatcaaggtagtagagcatcaccatactctgaagccatgcaatgctttggagattgcacggaaatatgatatagttgttgatgcaactgacaaccttcctactaggtatatgatcagcgattgctgtgttttgctgaacaagccacttgtatctggtgcggcattaggcttagaagggcagttgactgtttatcatcataatggaagcccatgctatcggtgcctctttccaactccaccacctgtggcagcctgccagagatgctcagacagtggtgtccttggggttgttccgggagtgattggttgcttacaagctctggaggctataaaggttgcaactggtgttggtgagcccctatgtggaagaatgctactatttgatgcactctctgctcgtattagagttgttaaacttcgtggaagctctccagattgcacccattgtggcgaaaactccgttttcacagaagaagactttcagaagtttgactatgagagcttcacacagtcaccaatgtctgataaggcagcagcaagcgtgaacgtactcccagagagcgcgcgtatcacttgcagagagtacaagaaactggccgacgatggtgaacctcatctactgctggacgtacgacctgcgcatcacttccagatagcttcgatctctccgtcccacaacatcccgctctccatgctggaagagaagctgcccgcgctcgaagcctcgctgaaggaagcaggggaggggtcagccttggttgtcctgtgtaggagaggcaatgactctcagagagccgtccagcttctccgcgagaagggattcgccaacgcgaaggatatcatcggtgggctgcaggcgtggggacaagacgtcgatcctgatttccctgtgtactagcgagatggaaatggatgcactaccttgtaacagtttggatgccgctagaacgagaactctgatactatgatttgagtactaattttgccataccgtgtacttgcaaaaacaaatatacaactggtatggacacggtattgtgatgaataatgccatggacaaaataaaatttgagtgatatttttttgcaggtttaaattttt

SEQ ID NO: 40622 - DNA, 1859 bp, Zea Mays
gaaccaaaagcgccggcatctcaaacccgacggcgctctcttctctatcctctgtcccctccaccaaaaccgacggcgacgtcgctctcctccaccggtgcttggagctctccctccaccagcggcggtccacggacgctcggcgagctccaccggcgggcgctgccgaagctcccagcgtcctcctgcaggccgagctgaaggttcagcgcgccggtggagttcgacgacgaaactccgtcacgtcatacctctccgcctcccgtcttccagacgtctccaatcggggctcccagcgtctcggagaagaggagcagcacggcacggcggctgtggcgaggaaggctcctgtcccatcccaacccagttagcagccgcccaaggaggaggagatccaatcggcgtgcgggcgtccgcggtccatccatcgatccaattccaatctgcagaagaagggatcaaggaacagcgaccagagaaaggctgcgtctgctgctgctcctacggctgctgatgctacgaacaagaggcccagggccagcggaagctgtcacagtcgtcgattttagttgttggagctggaggtttgggctctcccctggcattgtatctagcagcttgtggtgtcggttgcttgggcattgtggatggtgatgatgttgaattgaataatcttcatcgacagataattcataaagaagcatatgttggacaatctaaagtgaagtcagcagctgatgcttgccgattaattcctctatcaaggtagtagagcatcaccatactctgaagccatgcaatgctttggagattgcacggaaatatgatatagttgttgatgcaactgacaaccttcctactaggtatatgatcagcgattgctgtgttttgctgaacaagccacttgtatctggtgcggcattaggcttagaagggcagttgactgtttatcatcataatggaagcccatgctatcggtgcctctttccaactccaccacctgtggcagcctgccagagatgctcagacagtggtgtccttggggttgttccgggagtgattggttgcttacaagctctggaggctataaaggttgcaactggtgttggtgagcccctatgtggaagaatgctactatttgatgcactctctgctcgtattagagttgttaaacttcgtggaagctctccagattgcacccattgtggcgaaaactccgttttcacagaagaagactttcagaagtttgactatgagagcttcacacagtcaccaatgtctgataaggcagcagcaagcgtgaacgtactcccagagagcgcgcgtatcacttgcagagagtacaagaaactggccgacgatggtgaacctcatctactgctggacgtacgacctgcgcatcacttccagatagcttcgatctctccgtcccacaacatcccgctctccatgctggaagagaagctgcccgcgctcgaagcctcgctgaaggaagcaggggaggggtcagccttggttgtcctgtgtaggagaggcaatgactctcagagagccgtccagcttctccgcgagaagggattcgccaacgcgaaggatatcatcggtgggctgcaggcgtggggacaagacgtcgatcctgatttccctgtgtactagcgagatggaaatggatgcactaccttgtaacagtttggatgccgctagaacgagaactctgatactatgatttgagtactaattttgccataccgtgtacttgcaaaaacaaatatacaactggtatggacacggtattgtgatgaataatgccatggacaaaataaaatttgagtgatatttttttgcaggtttaaattttt

SEQ ID NO: 40623 - DNA, 2165 bp, Zea Mays
gaaccaaaagcgccggcatctcaaacccgacggcgctctcttctctatcctctgtcccctccaccaaaaccgacggcgacgtcgctctcctccaccggtgcttggagctctccctccaccagcggcggtccacggacgctcggcgagctccaccggcgggcgctgccgaagctcccagcgtcctcctgcaggccgagctgaaggttcagcgcgccggtggagttcgacgacgaaactccgtcacgtcatacctctccgcctcccgtcttccagacgtctccaatcggggctcccagcgtctcggagaagaggagcagcacggcacggcggctgtggcgaggaaggctcctgtcccatcccaacccagttagcagccgcccaaggaggaggagatccaatcggcgtgcgggcgtccgcggtccatccatcgatccaattccaatctgcagaagaagggatcaaggaacagcgaccagagaaaggctgcgtctgctgctgctcctacggctgctgatgctacgaacaagaggcccaggatcaatcctggatccgccactgggcggcaggagggaggccatagagcgggagctgaagaagcttcgggcagagcgggaggagctcgacggccggatacggctgctggaatcgcagctcgaggcagggcctgcgggattcaacggtgcggcagcggggaaaggagtaggggatgatgcgtgcggcgggagtggagcgtgccagagccgcgtgggtaacgggtttgctccggacggtagcctcccggcggatatgatctaccggtacagccgccacctccttctcccggacttcggggtcgaaggccagcggaagctgtcacagtcgtcgattttagttgttggagctggaggtttgggctctcccctggcattgtatctagcagcttgtggtgtcggttgcttgggcattgtggatggtgatgatgttgaattgaataatcttcatcgacagataattcataaagaagcatatgttggacaatctaaagtgaagtcagcagctgatgcttgcctcaggattaattcctctatcaaggtagtagagcatcaccatactctgaagccatgcaatgctttggagattgcacggaaatatgatatagttgttgatgcaactgacaaccttcctactaggtatatgatcagcgattgctgtgttttgctgaacaagccacttgtatctggtgcggcattaggcttagaagggcagttgactgtttatcatcataatggaagcccatgctatcggtgcctctttccaactccaccacctgtggcagcctgccagagatgctcagacagtggtgtccttggggttgttccgggagtgattggttgcttacaagctctggaggctataaaggttgcaactggtgttggtgagcccctatgtggaagaatgctactatttgatgcactctctgctcgtattagagttgttaaacttcgtggaagctctccagattgcacccattgtggcgaaaactccgttttcacagaagaagactttcagaagtttgactatgagagcttcacacagtcaccaatgtctgataaggcagcagcaagcgtgaacgtactcccagagagcgcgcgtatcacttgcagagagtacaagaaactggccgacgatggtgaacctcatctactgctggacgtacgacctgcgcatcacttccagatagcttcgatctctccgtcccacaacatcccgctctccatgctggaagagaagctgcccgcgctcgaagcctcgctgaaggaagcaggggaggggtcagccttggttgtcctgtgtaggagaggcaatgactctcagagagccgtccagcttctccgcgagaagggattcgccaacgcgaaggatatcatcggtgggctgcaggcgtggggacaagacgtcgatcctgatttccctgtgtactagcgagatggaaatggatgcactaccttgtaacagtttggatgccgctagaacgagaactctgatactatgatttgagtactaattttgccataccgtgtacttgcaaaaacaaatatacaactggtatggacacggtattgtgatgaataatgccatggacaaaataaaatttgagtgatatttttttgcaggtttaaattttt

SEQ ID NO: 40624 - DNA, 1878 bp, Zea Mays
gaaccaaaagcgccggcatctcaaacccgacggcgctctcttctctatcctctgtcccctccaccaaaaccgacggcgacgtcgctctcctccaccggtgcttggagctctccctccaccagcggcggtccacggacgctcggcgagctccaccggcgggcgctggtcagatccgcttggcagtcatccacctggcacatcggccgaagctcccagcgtcctcctgcaggccgagctgaaggttcagcgcgccggtggagttcgacgacgaaactccgtcacgtcatacctctccgcctcccgtcttccagacgtctccaatcggggctcccagcgtctcggagaagaggagcagcacggcacggcggctgtggcgaggaaggctcctgtcccatcccaacccagttagcagccgcccaaggaggaggagatccaatcggcgtgcgggcgtccgcggtccatccatcgatccaattccaatctgcagaagaagggatcaaggaacagcgaccagagaaaggctgcgtctgctgctgctcctacggctgctgatgctacgaacaagaggcccagggccagcggaagctgtcacagtcgtcgattttagttgttggagctggaggtttgggctctcccctggcattgtatctagcagcttgtggtgtcggttgcttgggcattgtggatggtgatgatgttgaattgaataatcttcatcgacagataattcataaagaagcatatgttggacaatctaaagtgaagtcagcagctgatgcttgccgtagtagagcatcaccatactctgaagccatgcaatgctttggagattgcacggaaatatgatatagttgttgatgcaactgacaaccttcctactaggtatatgatcagcgattgctgtgttttgctgaacaagccacttgtatctggtgcggcattaggcttagaagggcagttgactgtttatcatcataatggaagcccatgctatcggtgcctctttccaactccaccacctgtggcagcctgccagagatgctcagacagtggtgtccttggggttgttccgggagtgattggttgcttacaagctctggaggctataaaggttgcaactggtgttggtgagcccctatgtggaagaatgctactatttgatgcactctctgctcgtattagagttgttaaacttcgtggaagctctccagattgcacccattgtggcgaaaactccgttttcacagaagaagactttcagaagtttgactatgagagcttcacacagtcaccaatgtctgataaggcagcagcaagcgtgaacgtactcccagagagcgcgcgtatcacttgcagagagtacaagaaactggccgacgatggtgaacctcatctactgctggacgtacgacctgcgcatcacttccagatagcttcgatctctccgtcccacaacatcccgctctccatgctggaagagaagctgcccgcgctcgaagcctcgctgaaggaagcaggggaggggtcagccttggttgtcctgtgtaggagaggcaatgactctcagagagccgtccagcttctccgcgagaagggattcgccaacgcgaaggatatcatcggtgggctgcaggcgtggggacaagacgtcgatcctgatttccctgtgtactagcgagatggaaatggatgcactaccttgtaacagtttggatgccgctagaacgagaactctgatactatgatttgagtactaattttgccataccgtgtacttgcaaaaacaaatatacaactggtatggacacggtattgtgatgaataatgccatggacaaaataaaatttgagtgatatttttttgcaggtttaaattttt

SEQ ID NO: 40625 - DNA, 2193 bp, Zea Mays
gaaccaaaagcgccggcatctcaaacccgacggcgctctcttctctatcctctgtcccctccaccaaaaccgacggcgacgtcgctctcctccaccggtgcttggagctctccctccaccagcggcggtccacggacgctcggcgagctccaccggcgggcgctgccgaagctcccagcgtcctcctgcaggccgagctgaaggttcagcgcgccggtggagttcgacgacgaaactccgtcacgtcatacctctccgcctcccgtcttccagacgtctccaatcggggctcccagcgtctcggagaagaggagcagcacggcacggcggctgtggcgaggaaggctcctgtcccatcccaacccagttagcagccgcccaaggaggaggagatccaatcggcgtgcgggcgtccgcggtccatccatcgatccaattccaatctgcagaagaagggatcaaggaacagcgaccagagaaaggctgcgtctgctgctgctcctacggctgctgatgctacgaacaagaggcccagggttagtgccttcttccgcttggatggcaatcaatcctggatccgccactgggcggcaggagggaggccatagagcgggagctgaagaagcttcgggcagagcgggaggagctcgacggccggatacggctgctggaatcgcagctcgaggcagggcctgcgggattcaacggtgcggcagcggggaaaggagtaggggatgatgcgtgcggcgggagtggagcgtgccagagccgcgtgggtaacgggtttgctccggacggtagcctcccggcggatatgatctaccggtacagccgccacctccttctcccggacttcggggtcgaaggccagcggaagctgtcacagtcgtcgattttagttgttggagctggaggtttgggctctcccctggcattgtatctagcagcttgtggtgtcggttgcttgggcattgtggatggtgatgatgttgaattgaataatcttcatcgacagataattcataaagaagcatatgttggacaatctaaagtgaagtcagcagctgatgcttgccgtgagattaattcctctatcaaggtagtagagcatcaccatactctgaagccatgcaatgctttggagattgcacggaaatatgatatagttgttgatgcaactgacaaccttcctactaggtatatgatcagcgattgctgtgttttgctgaacaagccacttgtatctggtgcggcattaggcttagaagggcagttgactgtttatcatcataatggaagcccatgctatcggtgcctctttccaactccaccacctgtggcagcctgccagagatgctcagacagtggtgtccttggggttgttccgggagtgattggttgcttacaagctctggaggctataaaggttgcaactggtgttggtgagcccctatgtggaagaatgctactatttgatgcactctctgctcgtattagagttgttaaacttcgtggaagctctccagattgcacccattgtggcgaaaactccgttttcacagaagaagactttcagaagtttgactatgagagcttcacacagtcaccaatgtctgataaggcagcagcaagcgtgaacgtactcccagagagcgcgcgtatcacttgcagagagtacaagaaactggccgacgatggtgaacctcatctactgctggacgtacgacctgcgcatcacttccagatagcttcgatctctccgtcccacaacatcccgctctccatgctggaagagaagctgcccgcgctcgaagcctcgctgaaggaagcaggggaggggtcagccttggttgtcctgtgtaggagaggcaatgactctcagagagccgtccagcttctccgcgagaagggattcgccaacgcgaaggatatcatcggtgggctgcaggcgtggggacaagacgtcgatcctgatttccctgtgtactagcgagatggaaatggatgcactaccttgtaacagtttggatgccgctagaacgagaactctgatactatgatttgagtactaattttgccataccgtgtacttgcaaaaacaaatatacaactggtatggacacggtattgtgatgaataatgccatggacaaaataaaatttgagtgatatttttttgcaggtttaaattttt

SEQ ID NO: 40626 - DNA, 1731 bp, Zea Mays
gaaccaaaagcgccggcatctcaaacccgacggcgctctcttctctatcctctgtcccctccaccaaaaccgacggcgacgtcgctctcctccaccggtgcttggagctctccctccaccagcggcggtccacggacgctcggcgagctccaccggcgggcgctgccgaagctcccagcgtcctcctgcaggccgagctgaaggttcagcgcgccggtggagttcgacgacgaaactccgtcacgtcatacctctccgcctcccgtcttccagacgtctccaatcggggctcccagcgtctcggagaagaggagcagcacggcacggcggctgtggcgaggaaggctcctgtcccatcccaacccagttagcagccgcccaaggaggaggagatccaatcggcgtgcgggcgtccgcggtccatccatcgatccaattccaatctgcaggccagcggaagctgtcacagtcgtcgattttagttgttggagctggaggttgcttgggcattgtggatggtgatgatgttgaattgaataatcttcatcgacagataattcataaagaagcatatgttggacaatctaaagtgaagtcagcagctgatgcttgccgtgagattaattcctctatcaaggtagtagagcatcaccatactctgaagccatgcaatgctttggagattgcacggaaatatgatatagttgttgatgcaactgacaaccttcctactaggtatatgatcagcgattgctgtgttttgctgaacaagccacttgtatctggtgcggcattaggcttagaagggcagttgactgtttatcatcataatggaagcccatgctatcggtgcctctttccaactccaccacctgtggcagcctgccagagatgctcagacagtggtgtccttggggttgttccgggagtgattggttgcttacaagctctggaggctataaaggttgcaactggtgttggtgagcccctatgtggaagaatgctactatttgatgcactctctgctcgtattagagttgttaaacttcgtggaagctctccagattgcacccattgtggcgaaaactccgttttcacagaagaagactttcagaagtttgactatgagagcttcacacagtcaccaatgtctgataaggcagcagcaagcgtgaacgtactcccagagagcgcgcgtatcacttgcagagagtacaagaaactggccgacgatggtgaacctcatctactgctggacgtacgacctgcgcatcacttccagatagcttcgatctctccgtcccacaacatcccgctctccatgctggaagagaagctgcccgcgctcgaagcctcgctgaaggaagcaggggaggggtcagccttggttgtcctgtgtaggagaggcaatgactctcagagagccgtccagcttctccgcgagaagggattcgccaacgcgaaggatatcatcggtgggctgcaggcgtggggacaagacgtcgatcctgatttccctgtgtactagcgagatggaaatggatgcactaccttgtaacagtttggatgccgctagaacgagaactctgatactatgatttgagtactaattttgccataccgtgtacttgcaaaaacaaatatacaactggtatggacacggtattgtgatgaataatgccatggacaaaataaaatttgagtgatatttttttgcaggtttaaattttt

SEQ ID NO: 40627 - DNA, 2236 bp, Zea Mays
gaaccaaaagcgccggcatctcaaacccgacggcgctctcttctctatcctctgtcccctccaccaaaaccgacggcgacgtcgctctcctccaccggtgcttggagctctccctccaccagcggcggtccacggacgctcggcgagctccaccggcgggcgctgccgaagctcccagcgtcctcctgcaggccgagctgaaggttcagcgcgccggtggagttcgacgacgaaactccgtcacgtcatacctctccgcctcccgtcttccagacgtctccaatcggggctcccagcgtctcggagaagaggagcagcacggcacggcggctgtggcgaggaaggctcctgtcccatcccaacccagttagcagccgcccaaggaggaggagatccaatcggcgtgcgggcgtccgcggtccatccatcgatccaattccaatctgcagaagaagggatcaaggaacagcgaccagagaaaggctgcgtctgctgctgctcctacggctgctgatgctacgaacaagaggcccagggttagtgccttcttccgcttggatggcagtaaggtttttgctaatcaactgtgagccaatctggcactgattggtactagatccaattagtcttagcttagtagcccccctcttagatcaatcctggatccgccactgggcggcaggagggaggccatagagcgggagctgaagaagcttcgggcagagcgggaggagctcgacggccggatacggctgctggaatcgcagctcgaggcagggcctgcgggattcaacggtgcggcagcggggaaaggagtaggggatgatgcgtgcggcgggagtggagcgtgccagagccgcgtgggtaacgggtttgctccggacggtagcctcccggcggatatgatctaccggtacagccgccacctccttctcccggacttcggggtcgaaggccagcggaagctgtcacagtcgtcgattttagttgttggagctggaggttgcttgggcattgtggatggtgatgatgttgaattgaataatcttcatcgacagataattcataaagaagcatatgttggacaatctaaagtgaagtcagcagctgatgcttgcctcaggattaattcctctatcaaggtagtagagcatcaccatactctgaagccatgcaatgctttggagattgcacggaaatatgatatagttgttgatgcaactgacaaccttcctactaggtatatgatcagcgattgctgtgttttgctgaacaagccacttgtatctggtgcggcattaggcttagaagggcagttgactgtttatcatcataatggaagcccatgctatcggtgcctctttccaactccaccacctgtggcagcctgccagagatgctcagacagtggtgtccttggggttgttccgggagtgattggttgcttacaagctctggaggctataaaggttgcaactggtgttggtgagcccctatgtggaagaatgctactatttgatgcactctctgctcgtattagagttgttaaacttcgtggaagctctccagattgcacccattgtggcgaaaactccgttttcacagaagaagactttcagaagtttgactatgagagcttcacacagtcaccaatgtctgataaggcagcagcaagcgtgaacgtactcccagagagcgcgcgtatcacttgcagagagtacaagaaactggccgacgatggtgaacctcatctactgctggacgtacgacctgcgcatcacttccagatagcttcgatctctccgtcccacaacatcccgctctccatgctggaagagaagctgcccgcgctcgaagcctcgctgaaggaagcaggggaggggtcagccttggttgtcctgtgtaggagaggcaatgactctcagagagccgtccagcttctccgcgagaagggattcgccaacgcgaaggatatcatcggtgggctgcaggcgtggggacaagacgtcgatcctgatttccctgtgtactagcgagatggaaatggatgcactaccttgtaacagtttggatgccgctagaacgagaactctgatactatgatttgagtactaattttgccataccgtgtacttgcaaaaacaaatatacaactggtatggacacggtattgtgatgaataatgccatggacaaaataaaatttgagtgatatttttttgcaggtttaaattttt

SEQ ID NO: 40628 - DNA, 2184 bp, Zea Mays
gaaccaaaagcgccggcatctcaaacccgacggcgctctcttctctatcctctgtcccctccaccaaaaccgacggcgacgtcgctctcctccaccggtgcttggagctctccctccaccagcggcggtccacggacgctcggcgagctccaccggcgggcgctggtcagatccgcttggcagtcatccacctggcacatcggccgaagctcccagcgtcctcctgcaggccgagctgaaggttcagcgcgccggtggagttcgacgacgaaactccgtcacgtcatacctctccgcctcccgtcttccagacgtctccaatcggggctcccagcgtctcggagaagaggagcagcacggcacggcggctgtggcgaggaaggctcctgtcccatcccaacccagttagcagccgcccaaggaggaggagatccaatcggcgtgcgggcgtccgcggtccatccatcgatccaattccaatctgcagaagaagggatcaaggaacagcgaccagagaaaggctgcgtctgctgctgctcctacggctgctgatgctacgaacaagaggcccaggatcaatcctggatccgccactgggcggcaggagggaggccatagagcgggagctgaagaagcttcgggcagagcgggaggagctcgacggccggatacggctgctggaatcgcagctcgaggcagggcctgcgggattcaacggtgcggcagcggggaaaggagtaggggatgatgcgtgcggcgggagtggagcgtgccagagccgcgtgggtaacgggtttgctccggacggtagcctcccggcggatatgatctaccggtacagccgccacctccttctcccggacttcggggtcgaaggccagcggaagctgtcacagtcgtcgattttagttgttggagctggaggtttgggctctcccctggcattgtatctagcagcttgtggtgtcggttgcttgggcattgtggatggtgatgatgttgaattgaataatcttcatcgacagataattcataaagaagcatatgttggacaatctaaagtgaagtcagcagctgatgcttgccgtgagtagtagagcatcaccatactctgaagccatgcaatgctttggagattgcacggaaatatgatatagttgttgatgcaactgacaaccttcctactaggtatatgatcagcgattgctgtgttttgctgaacaagccacttgtatctggtgcggcattaggcttagaagggcagttgactgtttatcatcataatggaagcccatgctatcggtgcctctttccaactccaccacctgtggcagcctgccagagatgctcagacagtggtgtccttggggttgttccgggagtgattggttgcttacaagctctggaggctataaaggttgcaactggtgttggtgagcccctatgtggaagaatgctactatttgatgcactctctgctcgtattagagttgttaaacttcgtggaagctctccagattgcacccattgtggcgaaaactccgttttcacagaagaagactttcagaagtttgactatgagagcttcacacagtcaccaatgtctgataaggcagcagcaagcgtgaacgtactcccagagagcgcgcgtatcacttgcagagagtacaagaaactggccgacgatggtgaacctcatctactgctggacgtacgacctgcgcatcacttccagatagcttcgatctctccgtcccacaacatcccgctctccatgctggaagagaagctgcccgcgctcgaagcctcgctgaaggaagcaggggaggggtcagccttggttgtcctgtgtaggagaggcaatgactctcagagagccgtccagcttctccgcgagaagggattcgccaacgcgaaggatatcatcggtgggctgcaggcgtggggacaagacgtcgatcctgatttccctgtgtactagcgagatggaaatggatgcactaccttgtaacagtttggatgccgctagaacgagaactctgatactatgatttgagtactaattttgccataccgtgtacttgcaaaaacaaatatacaactggtatggacacggtattgtgatgaataatgccatggacaaaataaaatttgagtgatatttttttgcaggtttaaattttt

SEQ ID NO: 40629 - DNA, 1659 bp, Zea Mays
gaaccaaaagcgccggcatctcaaacccgacggcgctctcttctctatcctctgtcccctccaccaaaaccgacggcgacgtcgctctcctccaccggtgcttggagctctccctccaccagcggcggtccacggacgctcggcgagctccaccggcgggcgctgccgaagctcccagcgtcctcctgcaggccgagctgaaggttcagcgcgccggtggagttcgacgacgaaactccgtcacgtcatacctctccgcctcccgtcttccagacgtctccaatcggggctcccagcgtctcggagaagaggagcagcacggcacggcggctgtggcgaggaaggctcctgtcccatcccaacccagttagcagccgcccaaggaggaggagatccaatcggcgtgcgggcgtccgcggtccatccatcgatccaattccaatctgcaggccagcggaagctgtcacagtcgtcgattttagttgttggagctggaggtttgggctctcccctggcattgtatctagcagcttgtggtgtcggttgcttgggcattgtggatggtgatgatgttgaattgaataatcttcatcgacagataattcataaagaagcatatgttggacaatctaaagtgaagtcagcagctgatgcttgccgtgagtatatgatcagcgattgctgtgttttgctgaacaagccacttgtatctggtgcggcattaggcttagaagggcagttgactgtttatcatcataatggaagcccatgctatcggtgcctctttccaactccaccacctgtggcagcctgccagagatgctcagacagtggtgtccttggggttgttccgggagtgattggttgcttacaagctctggaggctataaaggttgcaactggtgttggtgagcccctatgtggaagaatgctactatttgatgcactctctgctcgtattagagttgttaaacttcgtggaagctctccagattgcacccattgtggcgaaaactccgttttcacagaagaagactttcagaagtttgactatgagagcttcacacagtcaccaatgtctgataaggcagcagcaagcgtgaacgtactcccagagagcgcgcgtatcacttgcagagagtacaagaaactggccgacgatggtgaacctcatctactgctggacgtacgacctgcgcatcacttccagatagcttcgatctctccgtcccacaacatcccgctctccatgctggaagagaagctgcccgcgctcgaagcctcgctgaaggaagcaggggaggggtcagccttggttgtcctgtgtaggagaggcaatgactctcagagagccgtccagcttctccgcgagaagggattcgccaacgcgaaggatatcatcggtgggctgcaggcgtggggacaagacgtcgatcctgatttccctgtgtactagcgagatggaaatggatgcactaccttgtaacagtttggatgccgctagaacgagaactctgatactatgatttgagtactaattttgccataccgtgtacttgcaaaaacaaatatacaactggtatggacacggtattgtgatgaataatgccatggacaaaataaaatttgagtgatatttttttgcaggtttaaattttt

SEQ ID NO: 40630 - DNA, 1772 bp, Zea Mays
gaaccaaaagcgccggcatctcaaacccgacggcgctctcttctctatcctctgtcccctccaccaaaaccgacggcgacgtcgctctcctccaccggtgcttggagctctccctccaccagcggcggtccacggacgctcggcgagctccaccggcgggcgctgccgaagctcccagcgtcctcctgcaggccgagctgaaggttcagcgcgccggtggagttcgacgacgaaactccgtcacgtcatacctctccgcctcccgtcttccagacgtctccaatcggggctcccagcgtctcggagaagaggagcagcacggcacggcggctgtggcgaggaaggctcctgtcccatcccaacccagttagcagccgcccaaggaggaggagatccaatcggcgtgcgggcgtccgcggtccatccatcgatccaattccaatctgcaggccagcggaagctgtcacagtcgtcgattttagttgttggagctggaggtttgggctctcccctggcattgtatctagcagcttgtggtgtcggttgcttgggcattgtggatggtgatgatgttgaattgaataatcttcatcgacagataattcataaagaagcatatgttggacaatctaaagtgaagtcagcagctgatgcttgccgattaattcctctatcaaggtagtagagcatcaccatactctgaagccatgcaatgctttggagattgcacggaaatatgatatagttgttgatgcaactgacaaccttcctactaggtatatgatcagcgattgctgtgttttgctgaacaagccacttgtatctggtgcggcattaggcttagaagggcagttgactgtttatcatcataatggaagcccatgctatcggtgcctctttccaactccaccacctgtggcagcctgccagagatgctcagacagtggtgtccttggggttgttccgggagtgattggttgcttacaagctctggaggctataaaggttgcaactggtgttggtgagcccctatgtggaagaatgctactatttgatgcactctctgctcgtattagagttgttaaacttcgtggaagctctccagattgcacccattgtggcgaaaactccgttttcacagaagaagactttcagaagtttgactatgagagcttcacacagtcaccaatgtctgataaggcagcagcaagcgtgaacgtactcccagagagcgcgcgtatcacttgcagagagtacaagaaactggccgacgatggtgaacctcatctactgctggacgtacgacctgcgcatcacttccagatagcttcgatctctccgtcccacaacatcccgctctccatgctggaagagaagctgcccgcgctcgaagcctcgctgaaggaagcaggggaggggtcagccttggttgtcctgtgtaggagaggcaatgactctcagagagccgtccagcttctccgcgagaagggattcgccaacgcgaaggatatcatcggtgggctgcaggcgtggggacaagacgtcgatcctgatttccctgtgtactagcgagatggaaatggatgcactaccttgtaacagtttggatgccgctagaacgagaactctgatactatgatttgagtactaattttgccataccgtgtacttgcaaaaacaaatatacaactggtatggacacggtattgtgatgaataatgccatggacaaaataaaatttgagtgatatttttttgcaggtttaaattttt

SEQ ID NO: 40631 - DNA, 1997 bp, Zea Mays
gaaccaaaagcgccggcatctcaaacccgacggcgctctcttctctatcctctgtcccctccaccaaaaccgacggcgacgtcgctctcctccaccggtgcttggagctctccctccaccagcggcggtccacggacgctcggcgagctccaccggcgggcgctggtcagatccgcttggcagtcatccacctggcacatcgggtagctcacgcctccgttggcagtcccaccgccgcctggccctcccccagtgcccccggtgatccggaccgcacccgcttgctcggcctaacgaccggctcctgccccgccgcagccgaagctcccagcgtcctcctgcaggccgagctgaaggttcagcgcgccggtggagttcgacgacgaaactccgtcacgtcatacctctccgcctcccgtcttccagacgtctccaatcggggctcccagcgtctcggagaagaggagcagcacggcacggcggctgtggcgaggaaggctcctgtcccatcccaacccagttagcagccgcccaaggaggaggagatccaatcggcgtgcgggcgtccgcggtccatccatcgatccaattccaatctgcagaagaagggatcaaggaacagcgaccagagaaaggctgcgtctgctgctgctcctacggctgctgatgctacgaacaagaggcccagggccagcggaagctgtcacagtcgtcgattttagttgttggagctggaggtttgggctctcccctggcattgtatctagcagcttgtggtgtcggttgcttgggcattgtggatggtgatgatgttgaattgaataatcttcatcgacagataattcataaagaagcatatgttggacaatctaaagtgaagtcagcagctgatgcttgccgtgagtagtagagcatcaccatactctgaagccatgcaatgctttggagattgcacggaaatatgatatagttgttgatgcaactgacaaccttcctactaggtatatgatcagcgattgctgtgttttgctgaacaagccacttgtatctggtgcggcattaggcttagaagggcagttgactgtttatcatcataatggaagcccatgctatcggtgcctctttccaactccaccacctgtggcagcctgccagagatgctcagacagtggtgtccttggggttgttccgggagtgattggttgcttacaagctctggaggctataaaggttgcaactggtgttggtgagcccctatgtggaagaatgctactatttgatgcactctctgctcgtattagagttgttaaacttcgtggaagctctccagattgcacccattgtggcgaaaactccgttttcacagaagaagactttcagaagtttgactatgagagcttcacacagtcaccaatgtctgataaggcagcagcaagcgtgaacgtactcccagagagcgcgcgtatcacttgcagagagtacaagaaactggccgacgatggtgaacctcatctactgctggacgtacgacctgcgcatcacttccagatagcttcgatctctccgtcccacaacatcccgctctccatgctggaagagaagctgcccgcgctcgaagcctcgctgaaggaagcaggggaggggtcagccttggttgtcctgtgtaggagaggcaatgactctcagagagccgtccagcttctccgcgagaagggattcgccaacgcgaaggatatcatcggtgggctgcaggcgtggggacaagacgtcgatcctgatttccctgtgtactagcgagatggaaatggatgcactaccttgtaacagtttggatgccgctagaacgagaactctgatactatgatttgagtactaattttgccataccgtgtacttgcaaaaacaaatatacaactggtatggacacggtattgtgatgaataatgccatggacaaaataaaatttgagtgatatttttttgcaggtttaaattttt

SEQ ID NO: 40632 - DNA, 2016 bp, Zea Mays
gaaccaaaagcgccggcatctcaaacccgacggcgctctcttctctatcctctgtcccctccaccaaaaccgacggcgacgtcgctctcctccaccggtgcttggagctctccctccaccagcggcggtccacggacgctcggcgagctccaccggcgggcgctggtcagatccgcttggcagtcatccacctggcacatcgggtagctcacgcctccgttggcagtcccaccgccgcctggccctcccccagtgcccccggtgatccggaccgcacccgcttgctcggcctaacgaccggctcctgccccgccgcagccgaagctcccagcgtcctcctgcaggccgagctgaaggttcagcgcgccggtggagttcgacgacgaaactccgtcacgtcatacctctccgcctcccgtcttccagacgtctccaatcggggctcccagcgtctcggagaagaggagcagcacggcacggcggctgtggcgaggaaggctcctgtcccatcccaacccagttagcagccgcccaaggaggaggagatccaatcggcgtgcgggcgtccgcggtccatccatcgatccaattccaatctgcagaagaagggatcaaggaacagcgaccagagaaaggctgcgtctgctgctgctcctacggctgctgatgctacgaacaagaggcccagggccagcggaagctgtcacagtcgtcgattttagttgttggagctggaggtttgggctctcccctggcattgtatctagcagcttgtggtgtcggttgcttgggcattgtggatggtgatgatgttgaattgaataatcttcatcgacagataattcataaagaagcatatgttggacaatctaaagtgaagtcagcagctgatgcttgcctcaggattaattcctctatcaaggtagtagagcatcaccatactctgaagccatgcaatgctttggagattgcacggaaatatgatatagttgttgatgcaactgacaaccttcctactaggtatatgatcagcgattgctgtgttttgctgaacaagccacttgtatctggtgcggcattaggcttagaagggcagttgactgtttatcatcataatggaagcccatgctatcggtgcctctttccaactccaccacctgtggcagcctgccagagatgctcagacagtggtgtccttggggttgttccgggagtgattggttgcttacaagctctggaggctataaaggttgcaactggtgttggtgagcccctatgtggaagaatgctactatttgatgcactctctgctcgtattagagttgttaaacttcgtggaagctctccagattgcacccattgtggcgaaaactccgttttcacagaagaagactttcagaagtttgactatgagagcttcacacagtcaccaatgtctgataaggcagcagcaagcgtgaacgtactcccagagagcgcgcgtatcacttgcagagagtacaagaaactggccgacgatggtgaacctcatctactgctggacgtacgacctgcgcatcacttccagatagcttcgatctctccgtcccacaacatcccgctctccatgctggaagagaagctgcccgcgctcgaagcctcgctgaaggaagcaggggaggggtcagccttggttgtcctgtgtaggagaggcaatgactctcagagagccgtccagcttctccgcgagaagggattcgccaacgcgaaggatatcatcggtgggctgcaggcgtggggacaagacgtcgatcctgatttccctgtgtactagcgagatggaaatggatgcactaccttgtaacagtttggatgccgctagaacgagaactctgatactatgatttgagtactaattttgccataccgtgtacttgcaaaaacaaatatacaactggtatggacacggtattgtgatgaataatgccatggacaaaataaaatttgagtgatatttttttgcaggtttaaattttt

SEQ ID NO: 40633 - DNA, 2314 bp, Zea Mays
gaaccaaaagcgccggcatctcaaacccgacggcgctctcttctctatcctctgtcccctccaccaaaaccgacggcgacgtcgctctcctccaccggtgcttggagctctccctccaccagcggcggtccacggacgctcggcgagctccaccggcgggcgctggtcagatccgcttggcagtcatccacctggcacatcgggtagctcacgcctccgttggcagtcccaccgccgcctggccctcccccagtgcccccggtgatccggaccgcacccgcttgctcggcctaacgaccggctcctgccccgccgcagccgaagctcccagcgtcctcctgcaggccgagctgaaggttcagcgcgccggtggagttcgacgacgaaactccgtcacgtcatacctctccgcctcccgtcttccagacgtctccaatcggggctcccagcgtctcggagaagaggagcagcacggcacggcggctgtggcgaggaaggctcctgtcccatcccaacccagttagcagccgcccaaggaggaggagatccaatcggcgtgcgggcgtccgcggtccatccatcgatccaattccaatctgcagaagaagggatcaaggaacagcgaccagagaaaggctgcgtctgctgctgctcctacggctgctgatgctacgaacaagaggcccaggatcaatcctggatccgccactgggcggcaggagggaggccatagagcgggagctgaagaagcttcgggcagagcgggaggagctcgacggccggatacggctgctggaatcgcagctcgaggcagggcctgcgggattcaacggtgcggcagcggggaaaggagtaggggatgatgcgtgcggcgggagtggagcgtgccagagccgcgtgggtaacgggtttgctccggacggtagcctcccggcggatatgatctaccggtacagccgccacctccttctcccggacttcggggtcgaaggccagcggaagctgtcacagtcgtcgattttagttgttggagctggaggtttgggctctcccctggcattgtatctagcagcttgtggtgtcggttgcttgggcattgtggatggtgatgatgttgaattgaataatcttcatcgacagataattcataaagaagcatatgttggacaatctaaagtgaagtcagcagctgatgcttgccgattaattcctctatcaaggtagtagagcatcaccatactctgaagccatgcaatgctttggagattgcacggaaatatgatatagttgttgatgcaactgacaaccttcctactaggtatatgatcagcgattgctgtgttttgctgaacaagccacttgtatctggtgcggcattaggcttagaagggcagttgactgtttatcatcataatggaagcccatgctatcggtgcctctttccaactccaccacctgtggcagcctgccagagatgctcagacagtggtgtccttggggttgttccgggagtgattggttgcttacaagctctggaggctataaaggttgcaactggtgttggtgagcccctatgtggaagaatgctactatttgatgcactctctgctcgtattagagttgttaaacttcgtggaagctctccagattgcacccattgtggcgaaaactccgttttcacagaagaagactttcagaagtttgactatgagagcttcacacagtcaccaatgtctgataaggcagcagcaagcgtgaacgtactcccagagagcgcgcgtatcacttgcagagagtacaagaaactggccgacgatggtgaacctcatctactgctggacgtacgacctgcgcatcacttccagatagcttcgatctctccgtcccacaacatcccgctctccatgctggaagagaagctgcccgcgctcgaagcctcgctgaaggaagcaggggaggggtcagccttggttgtcctgtgtaggagaggcaatgactctcagagagccgtccagcttctccgcgagaagggattcgccaacgcgaaggatatcatcggtgggctgcaggcgtggggacaagacgtcgatcctgatttccctgtgtactagcgagatggaaatggatgcactaccttgtaacagtttggatgccgctagaacgagaactctgatactatgatttgagtactaattttgccataccgtgtacttgcaaaaacaaatatacaactggtatggacacggtattgtgatgaataatgccatggacaaaataaaatttgagtgatatttttttgcaggtttaaattttt

SEQ ID NO: 40634 - DNA, 2203 bp, Zea Mays
gaaccaaaagcgccggcatctcaaacccgacggcgctctcttctctatcctctgtcccctccaccaaaaccgacggcgacgtcgctctcctccaccggtgcttggagctctccctccaccagcggcggtccacggacgctcggcgagctccaccggcgggcgctggtcagatccgcttggcagtcatccacctggcacatcggccgaagctcccagcgtcctcctgcaggccgagctgaaggttcagcgcgccggtggagttcgacgacgaaactccgtcacgtcatacctctccgcctcccgtcttccagacgtctccaatcggggctcccagcgtctcggagaagaggagcagcacggcacggcggctgtggcgaggaaggctcctgtcccatcccaacccagttagcagccgcccaaggaggaggagatccaatcggcgtgcgggcgtccgcggtccatccatcgatccaattccaatctgcagaagaagggatcaaggaacagcgaccagagaaaggctgcgtctgctgctgctcctacggctgctgatgctacgaacaagaggcccaggatcaatcctggatccgccactgggcggcaggagggaggccatagagcgggagctgaagaagcttcgggcagagcgggaggagctcgacggccggatacggctgctggaatcgcagctcgaggcagggcctgcgggattcaacggtgcggcagcggggaaaggagtaggggatgatgcgtgcggcgggagtggagcgtgccagagccgcgtgggtaacgggtttgctccggacggtagcctcccggcggatatgatctaccggtacagccgccacctccttctcccggacttcggggtcgaaggccagcggaagctgtcacagtcgtcgattttagttgttggagctggaggtttgggctctcccctggcattgtatctagcagcttgtggtgtcggttgcttgggcattgtggatggtgatgatgttgaattgaataatcttcatcgacagataattcataaagaagcatatgttggacaatctaaagtgaagtcagcagctgatgcttgcctcaggattaattcctctatcaaggtagtagagcatcaccatactctgaagccatgcaatgctttggagattgcacggaaatatgatatagttgttgatgcaactgacaaccttcctactaggtatatgatcagcgattgctgtgttttgctgaacaagccacttgtatctggtgcggcattaggcttagaagggcagttgactgtttatcatcataatggaagcccatgctatcggtgcctctttccaactccaccacctgtggcagcctgccagagatgctcagacagtggtgtccttggggttgttccgggagtgattggttgcttacaagctctggaggctataaaggttgcaactggtgttggtgagcccctatgtggaagaatgctactatttgatgcactctctgctcgtattagagttgttaaacttcgtggaagctctccagattgcacccattgtggcgaaaactccgttttcacagaagaagactttcagaagtttgactatgagagcttcacacagtcaccaatgtctgataaggcagcagcaagcgtgaacgtactcccagagagcgcgcgtatcacttgcagagagtacaagaaactggccgacgatggtgaacctcatctactgctggacgtacgacctgcgcatcacttccagatagcttcgatctctccgtcccacaacatcccgctctccatgctggaagagaagctgcccgcgctcgaagcctcgctgaaggaagcaggggaggggtcagccttggttgtcctgtgtaggagaggcaatgactctcagagagccgtccagcttctccgcgagaagggattcgccaacgcgaaggatatcatcggtgggctgcaggcgtggggacaagacgtcgatcctgatttccctgtgtactagcgagatggaaatggatgcactaccttgtaacagtttggatgccgctagaacgagaactctgatactatgatttgagtactaattttgccataccgtgtacttgcaaaaacaaatatacaactggtatggacacggtattgtgatgaataatgccatggacaaaataaaatttgagtgatatttttttgcaggtttaaattttt

SEQ ID NO: 40635 - DNA, 1863 bp, Zea Mays
gaaccaaaagcgccggcatctcaaacccgacggcgctctcttctctatcctctgtcccctccaccaaaaccgacggcgacgtcgctctcctccaccggtgcttggagctctccctccaccagcggcggtccacggacgctcggcgagctccaccggcgggcgctgccgaagctcccagcgtcctcctgcaggccgagctgaaggttcagcgcgccggtggagttcgacgacgaaactccgtcacgtcatacctctccgcctcccgtcttccagacgtctccaatcggggctcccagcgtctcggagaagaggagcagcacggcacggcggctgtggcgaggaaggctcctgtcccatcccaacccagttagcagccgcccaaggaggaggagatccaatcggcgtgcgggcgtccgcggtccatccatcgatccaattccaatctgcagaagaagggatcaaggaacagcgaccagagaaaggctgcgtctgctgctgctcctacggctgctgatgctacgaacaagaggcccagggccagcggaagctgtcacagtcgtcgattttagttgttggagctggaggtttgggctctcccctggcattgtatctagcagcttgtggtgtcggttgcttgggcattgtggatggtgatgatgttgaattgaataatcttcatcgacagataattcataaagaagcatatgttggacaatctaaagtgaagtcagcagctgatgcttgccgtgagattaattcctctatcaaggtagtagagcatcaccatactctgaagccatgcaatgctttggagattgcacggaaatatgatatagttgttgatgcaactgacaaccttcctactaggtatatgatcagcgattgctgtgttttgctgaacaagccacttgtatctggtgcggcattaggcttagaagggcagttgactgtttatcatcataatggaagcccatgctatcggtgcctctttccaactccaccacctgtggcagcctgccagagatgctcagacagtggtgtccttggggttgttccgggagtgattggttgcttacaagctctggaggctataaaggttgcaactggtgttggtgagcccctatgtggaagaatgctactatttgatgcactctctgctcgtattagagttgttaaacttcgtggaagctctccagattgcacccattgtggcgaaaactccgttttcacagaagaagactttcagaagtttgactatgagagcttcacacagtcaccaatgtctgataaggcagcagcaagcgtgaacgtactcccagagagcgcgcgtatcacttgcagagagtacaagaaactggccgacgatggtgaacctcatctactgctggacgtacgacctgcgcatcacttccagatagcttcgatctctccgtcccacaacatcccgctctccatgctggaagagaagctgcccgcgctcgaagcctcgctgaaggaagcaggggaggggtcagccttggttgtcctgtgtaggagaggcaatgactctcagagagccgtccagcttctccgcgagaagggattcgccaacgcgaaggatatcatcggtgggctgcaggcgtggggacaagacgtcgatcctgatttccctgtgtactagcgagatggaaatggatgcactaccttgtaacagtttggatgccgctagaacgagaactctgatactatgatttgagtactaattttgccataccgtgtacttgcaaaaacaaatatacaactggtatggacacggtattgtgatgaataatgccatggacaaaataaaatttgagtgatatttttttgcaggtttaaattttt

SEQ ID NO: 40636 - DNA, 1901 bp, Zea Mays
gaaccaaaagcgccggcatctcaaacccgacggcgctctcttctctatcctctgtcccctccaccaaaaccgacggcgacgtcgctctcctccaccggtgcttggagctctccctccaccagcggcggtccacggacgctcggcgagctccaccggcgggcgctggtcagatccgcttggcagtcatccacctggcacatcggccgaagctcccagcgtcctcctgcaggccgagctgaaggttcagcgcgccggtggagttcgacgacgaaactccgtcacgtcatacctctccgcctcccgtcttccagacgtctccaatcggggctcccagcgtctcggagaagaggagcagcacggcacggcggctgtggcgaggaaggctcctgtcccatcccaacccagttagcagccgcccaaggaggaggagatccaatcggcgtgcgggcgtccgcggtccatccatcgatccaattccaatctgcagaagaagggatcaaggaacagcgaccagagaaaggctgcgtctgctgctgctcctacggctgctgatgctacgaacaagaggcccagggccagcggaagctgtcacagtcgtcgattttagttgttggagctggaggtttgggctctcccctggcattgtatctagcagcttgtggtgtcggttgcttgggcattgtggatggtgatgatgttgaattgaataatcttcatcgacagataattcataaagaagcatatgttggacaatctaaagtgaagtcagcagctgatgcttgccgtgagattaattcctctatcaaggtagtagagcatcaccatactctgaagccatgcaatgctttggagattgcacggaaatatgatatagttgttgatgcaactgacaaccttcctactaggtatatgatcagcgattgctgtgttttgctgaacaagccacttgtatctggtgcggcattaggcttagaagggcagttgactgtttatcatcataatggaagcccatgctatcggtgcctctttccaactccaccacctgtggcagcctgccagagatgctcagacagtggtgtccttggggttgttccgggagtgattggttgcttacaagctctggaggctataaaggttgcaactggtgttggtgagcccctatgtggaagaatgctactatttgatgcactctctgctcgtattagagttgttaaacttcgtggaagctctccagattgcacccattgtggcgaaaactccgttttcacagaagaagactttcagaagtttgactatgagagcttcacacagtcaccaatgtctgataaggcagcagcaagcgtgaacgtactcccagagagcgcgcgtatcacttgcagagagtacaagaaactggccgacgatggtgaacctcatctactgctggacgtacgacctgcgcatcacttccagatagcttcgatctctccgtcccacaacatcccgctctccatgctggaagagaagctgcccgcgctcgaagcctcgctgaaggaagcaggggaggggtcagccttggttgtcctgtgtaggagaggcaatgactctcagagagccgtccagcttctccgcgagaagggattcgccaacgcgaaggatatcatcggtgggctgcaggcgtggggacaagacgtcgatcctgatttccctgtgtactagcgagatggaaatggatgcactaccttgtaacagtttggatgccgctagaacgagaactctgatactatgatttgagtactaattttgccataccgtgtacttgcaaaaacaaatatacaactggtatggacacggtattgtgatgaataatgccatggacaaaataaaatttgagtgatatttttttgcaggtttaaattttt

SEQ ID NO: 40637 - DNA, 2012 bp, Zea Mays
gaaccaaaagcgccggcatctcaaacccgacggcgctctcttctctatcctctgtcccctccaccaaaaccgacggcgacgtcgctctcctccaccggtgcttggagctctccctccaccagcggcggtccacggacgctcggcgagctccaccggcgggcgctggtcagatccgcttggcagtcatccacctggcacatcgggtagctcacgcctccgttggcagtcccaccgccgcctggccctcccccagtgcccccggtgatccggaccgcacccgcttgctcggcctaacgaccggctcctgccccgccgcagccgaagctcccagcgtcctcctgcaggccgagctgaaggttcagcgcgccggtggagttcgacgacgaaactccgtcacgtcatacctctccgcctcccgtcttccagacgtctccaatcggggctcccagcgtctcggagaagaggagcagcacggcacggcggctgtggcgaggaaggctcctgtcccatcccaacccagttagcagccgcccaaggaggaggagatccaatcggcgtgcgggcgtccgcggtccatccatcgatccaattccaatctgcagaagaagggatcaaggaacagcgaccagagaaaggctgcgtctgctgctgctcctacggctgctgatgctacgaacaagaggcccagggccagcggaagctgtcacagtcgtcgattttagttgttggagctggaggtttgggctctcccctggcattgtatctagcagcttgtggtgtcggttgcttgggcattgtggatggtgatgatgttgaattgaataatcttcatcgacagataattcataaagaagcatatgttggacaatctaaagtgaagtcagcagctgatgcttgccgtgagattaattcctctatcaaggtagtagagcatcaccatactctgaagccatgcaatgctttggagattgcacggaaatatgatatagttgttgatgcaactgacaaccttcctactaggtatatgatcagcgattgctgtgttttgctgaacaagccacttgtatctggtgcggcattaggcttagaagggcagttgactgtttatcatcataatggaagcccatgctatcggtgcctctttccaactccaccacctgtggcagcctgccagagatgctcagacagtggtgtccttgggttccgggagtgattggttgcttacaagctctggaggctataaaggttgcaactggtgttggtgagcccctatgtggaagaatgctactatttgatgcactctctgctcgtattagagttgttaaacttcgtggaagctctccagattgcacccattgtggcgaaaactccgttttcacagaagaagactttcagaagtttgactatgagagcttcacacagtcaccaatgtctgataaggcagcagcaagcgtgaacgtactcccagagagcgcgcgtatcacttgcagagagtacaagaaactggccgacgatggtgaacctcatctactgctggacgtacgacctgcgcatcacttccagatagcttcgatctctccgtcccacaacatcccgctctccatgctggaagagaagctgcccgcgctcgaagcctcgctgaaggaagcaggggaggggtcagccttggttgtcctgtgtaggagaggcaatgactctcagagagccgtccagcttctccgcgagaagggattcgccaacgcgaaggatatcatcggtgggctgcaggcgtggggacaagacgtcgatcctgatttccctgtgtactagcgagatggaaatggatgcactaccttgtaacagtttggatgccgctagaacgagaactctgatactatgatttgagtactaattttgccataccgtgtacttgcaaaaacaaatatacaactggtatggacacggtattgtgatgaataatgccatggacaaaataaaatttgagtgatatttttttgcaggtttaaattttt

SEQ ID NO: 40638 - DNA, 3080 bp, Zea Mays
gaaccaaaagcgccggcatctcaaacccgacggcgctctcttctctatcctctgtcccctccaccaaaaccgacggcgacgtcgctctcctccaccggtgcttggagctctccctccaccagcggcggtccacggacgctcggcgagctccaccggcgggcgctggtcagatccgcttggcagtcatccacctggcacatcggccgaagctcccagcgtcctcctgcaggccgagctgaaggttcagcgcgccggtggagttcgacgacgaaactccgtcacgtcatacctctccgcctcccgtcttccagacgtctccaatcggggctcccagcgtctcggagaagaggagcagcacggcacggcggctgtggcgaggaaggctcctgtcccatcccaacccagttagcagccgcccaaggaggaggagatccaatcggcgtgcgggcgtccgcggtccatccatcgatccaattccaatctgcagaagaagggatcaaggaacagcgaccagagaaaggctgcgtctgctgctgctcctacggctgctgatgctacgaacaagaggcccaggatcaatcctggatccgccactgggcggcaggagggaggccatagagcgggagctgaagaagcttcgggcagagcgggaggagctcgacggccggatacggctgctggaatcgcagctcgaggcagggcctgcgggattcaacggtgcggcagcggggaaaggagtaggggatgatgcgtgcggcgggagtggagcgtgccagagccgcgtgggtaacgggtttgctccggacggtagcctcccggcggatatgatctaccggtacagccgccacctccttctcccggacttcggggtcgaaggccagcggaagctgtcacagtcgtcgattttagttgttggagctggaggtttgggctctcccctggcattgtatctagcagcttgtggtgtcggttgcttgggcattgtggatggtgatgatgttgaattgaataatcttcatcgacagataattcataaagaagcatatgttggacaatctaaagtgaagtcagcagctgatgcttgccgtgagattaattcctctatcaaggtagtagagcatcaccatactctgaagccatgcaatgctttggagattgcacggaaatatgatatagttgttgatgcaactgacaaccttcctactaggtatatgatcagcgattgctgtgttttgctgaacaagccacttgtatctggtgcggcattaggcttagaagggcagttgactgtttatcatcataatggaagcccatgctatcggtgcctctttccaactccaccacctgtggcagcctgccagagatgctcagacagtggtgtccttggggttgttccgggagtgattggttgcttacaagctctggaggctataaaggttgcaactggtgttggtgagcccctatgtggaagaatgctactatttgatgcactctctgctcgtattagagttgttaaacttcgtggaagctctccagattgcacccattgtggcgaaaactccgttttcacagaagaagactttcagaagtttgactatgagagcttcacacagtcaccaatgtctgataaggcagcagcaagcgtgaacgtactcccagagagcgcgcgtatcacttgcagagagtacaagaaactggccgacgatggtgaacctcatctactgctggacgtacgacctgcgcatcacttccagatagcttcgatctctccgtcccacaacatcccgctctccatgctggaagagaagctgcccgcgctcgaagcctcgctgaaggaagcaggggaggggtcagccttggttgtcctgtgtaggagaggcaatgactctcagagagccgtccagcttctccgcgagaagggattcgccaacgcgaaggatatcatcggtgggctgcaggcgtggggacaagacgtcgatcctgatttccctgtgtactagcgagatggaaatggatgcactaccttgtaacagtttggatgccgctagaacgagaactctgatactatgatttgagtactaattttgccataccgtgtacttgcaaaaacaaatatacaactggtatggacacggtattgtgatgaataatgccatggacaaaataaaatttgagtgatatttttttgcaggtttaaatttttagctttgtgtactacatttacgattttgtaatgattgttaaaacattgcgacatgttgagttaactatattttggctaaaggggatgcccgaaccccaggacaccaatgaattattgttgtttcaatccagagggcacactgctctgttccagttaacaggccaactaaagctttttatatcaactttgctgatgacattaatcactcagcttggtataggaaggctgtaatatttctgctccaagttttcgtagatctttgactatcctttttttttgcagatatacttattgctacagtattatgtaaataatcattcagcttgtaactcacactttattttcttatatcaggggtctgtggttggtctgcatgaacagcagtttggcaatgttcccatccagattactatccagaaatgtaaatctgacaatcagagaaatgatgatccaaattgttgccaatccttatgggaaaatttcgttagcactgtcaaaaaagaaaatttccggcgacctcagagtgcaagatatcagacaaattttaatttgatgatagctgatgttatggttaaccatgcacatgtttttagtgatatagaaaaatcattttagcttcttttaagtcgttatcagatgatgggcaacgacttttcattaggatctacactcgaaaagggccatggttccggaagggcagcatctcatatcaagagatttcagatctggagcatgcagtcatggagttggagttggcaggttatatcgacatgctttcttgcaccattgatccttttgaatatgatatgaaggagattcttgatgtgttaagtgttcctgaaatgaaggaaattctcaaggagcttcctaaggataa

SEQ ID NO: 40639 - DNA, 3042 bp, Zea Mays
gaaccaaaagcgccggcatctcaaacccgacggcgctctcttctctatcctctgtcccctccaccaaaaccgacggcgacgtcgctctcctccaccggtgcttggagctctccctccaccagcggcggtccacggacgctcggcgagctccaccggcgggcgctgccgaagctcccagcgtcctcctgcaggccgagctgaaggttcagcgcgccggtggagttcgacgacgaaactccgtcacgtcatacctctccgcctcccgtcttccagacgtctccaatcggggctcccagcgtctcggagaagaggagcagcacggcacggcggctgtggcgaggaaggctcctgtcccatcccaacccagttagcagccgcccaaggaggaggagatccaatcggcgtgcgggcgtccgcggtccatccatcgatccaattccaatctgcagaagaagggatcaaggaacagcgaccagagaaaggctgcgtctgctgctgctcctacggctgctgatgctacgaacaagaggcccaggatcaatcctggatccgccactgggcggcaggagggaggccatagagcgggagctgaagaagcttcgggcagagcgggaggagctcgacggccggatacggctgctggaatcgcagctcgaggcagggcctgcgggattcaacggtgcggcagcggggaaaggagtaggggatgatgcgtgcggcgggagtggagcgtgccagagccgcgtgggtaacgggtttgctccggacggtagcctcccggcggatatgatctaccggtacagccgccacctccttctcccggacttcggggtcgaaggccagcggaagctgtcacagtcgtcgattttagttgttggagctggaggtttgggctctcccctggcattgtatctagcagcttgtggtgtcggttgcttgggcattgtggatggtgatgatgttgaattgaataatcttcatcgacagataattcataaagaagcatatgttggacaatctaaagtgaagtcagcagctgatgcttgccgtgagattaattcctctatcaaggtagtagagcatcaccatactctgaagccatgcaatgctttggagattgcacggaaatatgatatagttgttgatgcaactgacaaccttcctactaggtatatgatcagcgattgctgtgttttgctgaacaagccacttgtatctggtgcggcattaggcttagaagggcagttgactgtttatcatcataatggaagcccatgctatcggtgcctctttccaactccaccacctgtggcagcctgccagagatgctcagacagtggtgtccttggggttgttccgggagtgattggttgcttacaagctctggaggctataaaggttgcaactggtgttggtgagcccctatgtggaagaatgctactatttgatgcactctctgctcgtattagagttgttaaacttcgtggaagctctccagattgcacccattgtggcgaaaactccgttttcacagaagaagactttcagaagtttgactatgagagcttcacacagtcaccaatgtctgataaggcagcagcaagcgtgaacgtactcccagagagcgcgcgtatcacttgcagagagtacaagaaactggccgacgatggtgaacctcatctactgctggacgtacgacctgcgcatcacttccagatagcttcgatctctccgtcccacaacatcccgctctccatgctggaagagaagctgcccgcgctcgaagcctcgctgaaggaagcaggggaggggtcagccttggttgtcctgtgtaggagaggcaatgactctcagagagccgtccagcttctccgcgagaagggattcgccaacgcgaaggatatcatcggtgggctgcaggcgtggggacaagacgtcgatcctgatttccctgtgtactagcgagatggaaatggatgcactaccttgtaacagtttggatgccgctagaacgagaactctgatactatgatttgagtactaattttgccataccgtgtacttgcaaaaacaaatatacaactggtatggacacggtattgtgatgaataatgccatggacaaaataaaatttgagtgatatttttttgcaggtttaaatttttagctttgtgtactacatttacgattttgtaatgattgttaaaacattgcgacatgttgagttaactatattttggctaaaggggatgcccgaaccccaggacaccaatgaattattgttgtttcaatccagagggcacactgctctgttccagttaacaggccaactaaagctttttatatcaactttgctgatgacattaatcactcagcttggtataggaaggctgtaatatttctgctccaagttttcgtagatctttgactatcctttttttttgcagatatacttattgctacagtattatgtaaataatcattcagcttgtaactcacactttattttcttatatcaggggtctgtggttggtctgcatgaacagcagtttggcaatgttcccatccagattactatccagaaatgtaaatctgacaatcagagaaatgatgatccaaattgttgccaatccttatgggaaaatttcgttagcactgtcaaaaaagaaaatttccggcgacctcagagtgcaagatatcagacaaattttaatttgatgatagctgatgttatggttaaccatgcacatgtttttagtgatatagaaaaatcattttagcttcttttaagtcgttatcagatgatgggcaacgacttttcattaggatctacactcgaaaagggccatggttccggaagggcagcatctcatatcaagagatttcagatctggagcatgcagtcatggagttggagttggcaggttatatcgacatgctttcttgcaccattgatccttttgaatatgatatgaaggagattcttgatgtgttaagtgttcctgaaatgaaggaaattctcaaggagcttcctaaggataa

SEQ ID NO: 40640 - DNA, 2285 bp, Zea Mays
tttccggcgacaaccctttcgcgcgtactgtcgcatgatactgaccccagaccggcccccatcgagagatcgcgagaaaccttgtcgcgagcgcggccgctgatggtggaagccgagacggagcgacggacgacgacgacgcgaccttatctggtgtcggtcgaccagcagccgtccgcggctccgcccgacgcgatgtccccaaccggcagccgagcgcggattgccgaagcaccacactctcctcgctgattcgtgcggccgccctccgaagctccgcccgacgcgacgccaccactgcttcacgacggcaggtggcggagctcgttgcgcgccgcgcgcgtgcagacgtcggcgaacggggctcccgggacgtccgcgctggccagtcgtgtctggtctatggaagaaatagccgagcgaccagatattagatatccatctattttcctctagtcccctattgaccatgatattcttatgtctcgtttttttgaaaagagatggtgcaatgtgacgaggtgccctccgggttatttcaaggatgaaagcattgataaaattttggtgccaagaatgaagaaaatgccagtaaagatgtttagatccatcagacataccaaggattttgatatgtctctcaactatgacaaagcttatgaactgcctccaggcattccatcacacaagtttgcagagtattctgtatcgggactgacagatgccagtgaaaagtatgcacaccgtaatttatctgcacccatcaaagcaaatctacatttttctttgagcagaagtggaattatcgctcttgatagagcagaagcagtaattgagataactgaatgggttgaagttccaaagaagatattgactccagagagtaacatcaccaatcagaattcatcttctaaagtaggagtagctaatagcacgacagatattaaggaaaatttgagttctggcagtgataataattccagcactcccattaatgggagtaatgttcaagaaattattacagagaaggtgctaaagaaaagaacatttagggttccattgaaggttgtggaaaaaacaactggtggtggaacaattctttcaaaggagttgtattctgaagcaaaaaataggttagaggcactcgataagaaggatgctgagcggaggaaaactgccgaacttaagaataacctagagtcatacgtatattctatgaaggagaagttggaagaaagcacagatattttgactgtctcaactgaacaggagagggaatcctttgcggagaaacttagcaaggtgcaggattggttgtacatggacggtgaagatgctcaagctaatgaattcaaagaacgccttggtcaacttaaggccattggtgaaccgattcttttcagattgagtgaattaaaagcccgaccagctgcctgtgaaaatgctcgattgtatcttgatgagctgcaaaagattgtgaacaagtgggagacaaataaacaatggctccccaaaaagagagtagatgaggttgtgagtcaagcagagaaagtgaaagcttggctggaggagaaggaaaacctgcagaaaaatacccctgtctatagctcaccagttttcacatctgaacaagtttatgagaaagttctggacttacaagataaggtctcaagtgtcaacagaattccaaaaccaaaacccaaggccgagaagaaaatagcagaggaagagcctgctagcaaggggaaaaccacatcttcggaatctgcacccaacgagggtgagtacaccgaaacgtctcaggaacctaaggctcgagaaggggatcattcagcatcagccaacagtagtgatttagatcctgaatctcacgacgagttgtgagtagcagaatccatagaaacaggtaggaaagattacgcatatatagtacacaagaaggcagtttgaggataaattttggttgctcaaatttccccaatttttatttgacgaccaaaagatgaggctatgtagtagggtgccgaggaatactagatgctgtagggccgaaatgattttatcggtagtttctgattgctcattgctgtaaggcagctttatattggtgtaagttactcgcctcaaaggcgttattcaggatctagaaacgctttgttgtgctgaactcatttcatttttttgacgagtaacgctatatagattctacgccaagagtattgttgtaatgaattcatttgattttttaaacgagaaattctatatagattttacatcaatctttg

SEQ ID NO: 40641 - DNA, 2167 bp, Zea Mays
gaaagacgcttacctgaccgtccagatcgcgagaaaccttgtcgcgagcgcggccgctgatggtggaagccgagacggagcgacggacgacgacgacgcgaccttatctggtgtcggtcgaccagcagccgtccgcggctccgcccgacgcgatgtccccaaccggcagccgagcgcggattgccgaagcaccacactctcctcgctgattcgtgcggccgccctccgaagctccgcccgacgcgacgccaccactgcttcacgacggcaggtggcggagctcgttgcgcgccgcgcgcgtgcagacgtcggcgaacggggctcccgggacgtccgcgctggccagtcgtgtctggtctatggaagaaatagccgagcgaccagatattagatatccatctattttcctctagtcccctattgaccatgatattcttatgtctcgtttttttgaaaagagatggtgcaatgtgacgaggtgccctccgggttatttcaaggatgaaagcattgataaaattttggtgccaagaatgaagaaaatgccagtaaagatgtttagatccatcagacataccaaggattttgatatgtctctcaactatgacaaagcttatgaactgcctccaggcattccatcacacaagtttgcagagtattctgtatcgggactgacagatgccagtgaaaagtatgcacaccgtaatttatctgcacccatcaaagcaaatctacatttttctttgagcagaagtggaattatcgctcttgatagagcagaagcagtaattgagataactgaatgggttgaagttccaaagaagatattgactccagagagtaacatcaccaatcagaattcatcttctaaagtaggagtagctaatagcacgacagatattaaggaaaatttgagttctggcagtgataataattccagcactcccattaatgggagtaatgttcaagaaattattacagagaaggtgctaaagaaaagaacatttagggttccattgaaggttgtggaaaaaacaactggtggtggaacaattctttcaaaggagttgtattctgaagcaaaaaataggttagaggcactcgataagaaggatgctgagcggaggaaaactgccgaacttaagaataacctagagtcatacgtatattctatgaaggagaaggtgcaggattggttgtacatggacggtgaagatgctcaagctaatgaattcaaagaacgccttggtcaacttaaggccattggtgaaccgattcttttcagattgagtgaattaaaagcccgaccagctgcctgtgaaaatgctcgattgtatcttgatgagctgcaaaagattgtgaacaagtgggagacaaataaacaatggctccccaaaaagagagtagatgaggttgtgagtcaagcagagaaagtgaaagcttggctggaggagaaggaaaacctgcagaaaaatacccctgtctatagctcaccagttttcacatctgaacaagtttatgagaaagttctggacttacaagataaggtctcaagtgtcaacagaattccaaaaccaaaacccaaggccgagaagaaaatagcagaggaagagcctgctagcaaggggaaaaccacatcttcggaatctgcacccaacgagggtgagtacaccgaaacgtctcaggaacctaaggctcgagaaggggatcattcagcatcagccaacagtagtgatttagatcctgaatctcacgacgagttgtgagtagcagaatccatagaaacaggtaggaaagattacgcatatatagtacacaagaaggcagtttgaggataaattttggttgctcaaatttccccaatttttatttgacgaccaaaagatgaggctatgtagtagggtgccgaggaatactagatgctgtagggccgaaatgattttatcggtagtttctgattgctcattgctgtaaggcagctttatattggtgtaagttactcgcctcaaaggcgttattcaggatctagaaacgctttgttgtgctgaactcatttcatttttttgacgagtaacgctatatagattctacgccaagagtattgttgtaatgaattcatttgattttttaaacgagaaattctatatagattttacatcaatctttg

SEQ ID NO: 40642 - DNA, 373 bp, Zea Mays
cacggtctagcccagcaatccctacagcggccaaatcattgcgtctctggggtgggcacaggatggagagtggagactctggggtgggcataggaaagagactccggcatcaagcaaacagttaattgatgagcagccgtactgatgcgcggtgagaaacgtgagcggcgcgccacatcggacaatggcagacatcaaatcaaggcacatacaacacatgctagacctttagttctaagggctagtgtgaaactccatttttttaatggatttccattttccaagtgaaaataaactaatttttcttggaaattgaaaatcctcggaagaatgaggtttctaaactagccctaagaattagatataaaagcag

SEQ ID NO: 40643 - DNA, 2049 bp, Zea Mays
acgacaatcccctcgccgccgcctcggcctctctacctttccacctttcccacccgccgattcactcgctcgcgcggccgcgactccagcctcccctaaatccgctcgcgcccagcgaggaggcggggtcgcagcgagcgaagattccctccgaatcctctcctccaaaaacttccgatccgcttacgatggctacgcagcagcagcacgcggggccggcgtccgggtcggcgtcggcgtcgagctctagctcggggctgcaccttcccgcctcgccctcggccttcggggacaccacccacaccaagttcagctgggtcctactttggtgtcccagttccaagggctttttatttaggaggttatggccaccaccgaccgtttccacttgggtattaccaaggatttccggttccccagtacaggtaatataattaatttcatcactatttagtttatgtaacattttatgtaacaaaacgctaacatgtcttgcatttacttttggagagtataactgataatatggtgtttgctacataaattagcttgtgcatatggtacctcccctttcagatgttgaaataatctgttccagccatgctcatggaatatgatacgactgtttaaaagccaatagaaatgcattcagttttctgtttgtttgttttccttttgcagttatccttcatatgggaccgaatacatctctccacaggttgaagtgttaaaagctatcagcttttatattcttgtgctgcataagacagttacacaaacctttgcctaatctgacagaggttctttttgtagggtacattaaatccatatcccgctcagcaatatcttcctatttatggagtctcagctgcagcaaacacagccaaccaaacatttaaccagttgaatccatacatttctggtgggggcaatggttatatgtcggttcatagttacaacatgcctggaaatcaatatgtgcagctcactggatcaaacttcagcagtgcgtcaccaacagctcaaccttcctgtcagactccttttttagtagcgacacccgttcctgcacatccacacctaataattccagccccctcaccccagtttacacaagctagtggttcagaccaaagagcaagctgaactgtgcatccaagcatttgtaccttgaggtttgctttgtttgcacggttaccatcttgtttcctttctgacaattagacaacaactgactttagtgctttggttcatggcaggtacccttagattgcagcaggactaaaaagagcagtgttgctgtatccacagcttttgttcttgcctggcaagagatcatccttgcattcataaggttgtcgttatcatggtcaacagatgtacctggaaatcgtgaagttgtccctatggatggggcaagtgatccaagagcaagggttgctcttgcctttccactcggtttaaatcgtatacgtgtgatggagccagatgcagccttaatgatcctgtatctgacaagctcgtggaaatgtagcctatgctggaacggagtccagcatatgtaagatggattgatccaacgggggattagccatcatggccttcaggtgattgttcatctgaaaattcatgttgtgtgcggtcctagtcccagtcactgcgcacagggtctggtgaccaaaagtgtatccagttctgtacaagcctgcagtcatcgtgttgtctgcgtgactgcatccatcagcctttggacctaatatgcagtcatcattgtgttgtttacactactggttgtagccagtgatggtcattggtttgccccagtctcccaatttaaggtgtgatttatgtgtgtattgctctgtgtttggtggttccaagcatagagcggttctcttgtacttcaaaataaagccatttaatgggaatcccatgacgctggtgccagtgatatgtgctagactgacaatgtgtacctgtgatttatgaattatgacccttttaccgttccattttatcaaataagttatatcaatgcctacattgtct

SEQ ID NO: 40644 - DNA, 1884 bp, Zea Mays
acgacaatcccctcgccgccgcctcggcctctctacctttccacctttcccacccgccgattcactcgctcgcgcggccgcgactccagcctcccctaaatccgctcgcgcccagcgaggaggcggggtcgcagcgagcgaagattccctccgaatcctctcctccaaaaacttccgatccgcttacgatggctacgcagcagcagcacgcggggccggcgtccgggtcggcgtcggcgtcgagctctagctcggggctgcaccttcccgcctcgccctcggccttcggggacaccacccacaccaaggttttcgtgggcggtctcgcctgggagaccaacagcggcaggctccggcgcttctacgagcgtttcggggacatactcgaggccgtcgtcatcaccgaccgccactctggccgctccaagggatacggattcgtcggtgacattccgtgaagccgagtccgcgaggaaggcatgcgaggaccccacaccagtgatcgacggcaggcgggccaattgtaacctggcttcgttgggtcgagcccagcatcccgtgcaccctgggcggccaagttcagctgggtcctactttggtgtcccagttccaagggctttttatttaggaggttatggccaccaccgaccgtttccacttgggtattaccaaggatttccggttccccagtacagttatccttcatatgggaccgaatacatctctccacagggtacattaaatccatatcccgctcagcaatatcttcctatttatggagtctcagctgcagcaaacacagccaaccaaacatttaaccagttgaatccatacatttctggtgggggcaatggttatatgtcggttcatagttacaacatgcctggaaatcaatatgtgcagctcactggatcaaacttcagcagtgcgtcaccaacagctcaaccttcctgtcagactccttttttagtagcgacacccgttcctgcacatccacacctaataattccagccccctcaccccagtttacacaagctagtggttcagaccaaagagcaagctgaactgtgcatccaagcatttgtaccttgaggtacccttagattgcagcaggactaaaaagagcagtgttgctgtatccacagcttttgttcttgcctggcaagagatcatccttgcattcataaggttgtcgttatcatggtcaacagatgtacctggaaatcgtgaagttgtccctatggatggggcaagtgatccaagagcaagggttgctcttgcctttccactcggtttaaatcgtatacgtgtgatggagccagatgcagccttaatgatcctgtatctgacaagctcgtggaaatgtagcctatgctggaacggagtccagcatatgtaagatggattgatccaacgggggattagccatcatggccttcaggtgattgttcatctgaaaattcatgttgtgtgcggtcctagtcccagtcactgcgcacagggtctggtgaccaaaagtgtatccagttctgtacaagcctgcagtcatcgtgttgtctgcgtgactgcatccatcagcctttggacctaatatgcagtcatcattgtgttgtttacactactggttgtagccagtgatggtcattggtttgccccagtctcccaatttaaggtgtgatttatgtgtgtattgctctgtgtttggtggttccaagcatagagcggttctcttgtacttcaaaataaagccatttaatgggaatcccatgacgctggtgccagtgatatgtgctagactgacaatgtgtacctgtgatttatgaattatgacccttttaccgttccattttatcaaataagttatatcaatgcctacattgtct

SEQ ID NO: 40645 - DNA, 2025 bp, Zea Mays
acgacaatcccctcgccgccgcctcggcctctctacctttccacctttcccacccgccgattcactcgctcgcgcggccgcgactccagcctcccctaaatccgctcgcgcccagcgaggaggcggggtcgcagcgagcgaagattccctccgaatcctctcctccaaaaacttccgatccgcttacgatggctacgcagcagcagcacgcggggccggcgtccgggtcggcgtcggcgtcgagctctagctcggggctgcaccttcccgcctcgccctcggccttcggggacaccacccacaccaaggttttcgtgggcggtctcgcctgggagaccaacagcggcaggctccggcgcttctacgagcgtttcggggacatactcgaggccgtcgtcatcaccgaccgccactctggccgctccaagggatacggattcgtgacattccgtgaagccgagtccgcgaggaaggcatgcgaggaccccacaccagtgatcgacggcaggcgggccaattgtaacctggcttcgttgggtcgagcccagcatcccgtgcaccctgggcggccaagttcagctgggtcctactttggtgtcccagttccaagggctttttatttaggaggttatggccaccaccgaccgtttccacttgggtattaccaaggatttccggttccccagtacagttatccttcatatgggaccgaatacatctctccacagggtacattaaatccatatcccgctcagcaatatcttcctatttatggagtctcagctgcagcaaacacagccaaccaaacatttaaccagttgaatccatacatttctggtgggggcaatggttatatgtcggttcatagttacaacatgcctggaaatcaatatgtgcagctcactggatcaaacttcagcagtgcgtcaccaacagctcaaccttcctgtcagactccttttttagtagcgacacccgttcctgcacatccacacctaataattccagccccctcaccccagtttacacaagctagtggttcagaccaaagagcaagctgaactgtgcatccaagcatttgtaccttgaggtacccttagattgcagcaggactaaaaagagcagtgttgctgtatccacagcttttgttcttgcctggcaagagatcatccttgcattcataagctgcacctcataatctgctaaaatacggagctaagtattgcttaaaagaaaaagaaagggagataagttcttattagcatgaaaagttcttcaaaagcaagaaaatacatgaaatcaagatgttcttccaagcaagaaaatcagggttgtcgttatcatggtcaacagatgtacctggaaatcgtgaagttgtccctatggatggggcaagtgatccaagagcaagggttgctcttgcctttccactcggtttaaatcgtatacgtgtgatggagccagatgcagccttaatgatcctgtatctgacaagctcgtggaaatgtagcctatgctggaacggagtccagcatatgtaagatggattgatccaacgggggattagccatcatggccttcaggtgattgttcatctgaaaattcatgttgtgtgcggtcctagtcccagtcactgcgcacagggtctggtgaccaaaagtgtatccagttctgtacaagcctgcagtcatcgtgttgtctgcgtgactgcatccatcagcctttggacctaatatgcagtcatcattgtgttgtttacactactggttgtagccagtgatggtcattggtttgccccagtctcccaatttaaggtgtgatttatgtgtgtattgctctgtgtttggtggttccaagcatagagcggttctcttgtacttcaaaataaagccatttaatgggaatcccatgacgctggtgccagtgatatgtgctagactgacaatgtgtacctgtgatttatgaattatgacccttttaccgttccattttatcaaataagttatatcaatgcctacattgtct

SEQ ID NO: 40646 - DNA, 1872 bp, Zea Mays
ccgtcattttctatatcctaaatcatataaactattttatctttcttcacactttatctacatgaaactgtattccctacaaccatatttttctggcagtcagattctaaaaaaaatcctcacaaaaaagttgaaccaaactcgcgagccacgggcccgcgtccggcgctgcacgagctgtgtcacgcctcccggcctcccggggtccagccaaatagggctctacatgtgcacagggccagatttcacgtccgccgacgtggttacggcgtcacatgatcacatctggctcctccgggcccaggcgccagtgacgccgtgcccgcctctaaatagcgcctctctcccgggctgccggcggaaccgaggcggtcaggctccctcctccttcctcctccctgcaaatcctgcaggcaccaccgctcgttttcctgtccgggggacaggagagaaggggagagaccgagagagggtgaggcgcggcgtccgcccgatctgctccgccccccgaagcagcctgtcacgtcgtcctcactctcagcaaccagcgaaaatgggtgccggaggcaggatgaccgagaaggagcgggagaagcatgagcaggagcaggtcgcccgtgctaccggcggtggcgcggcagtgcagcggtcgccggtggagaagccgccgttcacgttggggcagatcaagaaggcgatcccgccgcactgcttcgagcgctccgtgctgaggtccttctcgtacgtggcccacgacctgtcgctcgccgcggcgctcctctacctcgcggtggccgtgataccggcgctaccctgcccgctccgctacgcggcctggccgctgtactgggtggcccaggggtgcgtgtgcacgggcgtgtgggtgatcgcgcacgagtgcggccaccacgccttctccgaccacgcgctcctggacgacgccgtcggcctggcgctgcactcggcgctgctggtgccctacttctcgtggaagtacagccaccggcgccaccactccaacacggggtccctggagcgcgacgaggtgttcgtgccgaggaccaaggaggcgctgccgtggtacgccccgtacgtgcacggcagccccgcgggccggctggcgcacgtcgccgtgcagctcaccctgggctggccgctgtacctggccaccaacgcgtcggggcgcccgtacccgcgcttcgcctgccacttcgacccctacggcccgatctacggcgaccgggagcgcgcccagatcttcgtctcggacgccggcgtcgcggccgtggcgttcgggctgtacaagctggcggcggcgttcgggctctggtgggtggtgcgcgtgtacgccgtgccgctgctgatcgtcaacgcgtggctggtgctcatcacgtacctgcagcacacccacccggcgctgccccactacgactcgggcgagtgggactggctgcgcggcgcgctcgccaccgtcgaccgagactacggcgtcctcaaccgcgtgttccaccacatcacggacacgcacgtcgcgcaccacctcttctccaccatgccgcactaccacgccgtggaggccaccagggcgatcaggcccgtcctcggcgagtactaccagttcgacccgacccctgtcgccaaggccacctggcgcgaggccagggagtgcatctacgtcgagcctgagaaccgcaaccgcaagggcgtcttctggtacaacagcaagttctagccgccgcttgctttttccctaggaatgggaggagaaatcaggatgagaagatggctggcagctggtatgagcacggttggatgcaaacagttacccgaaccggtcgttgcgattgcttggcttgcagtcgctgattgttt

SEQ ID NO: 40647 - DNA, 1287 bp, Zea Mays
gccgcatcgtcccacgcgtccctccgtccgtggtctcaccggcgaccccctcagtgcagcaccttgcccggccggctgcccctccgccatgccttggccccatcgtcgcccgaaccgccaccgtgccttggccccaggagccgtcgtgcccgtgtgcagctgtgctcctagtccgtcgtcgtgccgctgtgcctggctcgcgcctgcctgtattcgccaaccgctacggcgaggactagtggttgcttgagatcagcgccggtggcctcgtgtgaaggatgtcgatgccaaatggattggctaggcgggcgctaacctaccagactgatacactattgctcttattattaggcactagcatagctaaagatttagtggtcaggaacgatcgtggatgggggatgctgaacctggtagctggccttctagagagcacaactacaattatcagcggctctaggcaaccgtttgtcatggagacagtgaaagctgacgatgctgcaaaactgggtttgatatcaggtaaacatctgctattcgacacttctatacaggaggtctgcttttggaaacatcttcagtgctaatttgagacaagctcctgcaaggcaagctgcactgggcacagggataccaaacactgctgtttgtgctttttatgattgaggaatacttgaagaagcgtacttgtggtctttatcttgtgctgagatgcatgttttttacctaccgaacattagacccctccagctaccttgctgacacatgaacgagaagacgggttagactttgtcgaaaccctcttcgctagtggaggtatcgaccatcactcgtcactgtaccccgatggtgatcgacgatcgtgagcttccatattatgtgttgtgatacttgagacttttattatgactatgtatgagatattgtctcttattagtacaggatgagatgtgtgttattatgactatggatgagacttttgtgatgtaattgacgagactatggatttaaatattgttatgtgattgtgtatgagatgttttatgtgaaaatatgttgtgctatatagtattgatatatttgttatgttgtggaatatggtgtaaaataaaaataaacaacatttgtaatgctggtcaaattaacttcctagaggccaactgggctgtaggaagttagccagctaactttctaggggctatagtcagccataggaagttagtcgtaggaagttagtcagctaacagcgtgaagctactaacttccgagaacctaccaacttccgag

SEQ ID NO: 40648 - DNA, 1351 bp, Zea Mays
gccgcatcgtcccacgcgtccctccgtccgtggtctcaccggcgaccccctcagtgcagcaccttgcccggccggctgcccctccgccatgccttggccccatcgtcgcccgaaccgccaccgtgccttggccccaggagccgtcgtgcccgtgtgcagctgtgctcctagtccgtcgtcgtgccgctgtgcctggctcgcgcctgcctgtattcgccaaccgctacggcgaggactagtggttgcttgagatcagcgccggtggcctcgtgtgaaggatgtcgatgccaaatggattggctaggcgggcgctaacctaccagactgatacactattgctcttattattaggcactagcatagctaaagatttagtggtcaggaacgatcgtggatgggggatgctgaacctggtagctggccttctagagagcacaactacaattatcagcggctctaggcaaccgtttgtcatggagacagtgaaagctgacgatgctgcaaaactgggtttgatatcaggtaaacatctgctattcgacacttctatacaggaatttacatggcgtctgttttcccatattactatattggtaaactaaagctacaaaaatggaggaggtctgcttttggaaacatcttcagtgctaatttgagacaagctcctgcaaggcaagctgcactgggcacagggataccaaacactgctgtttgtgctttttatgattgaggaatacttgaagaagcgtacttgtggtctttatcttgtgctgagatgcatgttttttacctaccgaacattagacccctccagctaccttgctgacacatgaacgagaagacgggttagactttgtcgaaaccctcttcgctagtggaggtatcgaccatcactcgtcactgtaccccgatggtgatcgacgatcgtgagcttccatattatgtgttgtgatacttgagacttttattatgactatgtatgagatattgtctcttattagtacaggatgagatgtgtgttattatgactatggatgagacttttgtgatgtaattgacgagactatggatttaaatattgttatgtgattgtgtatgagatgttttatgtgaaaatatgttgtgctatatagtattgatatatttgttatgttgtggaatatggtgtaaaataaaaataaacaacatttgtaatgctggtcaaattaacttcctagaggccaactgggctgtaggaagttagccagctaactttctaggggctatagtcagccataggaagttagtcgtaggaagttagtcagctaacagcgtgaagctactaacttccgagaacctaccaacttccgag

SEQ ID NO: 40649 - DNA, 1777 bp, Zea Mays
gccgcatcgtcccacgcgtccctccgtccgtggtctcaccggcgaccccctcagtgcagcaccttgcccggccggctgcccctccgccatgccttggccccatcgtcgcccgaaccgccaccgtgccttggccccaggagccgtcgtgcccgtgtgcagctgtgctcctagtccgtcgtcgtgccgctgtgcctggctcgcgcctgcctgtattcgccaaccgctacggcgaggactagtggttgcttgagatcagcgccggtggcctcgtgtgaaggatgtcgatgccaaatggattggctaggcgggcgctaacctaccagactgatacactattgctcttattattaggcactagcatagctaaagatttagtggtcaggaacgatcgtggatgggggatgctgaacctggtagctggccttctagagagcacaactacaattatcagcggctctaggcaaccgtttgtcatggagacagtgaaagctgacgatgctgcaaaactgggtttgatatcaggtaaacatctgctattcgacacttctatacaggtaagcagaaaggagcaggtcctcattttttatatgtgcaatgttgctttcatgctatacgagaggggtgaatgctagttgtaaaacaatggattatttgaaataaagcagatgagattttcgcaactgttcttatgtactgcaatatttgaaataaacaacccttgcaagatgttagggtcctcctaaaacatatgaatgaccattggattagtctaacattactctttaggcttcctggaccatgtaagcagtctttcacaagtccacgatgactttatttaaaatatggagttagcacacacaggtagagatagtaatggagtggtagctgttaattcttgaactattgaatttggcatggacatcagttattgaatttggcaagcaaagatttatccctgatttggcaaggacatgttgcaggaatttacatggcgtctgttttcccatattactatattggtaaactaaagctacaaaaatggaggaggtctgcttttggaaacatcttcagtgctaatttgagacaagctcctgcaaggcaagctgcactgggcacagggataccaaacactgctgtttgtgctttttatgattgaggaatacttgaagaagcgtacttgtggtctttatcttgtgctgagatgcatgttttttacctaccgaacattagacccctccagctaccttgctgacacatgaacgagaagacgggttagactttgtcgaaaccctcttcgctagtggaggtatcgaccatcactcgtcactgtaccccgatggtgatcgacgatcgtgagcttccatattatgtgttgtgatacttgagacttttattatgactatgtatgagatattgtctcttattagtacaggatgagatgtgtgttattatgactatggatgagacttttgtgatgtaattgacgagactatggatttaaatattgttatgtgattgtgtatgagatgttttatgtgaaaatatgttgtgctatatagtattgatatatttgttatgttgtggaatatggtgtaaaataaaaataaacaacatttgtaatgctggtcaaattaacttcctagaggccaactgggctgtaggaagttagccagctaactttctaggggctatagtcagccataggaagttagtcgtaggaagttagtcagctaacagcgtgaagctactaacttccgagaacctaccaacttccgag

SEQ ID NO: 40650 - DNA, 1870 bp, Zea Mays
gccgcatcgtcccacgcgtccctccgtccgtggtctcaccggcgaccccctcagtgcagcaccttgcccggccggctgcccctccgccatgccttggccccatcgtcgcccgaaccgccaccgtgccttggccccaggagccgtcgtgcccgtgtgcagctgtgctcctagtccgtcgtcgtgccgctgtgcctggctcgcgcctgcctgtattcgccaaccgctacggcgaggactagtggttgcttgagatcagcgccggtggcctcgaacgatcgtggatgggggatgctgaacctggtagctggccttctagagagcacaactacaattatcagcggctctaggcaaccgtttgtcatggagacagtgaaagctgacgatgctgcaaaactgggtttgatatcaggtaaacatctgctattcgacacttctatacaggtaagcagaaaggagcaggtcctcattttttatatgtgcaatgttgctttcatgctatacgagaggggtgaatgctagttgtaaaacaatggattatttgaaataaagcagatgagattttcgcaactgttcttatgtactgcaatatttgaaataaacaacccttgcaagatgttagggtcctcctaaaacatatgaatgaccattggattagtctaacattactctttaggcttcctggaccatgtaagcagtctttcacaagtccacgatgactttatttaaaatatggagttagcacacacaggtagagatagtaatggagtggtagctgttaattcttgaactattgaatttggcatggacatcagttattgaatttggcaagcaaagatttatccctgatttggcaaggacatgttgcaggaatttacatggcgtctgttttcccatattactatattggtaaactaaagctacaaaaatggaggcaagcatattaactcatttaatgccacgttcataggtgatatcctagaactttagttttaaatgttaccggtgccagcttccaatgtttattatacttgtttgcatattgatatatttattcaagttcttcaagctgatggtagtaagtgtgctaccttactactttcaagcttagtcttgtttaaatggaattgttttgcgcaggaggtctgcttttggaaacatcttcagtgctaatttgagacaagctcctgcaaggcaagctgcactgggcacagggataccaaacactgctgtttgtgctttttatgattgaggaatacttgaagaagcgtacttgtggtctttatcttgtgctgagatgcatgttttttacctaccgaacattagacccctccagctaccttgctgacacatgaacgagaagacgggttagactttgtcgaaaccctcttcgctagtggaggtatcgaccatcactcgtcactgtaccccgatggtgatcgacgatcgtgagcttccatattatgtgttgtgatacttgagacttttattatgactatgtatgagatattgtctcttattagtacaggatgagatgtgtgttattatgactatggatgagacttttgtgatgtaattgacgagactatggatttaaatattgttatgtgattgtgtatgagatgttttatgtgaaaatatgttgtgctatatagtattgatatatttgttatgttgtggaatatggtgtaaaataaaaataaacaacatttgtaatgctggtcaaattaacttcctagaggccaactgggctgtaggaagttagccagctaactttctaggggctatagtcagccataggaagttagtcgtaggaagttagtcagctaacagcgtgaagctactaacttccgagaacctaccaacttccgag

SEQ ID NO: 40651 - DNA, 1387 bp, Zea Mays
gccgcatcgtcccacgcgtccctccgtccgtggtctcaccggcgaccccctcagtgcagcaccttgcccggccggctgcccctccgccatgccttggccccatcgtcgcccgaaccgccaccgtgccttggccccaggagccgtcgtgcccgtgtgcagctgtgctcctagtccgtcgtcgtgccgctgtgcctggctcgcgcctgcctgtattcgccaaccgctacggcgaggactagtggttgcttgagatcagcgccggtggcctcgtgtgaaggatgtcgatgccaaatggattggctaggcgggcgctaacctaccagactgatacactattgctcttattattaggcactagcatagctaaagatttagtggtcaggaacgatcgtggatgggggatgctgaacctggtagctggccttctagagagcacaactacaattatcagcggctctaggcaaccgtttgtcatggagacagtgaaagctgacgatgctgcaaaactgggtttgatatcaggtaaacatctgctattcgacacttctatacaggaatttacatggcgtctgttttcccatattactatattggtaaactaaagctacaaaaatggaggcaagcatattaactcatttaatgccacgttcataggaggtctgcttttggaaacatcttcagtgctaatttgagacaagctcctgcaaggcaagctgcactgggcacagggataccaaacactgctgtttgtgctttttatgattgaggaatacttgaagaagcgtacttgtggtctttatcttgtgctgagatgcatgttttttacctaccgaacattagacccctccagctaccttgctgacacatgaacgagaagacgggttagactttgtcgaaaccctcttcgctagtggaggtatcgaccatcactcgtcactgtaccccgatggtgatcgacgatcgtgagcttccatattatgtgttgtgatacttgagacttttattatgactatgtatgagatattgtctcttattagtacaggatgagatgtgtgttattatgactatggatgagacttttgtgatgtaattgacgagactatggatttaaatattgttatgtgattgtgtatgagatgttttatgtgaaaatatgttgtgctatatagtattgatatatttgttatgttgtggaatatggtgtaaaataaaaataaacaacatttgtaatgctggtcaaattaacttcctagaggccaactgggctgtaggaagttagccagctaactttctaggggctatagtcagccataggaagttagtcgtaggaagttagtcagctaacagcgtgaagctactaacttccgagaacctaccaacttccgag

SEQ ID NO: 40652 - DNA, 1643 bp, Zea Mays
ccaggctcgagcaaagcagagcgacagccagacaggcacaagttgctgaactaaccgaggtggactgggcaagcgagcgagatggagtggacgacggtggactggtggagacgggggacggtgcgaagctgagtgtgcggttgttcaagccccccgcgtccggaaagaagatggagccaggggaggtgtcagggatcacaagagataatggagtcagtcagcgcctcgctacttcgctagacatcgctaacaggaggacgtgggcacgtggcagtggtgctggtgcacctctataccatcctcagcggcgtgcatatggcctgctgcgggggaacgcggcgtcgcgcggcggagatacaccgccatcaccttcgacatacgcggcgctccacggggcgtgcgtcggtcacgggctccaccgagggccggggacgtcgtcgccgtctgcggatgtgtcgcagagaacatcaggccgcgtgacatcctccgcgtcggatcctcatctggggcaccaattgtcggacctgcagttgatatacagtgtgtttggttagaggcatccaatggtccagagtcatccgaacctaaaacagcgtttggttaccgtcacggattcatctcatccatcatccactcattccgatctaaaactaaaatctagaagctgcccattcctcgtaaaacagacggaccaactcattcctcccatccgaacctgcaaggagtgagtccatactggatcacctggttcccaacaaggttattccactaaccaaacatactaatagtggatgacatgattggttacgtaagcgttgggtacccgtttagcctttagtcctcctattcggaaggcatcatgatggtatactcaagtatgaacctggacgggttgatgatacacaactcttccagacatttcaaatttcccaggcaagatgttcatcaactcatgcctgtaagcggtcactaatgtcttctcatgatttgttcatcccattgtctactgaatttatgttgagcagaggctgtcaaccaggatctggtttgctgaaatctggctttcgtaattggtccttctgtaaacatgtccgtcccttgcctagaccatttccccccctctgcctgtcggcagatggagcgctgatgaaaaaacgcagtgccttcttcatgggagtggtccaaatctgtctcgctttaccttgcgaaatctgctgctcaggctcagcgtaatctggcatccagctgatgagacgcacatgcatgcagacacgaagaaagtgatgggacacgcaggcttttgcttgctcgtcccatgtactgaatccctggtgcatgcagcggtcgtagtcgtcaactgtagtagaactaggggtgacattgactgtaaattttacactatataactccacggagttggcagctgtgaaaggtagaagacgaaactgttcggacaaggaaagatagggcatgaattcagattcagagtgaaggacacaaaaataataaaaagtgtcaggattcagtccaatttaatacacggccacttgccgcaaatagctgaagtcggctttgctttgtctaatctctataaaaacctggtgatacttttaagtcacagctagcaatattgtgacagtaac

SEQ ID NO: 40653 - DNA, 1755 bp, Zea Mays
aaagaagatggagccaggggaggtgtcagggatcacaagagataatggagtcagtcagcggtatgcggtgtcagagggacgaagatgtcatgcccaggcttcagcggcaagccggcaacgacgtaagaatgtgttaaatgggcttagatgggctatgtaatacattagctgggttcgacctgtatggaacgatatatgtgtctctctgtaaactgaggaggacatgggaaaacacataacagaaaacactacttctctacttcgactccttcctcgcttcctttcttacctcttctccacgaaatctgccattgctgctcgtttctcttctgcagcctcgctacttcgctagacatcgctaacaggaggacgtgggcacgtggcagtggtgctggtgcacctctataccatcctcagcggcgtgcatatggcctgctgcgggggaacgcggcgtcgcgcggcggagatacaccgccatcaccttcgacatacgcggcgctccacggggcgtgcgtcggtcacgggctccaccgagggccggggacgtcgtcgccgtctgcggatgtgtcgcagagaacatcaggccgcgtgacatcctccgcgtcggatcctcatctggggcaccaattgtcggacctgcagttgatatacagtgtgtttggttagaggcatccaatggtccagagtcatccgaacctaaaacagcgtttggttaccgtcacggattcatctcatccatcatccactcattccgatctaaaactaaaatctagaagctgcccattcctcgtaaaacagacggaccaactcattcctcccatccgaacctgcaaggagtgagtccatactggatcacctggttcccaacaaggttattccactaaccaaacatactaatagtggatgacatgattggttacgtaagcgttgggtacccgtttagcctttagtcctcctattcggaaggcatcatgatggtatactcaagtatgaacctggacgggttgatgatacacaactcttccagacatttcaaatttcccaggcaagatgttcatcaactcatgcctgtaagcggtcactaatgtcttctcatgatttgttcatcccattgtctactgaatttatgttgagcagaggctgtcaaccaggatctggtttgctgaaatctggctttcgtaattggtccttctgtaaacatgtccgtcccttgcctagaccatttccccccctctgcctgtcggcagatggagcgctgatgaaaaaacgcagtgccttcttcatgggagtggtccaaatctgtctcgctttaccttgcgaaatctgctgctcaggctcagcgtaatctggcatccagctgatgagacgcacatgcatgcagacacgaagaaagtgatgggacacgcaggcttttgcttgctcgtcccatgtactgaatccctggtgcatgcagcggtcgtagtcgtcaactgtagtagaactaggggtgacattgactgtaaattttacactatataactccacggagttggcagctgtgaaaggtagaagacgaaactgttcggacaaggaaagatagggcatgaattcagattcagagtgaaggacacaaaaataataaaaagtgtcaggattcagtccaatttaatacacggccacttgccgcaaatagctgaagtcggctttgctttgtctaatctctataaaaacctggtgatacttttaagtcacagctagcaatattgtgacagtaac

SEQ ID NO: 40654 - DNA, 1551 bp, Zea Mays
atggagccaggggaggtgtcagggatcacaagagataatggagtcagtcagcgcctcgctacttcgctagacatcgctaacaggaggacgtgggcacgtggcagtggtgctggtgcacctctataccatcctcagcggcgtgcatatggcctgctgcgggggaacgcggcgtcgcgcggcggagatacaccgccatcaccttcgacatacgcggcgctccacggggcgtgcgtcggtcacgggctccaccgagggccggggacgtcgtcgccgtctgcggatgtgtcgcagagaacatcaggccgcgtgacatcctccgcgtcggatcctcatctgcttcgctcttctgaagctgtgtttggtcaatttggatgtgcaaatgacaattctgttggtatactcattcgtgctatagggcaccaattgtcggacctgcagttgatatacagtgtgtttggttagaggcatccaatggtccagagtcatccgaacctaaaacagcgtttggttaccgtcacggattcatctcatccatcatccactcattccgatctaaaactaaaatctagaagctgcccattcctcgtaaaacagacggaccaactcattcctcccatccgaacctgcaaggagtgagtccatactggatcacctggttcccaacaaggttattccactaaccaaacatactaatagtggatgacatgattggttacgtaagcgttgggtacccgtttagcctttagtcctcctattcggaaggcatcatgatggtatactcaagtatgaacctggacgggttgatgatacacaactcttccagacatttcaaatttcccaggcaagatgttcatcaactcatgcctgtaagcggtcactaatgtcttctcatgatttgttcatcccattgtctactgaatttatgttgagcagaggctgtcaaccaggatctggtttgctgaaatctggctttcgtaattggtccttctgtaaacatgtccgtcccttgcctagaccatttccccccctctgcctgtcggcagatggagcgctgatgaaaaaacgcagtgccttcttcatgggagtggtccaaatctgtctcgctttaccttgcgaaatctgctgctcaggctcagcgtaatctggcatccagctgatgagacgcacatgcatgcagacacgaagaaagtgatgggacacgcaggcttttgcttgctcgtcccatgtactgaatccctggtgcatgcagcggtcgtagtcgtcaactgtagtagaactaggggtgacattgactgtaaattttacactatataactccacggagttggcagctgtgaaaggtagaagacgaaactgttcggacaaggaaagatagggcatgaattcagattcagagtgaaggacacaaaaataataaaaagtgtcaggattcagtccaatttaatacacggccacttgccgcaaatagctgaagtcggctttgctttgtctaatctctataaaaacctggtgatacttttaagtcacagctagcaatattgtgacagtaac

SEQ ID NO: 40655 - DNA, 1048 bp, Zea Mays
caacaagctatatatatttaaaatatcctggagctgaaccaaccacccatctctctcctctctaaacccaagccagtgtgctgccccagcacccagcagctattggagctcagccatccagaacaccagggcgctagctgttcgttgatagaaaccctcctgctgcttcccttcccttcctgctcacccacgtcccaatcttcgctgcggctttccgatctgcggtacttccggcaccgcgacctaaagctcgccaccgatccgctgggtcctcggcattcctttttctccagcaccggcaaagcttccatcttttcgccagcagacttgacaaacggagtgcatgacgctgcttggagtagacgcaagctctgtggaagaggaagagggagagggaagaagctaaccactgtcaggagccacgaagacaaaggtagcagcggcgaagaagtcgtgcctgcaaagaagaggaggggaaggccccaaaagcgcttcgccagtaagatcgatcaagcagatgttgaaaactttgtagaacaggtcgatgccgaccaagaagaagctgatgatgccaagctgaagaacagtgccgcagctggtggtaccaagagaggcaggccgctgaaagagggctccaatattgccgtagaagatactaattctactgttcgattaagcagtgatgaatcaacgaggaccaatgggttcaggcagattgggagccggcgaaaaaacaagccccggcgagcatcggaggcagggctagaatgcaagtgaaccgtccctgcatttttcagtacaaggtagcatccttttttttttttttgctacatccgtcatgtttggtagctcccaatgctggaaaaacaaaatgtaaactagcatgttctgattacatgcctcagtttttttttcattgacacaaagtgtatgaactgatggtacaccaacttgttcagctgctctagaccctggttctgtttgagctgcttgtagcagagatcttacctttcagtttaccatatagtgttcctgcagttttgattga

SEQ ID NO: 40656 - DNA, 549 bp, Zea Mays
taggcctccgcacgcacagtggctacaagcactacgacattaacaaggtgctcaaggcgctatgcaacgaggccggctaagtcgtcgagcccgacggcaccacctaccacaaggtggcgatgatggggtggtagaagagaacagatctactaggctagctgtagcttctcaatgcatgtatgatattttgatccaatcttctatggtaaaagataaaataacacttgggatctgtatgtgttattagcccctgtggtactctatttgtttccaggtctgcagagtttagtttctatagatatttgagttaagaggagactaagccatgaagtaaaagagatgcctagttttttccccttcaatatggtagccagcattgtatcatgtagaattttaatccaggacagaagtggttccatgtatatgggggaaaccaaaccacacaagaagttatcagctatgcttgttctactgttggtgtggcttctctatctcattaggtactgtcttctggacataacttatgatgtgattacactggattccttt

SEQ ID NO: 40657 - DNA, 1813 bp, Zea Mays
caacaccaattcccttctccggccataaattcccgaggagatgttgcatatttttcccaaactcctcaagcaatttccatttccaccacgaccactctcttcctcgcagcgcgtaccaacccgccgccgtctactgccactccgcctgctcatggcctcccctacgcaaggtgatgcccccctcgcggctccggctccggcggctgacgctacggacgcggccttcgccgccgcggccgcggtgccggatccaggcgcagagttcgggttccagcgtccggagctcgggaaggagaagctggtcgggacggtggggttccacgagcgccatgtgttcctctgttacaagggcccggatttgtggccgtcccacctcgaggcctctgagtctgaccgcctcccccgcctcctcgccgccgccatcaaggcccgaaagcccaatctgaagaagaccatcaaattgaccatctgtgaaggagaagatggcactgaatcatcaaatggagatgtgttgatctttccagatatgatcagatataaagggctgacccattttgacgtggacaactttgttgaagaagtgcttgtgaaggatattgactggcttcctagatctcctgagcctatgagtggttcctatatttttgtttgctcccatggaagcagggacaaaaggtgtggtgtttgtggacctgctttgattaaaaggttcaaggaagagataaatgaactgggacttgatgatcaggtggctgtcagtgcatgctcacacgtgggaggtcataagtatgcaggaaacgtcatcattttcagttctgatgccaagggagaagtgactggtcattggtatggttatgttgttcctgatgatgtgcctgttttgctgcataaacatattggacaaggagaagttgtggaccatctatggagatgggtttatctgtggagcagcagaagcgagctctcgagcttcggaacatggtaaatggtggcgaagaatcccttgaagaaaccagaacagatggtgcttctttcaaccctgcagcagctggtggatgctgccaaggcaatggtggcttcacctgctgccaaactgacctgccaaaggaaaaacaagacaagagcatcatagctgagcagaaccccaagagctctgacaaggagggtggtgctggcagcaagaagggggatacaaagacttgcccagtgcccatctggtttgagacctgggagagagctgacacatatgccgctcttgctgttgttgcagctgccgcagcggtgcttgtctccttcagaatctacaagaacctcaactgaagaacatgggagatcctggaagaggtgaccaaaacaagtataggtgaaacagcgtactgtgataaaagtctgggatgagaataaatttacctgtgcataatgctaggcttaggctatggctagcaaatcgttgtgcaaaatattgttgtgcattgtttacaaagtgatgtttgaaatagaagataacggcgatgaacaagccgttggagataaccttagaacctcaaagtagcttatctggagatggagacggtgttgaaaagatgttgctgccagtgttctcgtatgtgaactccttgtgaacctccactccactgcaatcgaagtttcgatgccttagctgctgtttatcataagcaaggcgatgggatcggcatcaccactaactttgatgatgttatcttttgtttgaattttggatgttctggagcatctagatgttaaaactatgtcaggttgattagaaaatagaataaaatagagagactaaaaa

SEQ ID NO: 40658 - DNA, 1707 bp, Zea Mays
atgttgcatatttttcccaaactcctcaagcaatttccatttccaccacgaccactctcttcctcgcagcgcgtaccaacccgccgccgtctactgccactccgcctgctcatggcctcccctacgcaaggtgatgcccccctcgcggctccggctccggcggctgacgctacggacgcggccttcgccgccgcggccgcggtgccggatccaggcgcagagttcgggttccagcgtccggagctcgggaaggagaagctggtcgggacggtggggttccacgagcgccatgtgttcctctgttacaagggcccggatttgtggccgtcccacctcgaggcctctgagtctgaccgcctcccccgcctcctcgccgccgccatcaaggcccgaaagcccaatctgaagaagaccatcaaattgaccatctgtgaaggagaagatggcactgaatcatcaaatggagatgtgttgatctttccagatatgatcagatataaagggctgacccattttgacgtggacaactttgttgaagaagtgcttgtgaaggatattgactggcttcctagatctcctgagcctatgagtggttcctatatttttgtttgctcccatggaagcagggacaaaaggtggctgtcagtgcatgctcacacgtgggaggtcataagtatgcaggaaacgtcatcattttcagttctgatgccaagggagaagtgactggtcattggtatggttatgttgttcctgatgatgtgcctgttttgctgcataaacatattggacaaggagaagttgtggaccatctatggaggggacagatgggtttatctgtggagcagcagaagcgagctctcgagcttcggaacatggtaaatggtggcgaagaatcccttgaagaaaccagaacagatggtgcttctttcaaccctgcagcagctggtggatgctgccaaggcaatggtggcttcacctgctgccaaactgacctgccaaaggaaaaacaagacaagagcatcatagctgagcagaaccccaagagctctgacaaggagggtggtgctggcagcaagaagggggatacaaagacttgcccagtgcccatctggtttgagacctgggagagagctgacacatatgccgctcttgctgttgttgcagctgccgcagcggtgcttgtctccttcagaatctacaagaacctcaactgaagaacatgggagatcctggaagaggtgaccaaaacaagtataggtgaaacagcgtactgtgataaaagtctgggatgagaataaatttacctgtgcataatgctaggcttaggctatggctagcaaatcgttgtgcaaaatattgttgtgcattgtttacaaagtgatgtttgaaatagaagataacggcgatgaacaagccgttggagataaccttagaacctcaaagtagcttatctggagatggagacggtgttgaaaagatgttgctgccagtgttctcgtatgtgaactccttgtgaacctccactccactgcaatcgaagtttcgatgccttagctgctgtttatcataagcaaggcgatgggatcggcatcaccactaactttgatgatgttatcttttgtttgaattttggatgttctggagcatctagatgttaaaactatgtcaggttgattagaaaatagaataaaatagagagactaaaaa

SEQ ID NO: 40659 - DNA, 3245 bp, Zea Mays
caacaattcaactgggccggcgtcgctggctcgctgcatccccccttccgctgaaacaacaatcgtccgctgcattcctcatttcctccgcgtgggttctgtcacttctgtgacttctgtctgcgtctcgctctccggcgactggtgggccgccgccaccctaagccagttgcggaggtttacattggtctcttcgccggcgacgagcacccaccaggagtcttgacaagtttttccaatggaccaagtaccgaatggaaggcataaggtttcttttgcgaagccaagagtagttgtgctttcagattctgactctgactctgaaggttttgtagaagagctaactcctgttcactcaaagtcaaacgggaaggcttcatctgcgagcctaaaaactggtggaaaggcttcagccctttctaaaggtgaggcaagcaaaggaaaagcatacagtagtgacaaaggtggaaagggttcttcatcacatgcagtgcctaccaagtctgatgcagaactaaagctagagcttgatatccctccaaattctagaatgctaatgaattgtgaagcagctgaactattgcaagaaattcacgagcacatggccatactatcagaggaccccaagatcaaaattcctgagtcatttgacaaagcttttcagtattcaaaagatggaaatcatttcaccactgcaagctctgtgaaacaagccattgaacctcttaaaaaatgtggggtcagtgatggagagatatgcatgatagcaaacattgggcctgagaccgttgaagaggtttacgcactagtgccatctctcaaggctaataggtcagctatcgaaggttcagtcaccgagaatcggaagcagctgtcttgttgatcgaggagcgcggaatctgcaaactggcccttcagtgttttggatgtgctgcggaaacgtgttatgatgtgtatataaaaaacgtagcatgtgctgcatgaactcctgtaggatgtctaactactgaagtgcagattcagcctcaactagtctactcgaactgacgaatactgtctgaacatgtggctactgcttgaacatgacatgttgccatctgttggattgtgcttctgtacgcctcaacttgtctgttgcacttccgacttccgagtctgtgagaagttctgcccgttaccattcgtgcatggttctaggtttcagaagtgagtggtaggaccgtcaccggtgtcgtaccttaatgttctgcattctaattgaaaaccatttgtgaaggctacttgattatagcatgattcgttaaactgtaaccggaaccagcgaattacaccacctgaagtccagaaaggagcaaccagcatgcaaagctgtttgtacgcgagatgcatgcaagggacggatagacagtataataacaaccggaaattcacgtcgatcagctagtcactgcctttgcagggtaatcgaacggcagtggctgcacgtcgtcactgagcgaactggcgtgccggaaaccgtacgccctcagcacctggtcgtcggcgaagttgagcgcgcggcgcatgccctggtcgcagctgtccccggagtagtgctcgttgcgctgcccactgcacggctgacaccccgtgaagtgcgtcacgaacgggcggcgccacccgtgcaccccggtctccgccagcccggccccgcccagggcggcgttccttgccaccgcgtactccgcgtgctccctctccgcgtgccgcctccgcagcgcggcagctcccggccgccgctccatcgcctcgtacctctccgtcatgttggcgagccgccccacgatctccatccagtagccctcgaagtagtagccgctctccaggaacaccttgtcccgccaccggctgccctcctgcagcagcatgtacacgagcgcggactggtcgtccgactcgtcgaacaccttgtccttgaacgtggacttgagcacggcgccccagtgctggtagtccggggagtcgggacccatggcggcccacgcgtccatgaagtcgagcgaccactggcagttccggatgaggaacacgccggcgttgaggctggtccaggagctggcctcgaacacgaggctcggccagccgtggacgacgaggttgtgggcgcggtaccggcgcagcgggaggcggaagtccatgtcggtgagcacggcgtcggagtcgacccaccacacccactccgcctccgggtgcgccaccatggcggcgcggatcaccggtatcttggcccagtaccggtccatcgacggccgcagcagcgccatgttgtacagcagctgcacgccgtggagacggcagtagtcggccttgttcttgagcagccgcatcagcgtgtggtctccgcccggggaccggcacggcgtcggctgcgagccggacaccatgaggacgcgccccttctcgccaccgccggcgaactccgggtgcgcgcgcagccacccggcgcgcttctcgtcccaccccgtgatgggccggtccacggtgtacgccagcgccgggtcgtcgtagaacgtgtgggcggcggcaccaccaccaccgccggcggcgcccacggatgatgagccagagccagagccagaggacgggactgctccgtcgccgtagtagccctccggctgagcgaacgggttggcgaacgcgagcagcgccacggtggccaccacggcacccgcggcgaagaggagcgcgtctccgagccacgacggcttcgcggtcgcagcgcgtggcggcatcgtgtgctctcggctctcgctgccgggatgcactacggctctacggcagtatcgtccctgtcacgctcacgccacgtacaatactgacgccccgatgcgtgcggggacggtgtatgtgtaaagccgagccgtcccactttcggcggcgagaacgcgtacgccaaagaccctccgccggtgccagccttgccgcccccgtccgtctgcgtggcgaggggagggagaggccaaacggggagggcagcggtggttgggtagcggcatgcgtccaaacgggactctcgtgccgtcatgcatgcgggcgaaggagaaacgcacgcatgcgtagcgtctgccttgcaggccttggagccatcggcagggtagatcgctggatggcagctggccgcggcgccggcaccggatcggaggcggcccccgggccgggttggactgttgggtcttcctcttgcggactgactggtggtgaagatc

SEQ ID NO: 40660 - DNA, 3171 bp, Zea Mays
cgctgcatccccccttccgctgaaacaacaatcgtccgctgcattcctcatttcctccgcgtgggttctgtcacttctgtgacttctgtctgcgtctcgctctccggcgactggtgggccgccgccaccctaagccagttgcggaggtttacattggtctcttcgccggcgacgagcacccaccaggttttgtagaagagctaactcctgttcactcaaagtcaaacgggaaggcttcatctgcgagcctaaaaactggtggaaaggcttcagccctttctaaaggtgaggcaagcaaaggaaaagcatacagtagtgacaaaggtggaaagggttcttcatcacatgcagtgcctaccaagtctgatgcagaactaaagctagagcttgatatccctccaaattctagaatgctaatgaattgtgaagcagctgaactattgcaagaaattcacgagcacatggccatactatcagaggaccccaagatcaaaattcctgagtcatttgacaaagcttttcagtattcaaaagatggaaatcatttcaccactgcaagctctgtgaaacaagccattgaacctcttaaaaaatgtggggtcagtgatggagagatatgcatgatagcaaacattgggcctgagaccgttgaagaggtttacgcactagtgccatctctcaaggctaataggtcagctatcgaaggttcagtcaccgaggttcttaccgccctcgcaaacataaaagctgctaagtgaatctccaatggaactagaccgacaataaatcggaagcagctgtcttgttgatcgaggagcgcggaatctgcaaactggcccttcagtgttttggatgtgctgcggaaacgtgttatgatgtgtatataaaaaacgtagcatgtgctgcatgaactcctgtaggatgtctaactactgaagtgcagattcagcctcaactagtctactcgaactgacgaatactgtctgaacatgtggctactgcttgaacatgacatgttgccatctgttggattgtgcttctgtacgcctcaacttgtctgttgcacttccgacttccgagtctgtgagaagttctgcccgttaccattcgtgcatggttctaggtttcagaagtgagtggtaggaccgtcaccggtgtcgtaccttaatgttctgcattctaattgaaaaccatttgtgaaggctacttgattatagcatgattcgttaaactgtaaccggaaccagcgaattacaccacctgaagtccagaaaggagcaaccagcatgcaaagctgtttgtacgcgagatgcatgcaagggacggatagacagtataataacaaccggaaattcacgtcgatcagctagtcactgcctttgcagggtaatcgaacggcagtggctgcacgtcgtcactgagcgaactggcgtgccggaaaccgtacgccctcagcacctggtcgtcggcgaagttgagcgcgcggcgcatgccctggtcgcagctgtccccggagtagtgctcgttgcgctgcccactgcacggctgacaccccgtgaagtgcgtcacgaacgggcggcgccacccgtgcaccccggtctccgccagcccggccccgcccagggcggcgttccttgccaccgcgtactccgcgtgctccctctccgcgtgccgcctccgcagcgcggcagctcccggccgccgctccatcgcctcgtacctctccgtcatgttggcgagccgccccacgatctccatccagtagccctcgaagtagtagccgctctccaggaacaccttgtcccgccaccggctgccctcctgcagcagcatgtacacgagcgcggactggtcgtccgactcgtcgaacaccttgtccttgaacgtggacttgagcacggcgccccagtgctggtagtccggggagtcgggacccatggcggcccacgcgtccatgaagtcgagcgaccactggcagttccggatgaggaacacgccggcgttgaggctggtccaggagctggcctcgaacacgaggctcggccagccgtggacgacgaggttgtgggcgcggtaccggcgcagcgggaggcggaagtccatgtcggtgagcacggcgtcggagtcgacccaccacacccactccgcctccgggtgcgccaccatggcggcgcggatcaccggtatcttggcccagtaccggtccatcgacggccgcagcagcgccatgttgtacagcagctgcacgccgtggagacggcagtagtcggccttgttcttgagcagccgcatcagcgtgtggtctccgcccggggaccggcacggcgtcggctgcgagccggacaccatgaggacgcgccccttctcgccaccgccggcgaactccgggtgcgcgcgcagccacccggcgcgcttctcgtcccaccccgtgatgggccggtccacggtgtacgccagcgccgggtcgtcgtagaacgtgtgggcggcggcaccaccaccaccgccggcggcgcccacggatgatgagccagagccagagccagaggacgggactgctccgtcgccgtagtagccctccggctgagcgaacgggttggcgaacgcgagcagcgccacggtggccaccacggcacccgcggcgaagaggagcgcgtctccgagccacgacggcttcgcggtcgcagcgcgtggcggcatcgtgtgctctcggctctcgctgccgggatgcactacggctctacggcagtatcgtccctgtcacgctcacgccacgtacaatactgacgccccgatgcgtgcggggacggtgtatgtgtaaagccgagccgtcccactttcggcggcgagaacgcgtacgccaaagaccctccgccggtgccagccttgccgcccccgtccgtctgcgtggcgaggggagggagaggccaaacggggagggcagcggtggttgggtagcggcatgcgtccaaacgggactctcgtgccgtcatgcatgcgggcgaaggagaaacgcacgcatgcgtagcgtctgccttgcaggccttggagccatcggcagggtagatcgctggatggcagctggccgcggcgccggcaccggatcggaggcggcccccgggccgggttggactgttgggtcttcctcttgcggactgactggtggtgaagatc

SEQ ID NO: 40661 - DNA, 3704 bp, Zea Mays
cgctgcatccccccttccgctgaaacaacaatcgtccgctgcattcctcatttcctccgcgtgggttctgtcacttctgtgacttctgtctgcgtctcgctctccggcgactggtgggccgccgccaccctaagccagttgcggaggtttacattggtctcttcgccggcgacgagcacccaccaggtactcccacccctttctctgcccttctcttcatgttgtgcgaagctgagcactgaaaccctaacctaaagctatttgacaagcctcctagcttcgattttcttgcaagaattatcggtacacatccctttactggattaacccctggctttgtggaaagcgatgttttccctctgtatctgattaataattgtcacgtaaaaacaagtttttttttttttgcttcgtctggaggtttagtttccaaaggattgtaattgatagaataacttcatgtgtttagtctttaattctacacgaaaactaaactacaaaacaatgtatgtagtcctactttaaagtttcagatgtctcgtgtatatgttatgcctgatgggagttccataacttaaggcccctgtgttacactttttgatgtgcatatatgatgaattttgatttgaatgacgtaggcttccataagcagaacttacgcacatctttgtggtaggagtcttgacaagtttttccaatggaccaagtaccgaatggaaggcataaggtttcttttgcgaagccaagagtagttgtgctttcagattctgactctgactctgaaggttttgtagaagagctaactcctgttcactcaaagtcaaacgggaaggcttcatctgcgagcctaaaaactggtggaaaggcttcagccctttctaaaggtgaggcaagcaaaggaaaagcatacagtagtgacaaaggtggaaagggttcttcatcacatgcagtgcctaccaagtctgatgcagaactaaagctagagcttgatatccctccaaattctagaatgctaatgaattgtgaagcagctgaactattgcaagaaattcacgagcacatggccatactatcagaggaccccaagatcaaaattcctgagtcatttgacaaagcttttcagtattcaaaagatggaaatcatttcaccactgcaagctctgtgaaacaagccattgaacctcttaaaaaatgtggggtcagtgatggagagatatgcatgatagcaaacattgggcctgagaccgttgaagaggtttacgcactagtgccatctctcaaggctaataggtcagctatcgaaggttcagtcaccgagaatcggaagcagctgtcttgttgatcgaggagcgcggaatctgcaaactggcccttcagtgttttggatgtgctgcggaaacgtgttatgatgtgtatataaaaaacgtagcatgtgctgcatgaactcctgtaggatgtctaactactgaagtgcagattcagcctcaactagtctactcgaactgacgaatactgtctgaacatgtggctactgcttgaacatgacatgttgccatctgttggattgtgcttctgtacgcctcaacttgtctgttgcacttccgacttccgagtctgtgagaagttctgcccgttaccattcgtgcatggttctaggtttcagaagtgagtggtaggaccgtcaccggtgtcgtaccttaatgttctgcattctaattgaaaaccatttgtgaaggctacttgattatagcatgattcgttaaactgtaaccggaaccagcgaattacaccacctgaagtccagaaaggagcaaccagcatgcaaagctgtttgtacgcgagatgcatgcaagggacggatagacagtataataacaaccggaaattcacgtcgatcagctagtcactgcctttgcagggtaatcgaacggcagtggctgcacgtcgtcactgagcgaactggcgtgccggaaaccgtacgccctcagcacctggtcgtcggcgaagttgagcgcgcggcgcatgccctggtcgcagctgtccccggagtagtgctcgttgcgctgcccactgcacggctgacaccccgtgaagtgcgtcacgaacgggcggcgccacccgtgcaccccggtctccgccagcccggccccgcccagggcggcgttccttgccaccgcgtactccgcgtgctccctctccgcgtgccgcctccgcagcgcggcagctcccggccgccgctccatcgcctcgtacctctccgtcatgttggcgagccgccccacgatctccatccagtagccctcgaagtagtagccgctctccaggaacaccttgtcccgccaccggctgccctcctgcagcagcatgtacacgagcgcggactggtcgtccgactcgtcgaacaccttgtccttgaacgtggacttgagcacggcgccccagtgctggtagtccggggagtcgggacccatggcggcccacgcgtccatgaagtcgagcgaccactggcagttccggatgaggaacacgccggcgttgaggctggtccaggagctggcctcgaacacgaggctcggccagccgtggacgacgaggttgtgggcgcggtaccggcgcagcgggaggcggaagtccatgtcggtgagcacggcgtcggagtcgacccaccacacccactccgcctccgggtgcgccaccatggcggcgcggatcaccggtatcttggcccagtaccggtccatcgacggccgcagcagcgccatgttgtacagcagctgcacgccgtggagacggcagtagtcggccttgttcttgagcagccgcatcagcgtgtggtctccgcccggggaccggcacggcgtcggctgcgagccggacaccatgaggacgcgccccttctcgccaccgccggcgaactccgggtgcgcgcgcagccacccggcgcgcttctcgtcccaccccgtgatgggccggtccacggtgtacgccagcgccgggtcgtcgtagaacgtgtgggcggcggcaccaccaccaccgccggcggcgcccacggatgatgagccagagccagagccagaggacgggactgctccgtcgccgtagtagccctccggctgagcgaacgggttggcgaacgcgagcagcgccacggtggccaccacggcacccgcggcgaagaggagcgcgtctccgagccacgacggcttcgcggtcgcagcgcgtggcggcatcgtgtgctctcggctctcgctgccgggatgcactacggctctacggcagtatcgtccctgtcacgctcacgccacgtacaatactgacgccccgatgcgtgcggggacggtgtatgtgtaaagccgagccgtcccactttcggcggcgagaacgcgtacgccaaagaccctccgccggtgccagccttgccgcccccgtccgtctgcgtggcgaggggagggagaggccaaacggggagggcagcggtggttgggtagcggcatgcgtccaaacgggactctcgtgccgtcatgcatgcgggcgaaggagaaacgcacgcatgcgtagcgtctgccttgcaggccttggagccatcggcagggtagatcgctggatggcagctggccgcggcgccggcaccggatcggaggcggcccccgggccgggttggactgttgggtcttcctcttgcggactgactggtggtgaagatc

SEQ ID NO: 40662 - DNA, 3667 bp, Zea Mays
gttcagtccatctccactgtcaaaacactgagggtgacagacatggctttctttgctgaggatgtccatcgtttggcaagtgcgagcgtagatgggcggatatttgtgtggaggatagatgaagggcccgatgaggaaaacaaaccacaaattactggaaagattgaaatcgccatccagattgtaggtgaagctgaagcttaccatccaaggatatgttggcactcacataagcaagagattctttttgttgggattgggaactgtgtcttaagaatagacacaactaaagtgggtagaggaaaagactttactgtggaaggacctgtaaaatgtcatcttgaaaagcttattgatggtgtccgcttagttggtaagcatgatggtggtgtgactgatttgtccatatctcaatggatgagcacccgcctggcttccggatccaaggatggcacggttaaaatctgggatgatcgcaagcaagtgccattatctatttttaagccccatgatggtcaagcggtttattcagttgcttttcttacagcgcctgaacgaccaaatcatattaatctaataactgcgggtcctgttaaccgagaagttaaaatttgggcttctactaatgaagatggctggttgttgccaagtgattctgagacttggaagtgcactcagactttggaacttgttagctctctggaacctagagttgaagaggcatttttcaaccaggttgcagtgctgcatcaagctagcctgattttgcttgcgaatgctaaaaagaattctatttatgccgtgcatgttgagtatggcccagatcctgcctctactcgattagactatatagctgatttcacagttgcaatgcctattttaagcctaactggaacacacgaaagccaacctgatggtgaacaagttgttcaagtctattgtgttcaaactatggccattcagcaatatggtctagagttatcactctgttcgcctcctacagctgatagtactgggtttggtagagatcctgctatttcccgtgtttatgaggcagctctggaaatggcaggaacagagccatctataggaactagttgcacagactcttactctgtcactgctttgagtaaacaaccaaatgttgaccagtctgcagagcttgatctgaaaccatcagctccaccgcttgcatactcagaaggtgatagttccatgcctcttccatttacagctcttgcacctaagattgaggttcctggatcaggaccagcacctggaactcgtgatatagagcaatcagcttttaactatacgaatacgacaaacagaaacatggagcgtgatgctctgaaaagacaagataccccgatgcccattagaaaggatatcttaggaaaagatgagccaagagatggtcaaagtaatgttccaatgcttccaaatccccatatggtgtttcaagttggagggaatgctacacgcttggttactccatctgaaataatatcgggtactctctcatctgctgaaaacaatgatgtttctgaatctggtggggaaaatcgagatgtttccagcggaagttcttgggttgcagaagtggaaccaaagcatattgatgagagtaaaccagatcaaaacttgggacttgaagcagtcaaggaaactcagattgtttgtgagaacatggcgaaaacttccatggagcaaactgttgaaatgatcactaagcgctcagttacaactgataagcacagtgtggaagaatcacagtcatcatctgatcgaccagcatcagatcagacttgtggcactgatgaaaatgttctgaagaagtttgtggaaatgcctgagaaaattgattactctgcttccagggagcaaccatctttgtttacaaaagagaaagttttgcaccctcaaacatctggtcagccatctcctcctgtgagtgctttcaattcaactgagccacatgagcctttgagctctacatacctacctgtcagctccttcccagaagatgctgccacacaaggaatgctgcaacagctcttggatcaccagaaggacatggaaaagcagctgagtactgtggttcctgtgtccatcgcaaaggagggcaaaagacttgagacattattagggcgcactgtagagaaatcattcaaggctaatattgatgcgttttgggttcgtctccaggaggaaaacactaagcgtgaaaaggctgatagagagcgaatgcagcaactgtgtactctcattacaagctcaataaataaggacttaccttctaatctggagaagtcacttaagaaagaaatttcttcactcgggcctgttgttgctcgcgcaattacacctgttgttgagaagtccataacctctgttgtttctgattcagttcagaaaggggtgggtgacaaggtgtgcaatcagctggagaagtctattactggaaaacttgaagctacgcttgccaagcaaatccaaatgcagttccatacatctggaagacaggctcttcaggatgctttgcgtactagctttgaatcattgcttgttccagcatttgagcaagcatgcaagacaatgtttgagcaagtagatggtgcatttcaaaagggaatgtctgagcactccaatgctattcagcagcaagttgaggctgcacatactccgttagcgctaactctaaaagaaaccatcaattctgcttcatcaatcacccagagtttttcatcggagttacttgatggcaatcgcaagctattggcacttgttacttctgggaatgccaaggcacataataccagtgctttgcagcccattaatggtcctatgggtggtccccaagaggttgaggctccgttagatccgatgagagagctgagcagactgatatctgaacgcaagtttgacgaagcatttacaatggctcttcaaaggagtgatgtttccatagtgtcgtggctgtgctcccaggttgatttgcgggcactatgtgcaatggttccagtacctcttaaccagggggtccttctggccttattgcagcagctagcaattgacattcacaatgagacatcacggaaggttcaatggatgacagatgttgccatggcaatcaacccagcagaccagatcatcgcggtgcatgtgcgaccaatctttgagcaagtctacagccaattggcccaccaacggacactccccaccacgaccgcatcagatggcaccagtatccgtgtgatcatgcatgtaattaactcggttctgcttagctacaagtgattgcagctatgcaactgtgggaagtatggcctatttgatatcttgtatagagaaattttgaatggcaaatagaacacaacccacgagagtatacttggaagagggtggaggttactctctagtgtaaattttgcctttgaaattaaaatatttgtagtaattgggcatcctctaattttctaggtcatgttcatttgtcgtatgatcaatgggtcttgtatttcagtcataacttgtagctcggacagtttggaaccaacagcagctgcttggtgttggttggtccacacaaaattttgaagtcccatgtggacattgtttctggtggcaactgcaaaattggtgttattctaatcgagtactcgat

SEQ ID NO: 40663 - DNA, 4475 bp, Zea Mays
cacaaattcaggtaaattttacaactcaatcacattgtataaaagtgttattttttcttaatttcgtttcaaacattttatacttactgtgtattatatattaacttatacataatatttatgtatatttaaaatcttagatacgaatttgatatcgcgcatagtatgtgaaaaaaccaataaaaaatgaccataacggtagggtgcaacgcgaaatgacaagcacctccactccaactgaatttacccccttccacggcacctccagtccacttcgtcttcctctcttccccagttcagatctactccattgccaccttcctctcccggccgcttctcatgacgtctccgagcgaaaaccctaaccctaatcctaatacaccatttgagatcgggaagcttttcaggccaacgaatcccatgcccaacgccacccccaaccccatcttccccggcgtcgctggaggcccggcgccatccggcccctactcctaccctccggtgaccccgcccttccaccgcggaccctacatccactacccgcaggacccccacgccatgacccgcccagttgtctccttccccatgccaaacccaaacctcaaccccaacccgaacgctaaccccaacgccgtcgccccgggccccaaccccggcgcgcgcctcatgcagctgctcgggaactccgggccgacacaattcgagaccgccgtctccatgcccccgcccacatcggaattcgcacaactgcagttgctcccagcgatgccatccgcgccgccggccaggatgctgagcagcaccagcagcaaggtgcccaggggggcggttacttggcaccggggaacgagcggtgcacgatgttgactcgaggctgcccggggaagcgcagccaccgcagctggaggtaacaccgattaccaagtacacatcggatcccgggctcgtgctgggcagacagatcgctgtgaaccggacgtacatcgtgtatggcctcaagctcggtaacatccgtgtgctgaacatcaacaccgcactccgttcactcctccgtggtcacacacagagggtgacagacatggctttctttgctgaggatgtccatcgtttggcaagtgcgagcgtagatgggcggatatttgtgtggaggatagatgaagggcccgatgaggaaaacaaaccacaaattactggaaagattgaaatcgccatccagattgtaggtgaagctgaagcttaccatccaaggatatgttggcactcacataagcaagagattctttttgttgggattgggaactgtgtcttaagaatagacacaactaaagtgggtagaggaaaagactttactgtggaaggacctgtaaaatgtcatcttgaaaagcttattgatggtgtccgcttagttggtaagcatgatggtggtgtgactgatttgtccatatctcaatggatgagcacccgcctggcttccggatccaaggatggcacggttaaaatctgggatgatcgcaagcaagtgccattatctatttttaagccccatgatggtcaagcggtttattcagttgcttttcttacagcgcctgaacgaccaaatcatattaatctaataactgcgggtcctgttaaccgagaagttaaaatttgggcttctactaatgaagatggctggttgttgccaagtgattctgagacttggaagtgcactcagactttggaacttgttagctctctggaacctagagttgaagaggcatttttcaaccaggttgcagtgctgcatcaagctagcctgattttgcttgcgaatgctaaaaagaattctatttatgccgtgcatgttgagtatggcccagatcctgcctctactcgattagactatatagctgatttcacagttgcaatgcctattttaagcctaactggaacacacgaaagccaacctgatggtgaacaagttgttcaagtctattgtgttcaaactatggccattcagcaatatggtctagagttatcactctgttcgcctcctacagctgatagtactgggtttggtagagatcctgctatttcccgtgtttatgaggcagctctggaaatggcaggaacagagccatctataggaactagttgcacagactcttactctgtcactgctttgagtaaacaaccaaatgttgaccagtctgcagctcttgcacctaagattgaggttcctggatcaggaccagcacctggaactcgtgatatagagcaatcagcttttaactatacgaatacgacaaacagaaacatggagcgtgatgctctgaaaagacaagataccccgatgcccattagaaaggatatcttaggaaaagatgagccaagagatggtcaaagtaatgttccaatgcttccaaatccccatatggtgtttcaagttggagggaatgctacacgcttggttactccatctgaaataatatcgggtactctctcatctgctgaaaacaatgatgtttctgaatctggtggggaaaatcgagatgtttccagcggaagttcttgggttgcagaagtggaaccaaagcatattgatgagagtaaaccagatcaaaacttgggacttgaagcagtcaaggaaactcagattgtttgtgagaacatggcgaaaacttccatggagcaaactgttgaaatgatcactaagcgctcagttacaactgataagcacagtgtggaagaatcacagtcatcatctgatcgaccagcatcagatcagacttgtggcactgatgaaaatgttctgaagaagtttgtggaaatgcctgagaaaattgattactctgcttccagggagcaaccatctttgtttacaaaagagaaagttttgcaccctcaaacatctggtcagccatctcctcctgtgagtgctttcaattcaactgagccacatgagcctttgagctctacatacctacctgtcagctccttcccagaagatgctgccacacaaggaatgctgcaacaggaggaaaacactaagcgtgaaaaggctgatagagagcgaatgcagcaactgtgtactctcattacaagctcaataaataaggacttaccttctaatctggagaagtcacttaagaaagaaatttcttcactcgggcctgttgttgctcgcgcaattacacctgttgttgagaagtccataacctctgttgtttctgattcagttcagaaaggggtgggtgacaaggtgtgcaatcagctggagaagtctattactggaaaacttgaagctacgcttgccaagcaaatccaaatgcagttccatacatctggaagacaggctcttcaggatgctttgcgtactagctttgaatcattgcttgttccagcatttgagcaagcatgcaagacaatgtttgagcaagtagatggtgcatttcaaaagggaatgtctgagcactccaatgctattcagcagcaagttgaggctgcacatactccgttagcgctaactctaaaagaaaccatcaattctgcttcatcaatcacccagagtttttcatcggagttacttgatggcaatcgcaagctattggcacttgttacttctgggaatgccaaggcacataataccagtgctttgcagcccattaatggtcctatgggtggtccccaagaggttgaggctccgttagatccgatgagagagctgagcagactgatatctgaacgcaagtttgacgaagcatttacaatggctcttcaaaggagtgatgtttccatagtgtcgtggctgtgctcccaggttgatttgcgggcactatgtgcaatggttccagtacctcttaaccagggggtccttctggccttattgcagcagctagcaattgacattcacaatgagacatcacggaaggttcaatggatgacagatgttgccatggcaatcaacccagcagaccagatcatcgcggtgcatgtgcgaccaatctttgagcaagtctacagccaattggcccaccaacggacactccccaccacgaccgcatcagatggcaccagtatccgtgtgatcatgcatgtaattaactcggttctgcttagctacaagtgattgcagctatgcaactgtgggaagtatggcctatttgatatcttgtatagagaaattttgaatggcaaatagaacacaacccacgagagtatacttggaagagggtggaggttactctctagtgtaaattttgcctttgaaattaaaatatttgtagtaattgggcatcctctaattttctaggtcatgttcatttgtcgtatgatcaatgggtcttgtatttcagtcataacttgtagctcggacagtttggaaccaacagcagctgcttggtgttggttggtccacacaaaattttgaagtcccatgtggacattgtttctggtggcaactgcaaaattggtgttattctaatcgagtactcgat

SEQ ID NO: 40664 - DNA, 4628 bp, Zea Mays
cacaaattcaggtaaattttacaactcaatcacattgtataaaagtgttattttttcttaatttcgtttcaaacattttatacttactgtgtattatatattaacttatacataatatttatgtatatttaaaatcttagatacgaatttgatatcgcgcatagtatgtgaaaaaaccaataaaaaatgaccataacggtagggtgcaacgcgaaatgacaagcacctccactccaactgaatttacccccttccacggcacctccagtccacttcgtcttcctctcttccccagttcagatctactccattgccaccttcctctcccggccgcttctcatgacgtctccgagcgaaaaccctaaccctaatcctaatacaccatttgagatcgggaagcttttcaggccaacgaatcccatgcccaacgccacccccaaccccatcttccccggcgtcgctggaggcccggcgccatccggcccctactcctaccctccggtgaccccgcccttccaccgcggaccctacatccactacccgcaggacccccacgccatgacccgcccagttgtctccttccccatgccaaacccaaacctcaaccccaacccgaacgctaaccccaacgccgtcgccccgggccccaaccccggcgcgcgcctcatgcagctgctcgggaactccgggccgacacaattcgagaccgccgtctccatgcccccgcccacatcggaattcgcacaactgcagttgctcccagcgatgccatccgcgccgccggccaggatgctgagcagcaccagcagcaaggtgcccaggggggcggttacttggcaccggggaacgagcggtgcacgatgttgactcgaggctgcccggggaagcgcagccaccgcagctggaggtaacaccgattaccaagtacacatcggatcccgggctcgtgctgggcagacagatcgctgtgaaccggacgtacatcgtgtatggcctcaagctcggtaacatccgtgtgctgaacatcaacaccgcactccgttcactcctccgtggtcacacacagagggtgacagacatggctttctttgctgaggatgtccatcgtttggcaagtgcgagcgtagatgggcggatatttgtgtggaggatagatgaagggcccgatgaggaaaacaaaccacaaattactggaaagattgaaatcgccatccagattgtaggtgaagctgaagcttaccatccaaggatatgttggcactcacataagcaagagattctttttgttgggattgggaactgtgtcttaagaatagacacaactaaagtgggtagaggaaaagactttactgtggaaggacctgtaaaatgtcatcttgaaaagcttattgatggtgtccgcttagttggtaagcatgatggtggtgtgactgatttgtccatatctcaatggatgagcacccgcctggcttccggatccaaggatggcacggttaaaatctgggatgatcgcaagcaagtgccattatctatttttaagccccatgatggtcaagcggtttattcagttgcttttcttacagcgcctgaacgaccaaatcatattaatctaataactgcgggtcctgttaaccgagaagttaaaatttgggcttctactaatgaagatggctggttgttgccaagtgattctgagacttggaagtgcactcagactttggaacttgttagctctctggaacctagagttgaagaggcatttttcaaccaggttgcagtgctgcatcaagctagcctgattttgcttgcgaatgctaaaaagaattctatttatgccgtgcatgttgagtatggcccagatcctgcctctactcgattagactatatagctgatttcacagttgcaatgcctattttaagcctaactggaacacacgaaagccaacctgatggtgaacaagttgttcaagtctattgtgttcaaactatggccattcagcaatatggtctagagttatcactctgttcgcctcctacagctgatagtactgggtttggtagagatcctgctatttcccgtgtttatgaggcagctctggaaatggcaggaacagagccatctataggaactagttgcacagactcttactctgtcactgctttgagtaaacaaccaaatgttgaccagtctgcagctcttgcacctaagattgaggttcctggatcaggaccagcacctggaactcgtgatatagagcaatcagcttttaactatacgaatacgacaaacagaaacatggagcgtgatgctctgaaaagacaagataccccgatgcccattagaaaggatatcttaggaaaagatgagccaagagatggtcaaagtaatgttccaatgcttccaaatccccatatggtgtttcaagttggagggaatgctacacgcttggttactccatctgaaataatatcgggtactctctcatctgctgaaaacaatgatgtttctgaatctggtggggaaaatcgagatgtttccagcggaagttcttgggttgcagaagtggaaccaaagcatattgatgagagtaaaccagatcaaaacttgggacttgaagcagtcaaggaaactcagattgtttgtgagaacatggcgaaaacttccatggagcaaactgttgaaatgatcactaagcgctcagttacaactgataagcacagtgtggaagaatcacagtcatcatctgatcgaccagcatcagatcagacttgtggcactgatgaaaatgttctgaagaagtttgtggaaatgcctgagaaaattgattactctgcttccagggagcaaccatctttgtttacaaaagagaaagttttgcaccctcaaacatctggtcagccatctcctcctgtgagtgctttcaattcaactgagccacatgagcctttgagctctacatacctacctgtcagctccttcccagaagatgctgccacacaaggaatgctgcaacagctcttggatcaccagaaggacatggaaaagcagctgagtactgtggttcctgtgtccatcgcaaaggagggcaaaagacttgagacattattagggcgcactgtagagaaatcattcaaggctaatattgatgcgttttgggttcgtctccaggaggaaaacactaagcgtgaaaaggctgatagagagcgaatgcagcaactgtgtactctcattacaagctcaataaataaggacttaccttctaatctggagaagtcacttaagaaagaaatttcttcactcgggcctgttgttgctcgcgcaattacacctgttgttgagaagtccataacctctgttgtttctgattcagttcagaaaggggtgggtgacaaggtgtgcaatcagctggagaagtctattactggaaaacttgaagctacgcttgccaagcaaatccaaatgcagttccatacatctggaagacaggctcttcaggatgctttgcgtactagctttgaatcattgcttgttccagcatttgagcaagcatgcaagacaatgtttgagcaagtagatggtgcatttcaaaagggaatgtctgagcactccaatgctattcagcagcaagttgaggctgcacatactccgttagcgctaactctaaaagaaaccatcaattctgcttcatcaatcacccagagtttttcatcggagttacttgatggcaatcgcaagctattggcacttgttacttctgggaatgccaaggcacataataccagtgctttgcagcccattaatggtcctatgggtggtccccaagaggttgaggctccgttagatccgatgagagagctgagcagactgatatctgaacgcaagtttgacgaagcatttacaatggctcttcaaaggagtgatgtttccatagtgtcgtggctgtgctcccaggttgatttgcgggcactatgtgcaatggttccagtacctcttaaccagggggtccttctggccttattgcagcagctagcaattgacattcacaatgagacatcacggaaggttcaatggatgacagatgttgccatggcaatcaacccagcagaccagatcatcgcggtgcatgtgcgaccaatctttgagcaagtctacagccaattggcccaccaacggacactccccaccacgaccgcatcagatggcaccagtatccgtgtgatcatgcatgtaattaactcggttctgcttagctacaagtgattgcagctatgcaactgtgggaagtatggcctatttgatatcttgtatagagaaattttgaatggcaaatagaacacaacccacgagagtatacttggaagagggtggaggttactctctagtgtaaattttgcctttgaaattaaaatatttgtagtaattgggcatcctctaattttctaggtcatgttcatttgtcgtatgatcaatgggtcttgtatttcagtcataacttgtagctcggacagtttggaaccaacagcagctgcttggtgttggttggtccacacaaaattttgaagtcccatgtggacattgtttctggtggcaactgcaaaattggtgttattctaatcgagtactcgat

SEQ ID NO: 40665 - DNA, 4758 bp, Zea Mays
cacaaattcaggtaaattttacaactcaatcacattgtataaaagtgttattttttcttaatttcgtttcaaacattttatacttactgtgtattatatattaacttatacataatatttatgtatatttaaaatcttagatacgaatttgatatcgcgcatagtatgtgaaaaaaccaataaaaaatgaccataacggtagggtgcaacgcgaaatgacaagcacctccactccaactgaatttacccccttccacggcacctccagtccacttcgtcttcctctcttccccagttcagatctactccattgccaccttcctctcccggccgcttctcatgacgtctccgagcgaaaaccctaaccctaatcctaatacaccatttgagatcgggaagcttttcaggccaacgaatcccatgcccaacgccacccccaaccccatcttccccggcgtcgctggaggcccggcgccatccggcccctactcctaccctccggtgaccccgcccttccaccgcggaccctacatccactacccgcaggacccccacgccatgacccgcccagttgtctccttccccatgccaaacccaaacctcaaccccaacccgaacgctaaccccaacgccgtcgccccgggccccaaccccggcgcgcgcctcatgcagctgctcgggaactccgggccgacacaattcgagaccgccgtctccatgcccccgcccacatcggaattcgcacaactgcagttgctcccagcgatgccatccgcgccgccggccaggatgctgagcagcaccagcagcaaggtgcccaggggggcggttacttggcaccggggaacgagcggtgcacgatgttgactcgaggctgcccggggaagcgcagccaccgcagctggaggtaacaccgattaccaagtacacatcggatcccgggctcgtgctgggcagacagatcgctgtgaaccggacgtacatcgtgtatggcctcaagctcggtaacatccgtgtgctgaacatcaacaccgcactccgttcactcctccgtggtcacacacagagggtgacagacatggctttctttgctgaggatgtccatcgtttggcaagtgcgagcgtagatgggcggatatttgtgtggaggatagatgaagggcccgatgaggaaaacaaaccacaaattactggaaagattgaaatcgccatccagattgtaggtgaagctgaagcttaccatccaaggatatgttggcactcacataagcaagagattctttttgttgggattgggaactgtgtcttaagaatagacacaactaaagtgggtagaggaaaagactttactgtggaaggacctgtaaaatgtcatcttgaaaagcttattgatggtgtccgcttagttggtaagcatgatggtggtgtgactgatttgtccatatctcaatggatgagcacccgcctggcttccggatccaaggatggcacggttaaaatctgggatgatcgcaagcaagtgccattatctatttttaagccccatgatggtcaagcggtttattcagttgcttttcttacagcgcctgaacgaccaaatcatattaatctaataactgcgggtcctgttaaccgagaagttaaaatttgggcttctactaatgaagatggctggttgttgccaagtgattctgagacttggaagtgcactcagactttggaacttgttagctctctggaacctagagttgaagaggcatttttcaaccaggttgcagtgctgcatcaagctagcctgattttgcttgcgaatgctaaaaagaattctatttatgccgtgcatgttgagtatggcccagatcctgcctctactcgattagactatatagctgatttcacagttgcaatgcctattttaagcctaactggaacacacgaaagccaacctgatggtgaacaagttgttcaagtctattgtgttcaaactatggccattcagcaatatggtctagagttatcactctgttcgcctcctacagctgatagtactgggtttggtagagatcctgctatttcccgtgtttatgaggcagctctggaaatggcaggaacagagccatctataggaactagttgcacagactcttactctgtcactgctttgagtaaacaaccaaatgttgaccagtctgcagagcttgatctgaaaccatcagctccaccgcttgcatactcagaaggtgatagttccatgcctcttccatttacagctcttgcacctaagattgaggttcctggatcaggaccagcacctggaactcgtgatatagagcaatcagcttttaactatacgaatacgacaaacagaaacatggagcgtgatgctctgaaaagacaagataccccgatgcccattagaaaggatatcttaggaaaagatgagccaagagatggtcaaagtaatgttccaatgcttccaaatccccatatggtgtttcaagttggagggaatgctacacgcttggttactccatctgaaataatatcgggtactctctcatctgctgaaaacaatgatgtttctgaatctggtggggaaaatcgagatgtttccagcggaagttcttgggttgcagaagtggaaccaaagcatattgatgagagtaaaccagatcaaaacttgggacttgaagcagtcaaggaaactcagattgtttgtgagaacatggcgaaaacttccatggagcaaactgttgaaatgatcactaagcgctcagttacaactgataagcacagtgtggaagaatcacagtcatcatctgatcgaccagcatcagatcagacttgtggcactgatgaaaatgttctgaagaagtttgtggaaatgcctgagaaaattgattactctgcttccagggagcaaccatctttgtttacaaaagagaaagttttgcaccctcaaacatctggtcagccatctcctcctgtgagtgctttcaattcaactgagccacatgagcctttgagctctacatacctacctgtcagctccttcccagaagatgctgccacacaaggaatgctgcaacagaaattgttaaacattttagtgcaacattgttcgctgcagcttgcagccacagcagctcttggatcaccagaaggacatggaaaagcagctgagtactgtggttcctgtgtccatcgcaaaggagggcaaaagacttgagacattattagggcgcactgtagagaaatcattcaaggctaatattgatgcgttttgggttcgtctccaggaggaaaacactaagcgtgaaaaggctgatagagagcgaatgcagcaactgtgtactctcattacaagctcaataaataaggacttaccttctaatctggagaagtcacttaagaaagaaatttcttcactcgggcctgttgttgctcgcgcaattacacctgttgttgagaagtccataacctctgttgtttctgattcagttcagaaaggggtgggtgacaaggtgtgcaatcagctggagaagtctattactggaaaacttgaagctacgcttgccaagcaaatccaaatgcagttccatacatctggaagacaggctcttcaggatgctttgcgtactagctttgaatcattgcttgttccagcatttgagcaagcatgcaagacaatgtttgagcaagtagatggtgcatttcaaaagggaatgtctgagcactccaatgctattcagcagcaagttgaggctgcacatactccgttagcgctaactctaaaagaaaccatcaattctgcttcatcaatcacccagagtttttcatcggagttacttgatggcaatcgcaagctattggcacttgttacttctgggaatgccaaggcacataataccagtgctttgcagcccattaatggtcctatgggtggtccccaagaggttgaggctccgttagatccgatgagagagctgagcagactgatatctgaacgcaagtttgacgaagcatttacaatggctcttcaaaggagtgatgtttccatagtgtcgtggctgtgctcccaggttgatttgcgggcactatgtgcaatggttccagtacctcttaaccagggggtccttctggccttattgcagcagctagcaattgacattcacaatgagacatcacggaaggttcaatggatgacagatgttgccatggcaatcaacccagcagaccagatcatcgcggtgcatgtgcgaccaatctttgagcaagtctacagccaattggcccaccaacggacactccccaccacgaccgcatcagatggcaccagtatccgtgtgatcatgcatgtaattaactcggttctgcttagctacaagtgattgcagctatgcaactgtgggaagtatggcctatttgatatcttgtatagagaaattttgaatggcaaatagaacacaacccacgagagtatacttggaagagggtggaggttactctctagtgtaaattttgcctttgaaattaaaatatttgtagtaattgggcatcctctaattttctaggtcatgttcatttgtcgtatgatcaatgggtcttgtatttcagtcataacttgtagctcggacagtttggaaccaacagcagctgcttggtgttggttggtccacacaaaattttgaagtcccatgtggacattgtttctggtggcaactgcaaaattggtgttattctaatcgagtactcgat

SEQ ID NO: 40666 - DNA, 1627 bp, Zea Mays
atgtcaccaaggttgcaggttggctacagaaataggagaagaatagtatgtgagccccatataatcctccccacgtcgtcgtgctcgttttgcgcgtcaaccagcccgccccccaaccccacccagcgcgacgaagccggggggcgatcgctccagcgccgccgcgccagcgacctcaccccccgggagccgccggcggtacccccctccctatcacgcctcatcgaatcctcagatctaagttttttttggttttgtgagttatccaaagttggaccgcaaagatgagtactgctaatcactatcagcacatcaagtcaaccaagcctgttgtaggcaaagcaagaaaattgaaggatctcatgataaaaagtgataataggatatgcgctgactgtggtgcacctgatcccaaatgggcatctactaatattggagtgtttctttgcttaaaatgtggagatgttcatagggcacttggacctgacatttcaaagtgatatcgactccatggttgaggttggtggaaactcatatgcaaattcaatttatgaggcttttcttccaaaagatcacccaaaacccaaaccagattcaacgatggaatataggacgaaatttataagagctaagtatgagacacaagattttttgaagccaagtttgcgcatttcatcaagatcatcttttaaatctaccaattctgtgaagagtgtagatagcaatttctctagcacttcaaggaaggatatctctgaagatacaagagaatttgttggagagctgaatattacagtcgtgaaaggtactaacttggccgttagagacatgctaacaagtgatccatatgttgttttaacactcggagggcagaaagctcaatcgacagttaaaaaaagtgatcttaatccggtatggaatgaaatgcttaagatttctgttcctcgaaattacggacctctaaaacttgaagtgtatgaccatgatacgttctcagccgatgatatcatgggtgaagcagagatagatctccaaccaatgatcacagccgccatggcctttggagatacttcacgtcttggtgacatgcaaattgggcggtggttcacgaccaaagacaacgccctgatgaaagatagcacagtgaatgtcgttgcaggcaaggtaaaacaggaggtgcacttaaagctgcagaacgtagaatctggtgagctggagttagagctagaatgggttccgatcctctagactatgataactcccctgatccttttgtctaaaaaactatcctcaagatgcatcaaaattttcaagctgtccactttgatgatcttggacatttttgctggatggcttgaatttgttaaaaaaatgtcattgttaaatatcctggtgtaactgtcagctataatcacagcctttcattttcccccctttggttgtcatgccttgtaactactcgccgtctcttgattgttgttgtattgtcccattgaaaggacatgtgtattataagagatgggcaattatagctagtgaactctttatgctgattcctttttggcgcgcgctgcagtagctatcgtgttattggttttcccggagctttctctagccgtgtcttgtc

SEQ ID NO: 40667 - DNA, 2185 bp, Zea Mays
atgtcaccaaggttgcaggttggctacagaaataggagaagaatagtatgtgagccccatataatcctccccacgtcgtcgtgctcgttttgcgcgtcaaccagcccgccccccaaccccacccagcgcgacgaagccggggggcgatcgctccagcgccgccgcgccagcgacctcaccccccgggagccgccggcggtacccccctccctatcacgcctcatcgaatcctcagatctaagttttttttggttttgtgagttatccaaagttggaccgcaaagatgagtactgctaatcactatcagcacatcaagtcaaccaagcctgttgtaggcaaagcaagaaaattgaaggatctcatgataaaaagtgataataggatatgcgctgactgtggtgcacctgatcccaaatgggcatctactaatattggagtgtttctttgcttaaaatgtggagatgttcatagggcacttggacctgacatttcaaaggttttatctgtaactttggatgattggtctgacagtgatatcgactccatggttgaggttggtggaaactcatatgcaaattcaatttatgaggcttttcttccaaaagatcacccaaaacccaaaccagattcaacgatggaatataggacgaaatttataagagctaagtatgagacacaagattttttgaagccaagtttgcgcatttcatcaagatcatcttttaaatctaccaattctgtgaagagtgtagatagcaatttctctagcacttcaaggaaggatatctctgaagatacaagagaatttgttggagagctgaatattacagtcgtgaaaggtactaacttggccgttagagacatgctaacaagtgatccatatgttgttttaacactcggagggcagaaagctcaatcgacagttaaaaaaagtgatcttaatccggtatggaatgaaatgcttaagatttctgttcctcgaaattacggacctctaaaacttgtaagtttttatcattagaacctttaaattaatttctttatatccaaaggattctagttcaaagaagagtataatatgctaagtgtcatgaattatggcaaagttcttagggtgtttccttgaattcagtcacataatactccctacatcccaaaataactgtgcatctcacttttctggaagtcaaacttattaaagattaactaaatctgtttaaaatatttttaacatctttatcttctaatatatttattacgaaattaatctaaccatacttagtgtacatcataagtattagtatatttatgtatatatttagtcaaattttaaaaagtttgtcaaaggagtgcacagttattttggggtggagggagtaacagactaactggtagtatggaatgactcaaacacttaaacatacacataatgcttcaagaaaagggcagtgtgatgagaaagtagcgaagacaaaagctgctggccaatgcgacatgaaagtaatacacataatttcaatgtccaggaagtgtatgaccatgatacgttctcagccgatgatatcatgggtgaagcagagatagatctccaaccaatgatcacagccgccatggcctttggagatacttcacgtcttggtgacatgcaaattgggcggtggttcacgaccaaagacaacgccctgatgaaagatagcacagtgaatgtcgttgcaggcaaggtaaaacaggaggtgcacttaaagctgcagaacgtagaatctggtgagctggagttagagctagaatgggttccgatcctctagactatgataactcccctgatccttttgtctaaaaaactatcctcaagatgcatcaaaattttcaagctgtccactttgatgatcttggacatttttgctggatggcttgaatttgttaaaaaaatgtcattgttaaatatcctggtgtaactgtcagctataatcacagcctttcattttcccccctttggttgtcatgccttgtaactactcgccgtctcttgattgttgttgtattgtcccattgaaaggacatgtgtattataagagatgggcaattatagctagtgaactctttatgctgattcctttttggcgcgcgctgcagtagctatcgtgttattggttttcccggagctttctctagccgtgtcttgtc

SEQ ID NO: 40668 - DNA, 1720 bp, Zea Mays
agcttgatatccaggaatcacaaatatgttccagctccaacatcaattcttttgtacgcttcatttttcaacaaccagacttcaagttatatttggcttgatattcgctgggctagtgaaacctcatctgtagtgagggaccagcagctgtatagtgattcctgtatacattggagctatgttcttataaaataaaaagcttcagattttgttctcttatttgacatgccggttcgtttcatcatgataagaaaatgatcctcgactcctgctaatccctgtgttgtctgcagatctaagttttttttggttttgtgagttatccaaagttggaccgcaaagatgagtactgctaatcactatcagcacatcaagtcaaccaagcctgttgtaggcaaagcaagaaaattgaaggatctcatgataaaaagtgataataggatatgcgctgactgtggtgcacctgatcccaaatgggcatctactaatattggagtgtttctttgcttaaaatgtggagatgttcatagggcacttggacctgacatttcaaaggttttatctgtaactttggatgattggtctgacagtgatatcgactccatggttgaggttggtggaaactcatatgcaaattcaatttatgaggcttttcttccaaaagatcacccaaaacccaaaccagattcaacgatggaatataggacgaaatttataagagctaagtatgagacacaagattttttgaagccaagtttgcgcatttcatcaagatcatcttttaaatctaccaattctgtgaagagtgtagatagcaatttctctagcacttcaaggaaggatatctctgaagatacaagagaatttgttggagagctgaatattacagtcgtgaaaggtactaacttggccgttagagacatgctaacaagtgatccatatgttgttttaacactcggagggcagaaagctcaatcgacagttaaaaaaagtgatcttaatccggtatggaatgaaatgcttaagatttctgttcctcgaaattacggacctctaaaacttgaagtgtatgaccatgatacgttctcagccgatgatatcatgggtgaagcagagatagatctccaaccaatgatcacagccgccatggcctttggagatacttcacgtcttggtgacatgcaaattgggcggtggttcacgaccaaagacaacgccctgatgaaagatagcacagtgaatgtcgttgcaggcaaggtaaaacaggaggtgcacttaaagctgcagaacgtagaatctggtgagctggagttagagctagaatgggttccgatcctctagactatgataactcccctgatccttttgtctaaaaaactatcctcaagatgcatcaaaattttcaagctgtccactttgatgatcttggacatttttgctggatggcttgaatttgttaaaaaaatgtcattgttaaatatcctggtgtaactgtcagctataatcacagcctttcattttcccccctttggttgtcatgccttgtaactactcgccgtctcttgattgttgttgtattgtcccattgaaaggacatgtgtattataagagatgggcaattatagctagtgaactctttatgctgattcctttttggcgcgcgctgcagtagctatcgtgttattggttttcccggagctttctctagccgtgtcttgtc

SEQ ID NO: 40669 - DNA, 3308 bp, Zea Mays
caaccttcttggaccgcccctgcgctgctctttcttacccgagccgtgagccgagagcgcggcgatccagaagatccagtgttcgggctgccgtatgcaatgaatcagtgatcgggcagagtaacgcaaagagggagggcctgatcatttgagctgcttttgttgacaatgtcagagggtaatatatggataacatcgaaatatctgtcagtaatgatgagaggaggaataggacagatgccgatatctcggaggacgagccgaggcacaccaggatgcggtcgctgaggaagaaagccctgcatgcatcgtcaaggctgacacactcgctgaagaagagagggaagagaaaagtggactgcagagtgccaagaatagctatagaggatgtcagggatgctgaagaagagcaggctgtgagctcgtttcgggaggttttgtttgctaggggcttgttaccaatcaagcatgatggttaccatatgatgcttagatttttgaaagcgaggaagttcgattttggaaaagctgcacagatgtgggcagacatgctgcggtggagaaaggagtttggtacagacacaatttttgaagattttgaatttcatgagctagaggaggtcctgcagtattaccctcatggttaccatggggttgacaaggaaggaaggcctgtgtacattgagttgcttgggaaagttgaacccaacaaacttatgcaaattacgacagttgagcgctatattaagtatcatgtacaagagtttgagagagttttccgggagaaattccctgcatgctcaatttctgccaaaaggcatatagatactacaactacgatattggatgtccacggtgtgggctggaagaactttagcaagatcgcgagggatttggtgcgttgtatgcaaaaaatagatggtgactattatcctgagacattacatcaaatgtttattgtaaatgctggacctggtttcaagctgatatggagcactgttaagggacttcttgacccaaaaacgtcatctaaaatacacgttctaggaacaagataccaaagcagacttcttgaagctattgatgcaagccaattgccggattactttggtggttcatgcacatgttctaaccatggagggtgcctgaggtctaacaaaggtccctggagtgatccttcaataatgaagcttgtacatagcatggaattgttgaaggaagttgcgcacatatctgatatagaagaaacaattacaggctctgtgagattgcgtgctctcaaggctcagatgttgatgaccttggatcccctgtggctcctgaagatgttgaatatcctagtttggccccagttcgagaggaagtgagggaatcatggtctacaacgtacagtggttcgattggcatgtctcgtatggcggataaagttgtaggatccaacaggagatacaactctactggaaatgaaattaggcagttcaatacagaacaagattccctgacaaatgggggtttacctgcaccagcaggttggcgtgcccaaaatgatggtgaaggcaatgatgatgggttcttgaaatatatatcaagaagagtcattgctatatttcttaaagtactctcttttttgcggttcttcattcgtcgacgacaacacttggccaatgatcatccacatactgcaactgcacccagtaatctggcagatcttcagacatttaaggaagatcgtgtaaatccttgcctggaacggcttgataggcttgagttaatcagctgagcagaacttagtaggactttacttcacccagtaatcagctgagcagaaagcctccagagcttccacaggataaggatcgggccatacaagattcttttgacaggataaagtccattgagtttgatctggagaagacaaagaaggtattgcatgcaacagttatcaaacaaatgcagatggcagaaaccttggaagcagtaacggagcctgatcttaggcggaggaaattttgtacataatacacttacctgcaatgtacagaaacaaaagggctatttactaacgtctgctgcctgacagaattgaactagatcgcttggtacttgtacatggcccgatggccgccctttgcgattatctttctcactattctcagtctactatagagatgagtgccatggcatggtagcctcaataacaacagatatagtttacttgtgataaactgaagagatagtcatgaacagcgtcctggaaaatcaccagatactgcccaatctgaatctatagagctaagggaattctgtctgtgttatgctcctctaagtgctgagcctcctgatctgatgttgccccgtgaactttgagttccaaaactacacaatcatcacaagcaagtgcaaagggccaaagtttccagccggcccatgctgtgccgcactcaaggagttcgcgtgcccttactatacgtacctcaatgacgagagcaacgactgtgcatcgacaatgttcagctacatcaacctgtatggtaagtatccaccgggcctgttctccagcgagtgcaaagaaggcaagcaggggctctcttgcgcagatgtcctcgagagagacagtgccactgcaagcagtggtcatcacgctcaaatcagcttgcttgcgttgattactgtcttgagtgtggtagtagcgttgttccactgaactatatatgcattctccccaaatatggtgtgttacaactaatgaggtttgaattgcaccttttggtgctcatggtgggtgggattctaggttcttcctttttgtgtgtaaagtctcacataatgttattcatggcctattgcatacttttttaattcaatttaatatcgcagcgggtctgattaaggctatgactagtagatcgtccgtatgactgtacaaaatattgtttacattatagactattgttttacattgtgtactttgaaatgagagataattgtttacattatagactattgttttacattgtgtactttgaaatgagagataaagacgaggatgagtaaactgttggagtggagatagcttaagaggtgggtaaagcatttactcatatgtcccatgacaattcatccttctctatcaactagtacaatatttgtgtgtgcgatgtcatatcaatcatattggacggtatagtggtacaatggttgtatgacgtgatggtctagtggtaagacaatgtgatgtacccttttcacaaaaaataaatttaaaattaacaatatgatggactctttcaaaaaaataaatttaaaat

SEQ ID NO: 40670 - DNA, 3347 bp, Zea Mays
aaccttcttggaccgcccctgcgctgctctttcttacccgagccgtgagccgagagcgcggcgatccagaagatccagtgttcgggctgccgtatgcaatgaatcagtgatcgggcagagtaacgcaaagagggagggcctgatcatttgagctgcttttgttgacaatgtcagagggtaatatatggataacatcgaaatatctgtcagtaatgatgagaggaggaataggacagatgccgatatctcggaggacgagccgaggcacaccaggatgcggtcgctgaggaagaaagccctgcatgcatcgtcaaggctgacacactcgctgaagaagagagggaagagaaaagtggactgcagagtgccaagaatagctatagaggatgtcagggatgctgaagaagagcaggctgtgagctcgtttcgggaggttttgtttgctaggggcttgttaccaatcaagcatgatggttaccatatgatgcttagatttttgaaagcgaggaagttcgattttggaaaagctgcacagatgtgggcagacatgctgcggtggagaaaggagtttggtacagacacaatttttgaagattttgaatttcatgagctagaggaggtcctgcagtattaccctcatggttaccatggggttgacaaggaaggaaggcctgtgtacattgagttgcttgggaaagttgaacccaacaaacttatgcaaattacgacagttgagcgctatattaagtatcatgtacaagagtttgagagagttttccgggagaaattccctgcatgctcaatttctgccaaaaggcatatagatactacaactacgatattggatgtccacggtgtgggctggaagaactttagcaagatcgcgagggatttggtgcgttgtatgcaaaaaatagatggtgactattatcctgagacattacatcaaatgtttattgtaaatgctggacctggtttcaagctgatatggagcactgttaagggacttcttgacccaaaaacgtcatctaaaatacacgttctaggaacaagataccaaagcagacttcttgaagctattgatgcaagccaattgccggattactttggtggttcatgcacatgttctaaccatggagggtgcctgaggtctaacaaaggtccctggagtgatccttcaataatgaagcttgtacatagcatggaattgttgaaggaagttgcgcacatatctgatatagaagaaacaattacaggctctgtgagattgcgtgctctcaagttacccgaacaaattagtgacacatcaaatgctgaatcaggctcagatgttgatgaccttggatcccctgtggctcctgaagatgttgaatatcctagtttggccccagttcgagaggaagtgagggaatcatggtctacaacgtacagtggttcgattggcatgtctcgtatggcggataaagttgtaggatccaacaggagatacaactctactggaaatgaaattaggcagttcaatacagaacaagattccctgacaaatgggggtttacctgcaccagcaggttggcgtgcccaaaatgatggtgaaggcaatgatgatgggttcttgaaatatatatcaagaagagtcattgctatatttcttaaagtactctcttttttgcggttcttcattcgtcgacgacaacacttggccaatgatcatccacatactgcaactgcacccagtaatctggcagatcttcagacatttaaggaagatcgtgtaaatccttgcctggaacggcttgataggcttgagttaatcagctgagcagaacttagtaggactttacttcacccagtaatcagctgagcagaaagcctccagagcttccacaggataaggatcgggccatacaagattcttttgacaggataaagtccattgagtttgatctggagaagacaaagaaggtattgcatgcaacagttatcaaacaaatgcagatggcagaaaccttggaagcagtaacggagcctgatcttaggcggaggaaattttgtacataatacacttacctgcaatgtacagaaacaaaagggctatttactaacgtctgctgcctgacagaattgaactagatcgcttggtacttgtacatggcccgatggccgccctttgcgattatctttctcactattctcagtctactatagagatgagtgccatggcatggtagcctcaataacaacagatatagtttacttgtgataaactgaagagatagtcatgaacagcgtcctggaaaatcaccagatactgcccaatctgaatctatagagctaagggaattctgtctgtgttatgctcctctaagtgctgagcctcctgatctgatgttgccccgtgaactttgagttccaaaactacacaatcatcacaagcaagtgcaaagggccaaagtttccagccggcccatgctgtgccgcactcaaggagttcgcgtgcccttactatacgtacctcaatgacgagagcaacgactgtgcatcgacaatgttcagctacatcaacctgtatggtaagtatccaccgggcctgttctccagcgagtgcaaagaaggcaagcaggggctctcttgcgcagatgtcctcgagagagacagtgccactgcaagcagtggtcatcacgctcaaatcagcttgcttgcgttgattactgtcttgagtgtggtagtagcgttgttccactgaactatatatgcattctccccaaatatggtgtgttacaactaatgaggtttgaattgcaccttttggtgctcatggtgggtgggattctaggttcttcctttttgtgtgtaaagtctcacataatgttattcatggcctattgcatacttttttaattcaatttaatatcgcagcgggtctgattaaggctatgactagtagatcgtccgtatgactgtacaaaatattgtttacattatagactattgttttacattgtgtactttgaaatgagagataattgtttacattatagactattgttttacattgtgtactttgaaatgagagataaagacgaggatgagtaaactgttggagtggagatagcttaagaggtgggtaaagcatttactcatatgtcccatgacaattcatccttctctatcaactagtacaatatttgtgtgtgcgatgtcatatcaatcatattggacggtatagtggtacaatggttgtatgacgtgatggtctagtggtaagacaatgtgatgtacccttttcacaaaaaataaatttaaaattaacaatatgatggactctttcaaaaaaataaatttaaaat

SEQ ID NO: 40671 - DNA, 3352 bp, Zea Mays
ctttcttacccgagccgtgagccgagagcgcggcgatccagaagatccagtgttcgggctgccgtatgcaatgaatcagtgatcgggcagagtaacgcaaagagggagggcctgatcatttgagctgcttttgttgacaatgtcagagggtaatatatggataacatcgaaatatctgtcagtaatgatgagaggaggaataggacagatgccgatatctcggaggacgagccgaggcacaccaggatgcggtcgctgaggaagaaagccctgcatgcatcgtcaaggctgacacactcgctgaagaagagagggaagagaaaagtggactgcagagtgccaagaatagctatagaggatgtcagggatgctgaagaagagcaggctgtgagctcgtttcgggaggttttgtttgctaggggcttgttaccaatcaagcatgatggttaccatatgatgcttagatttttgaaagcgaggaagttcgattttggaaaagctgcacagatgtgggcagacatgctgcggtggagaaaggagtttggtacagacacaatttttgaagattttgaatttcatgagctagaggaggtcctgcagtattaccctcatggttaccatggggttgacaaggaaggaaggcctgtgtacattgagttgcttgggaaagttgaacccaacaaacttatgcaaattacgacagttgagcgctatattaagtatcatgtacaagagtttgagagagttttccgggagaaattccctgcatgctcaatttctgccaaaaggcatatagatactacaactacgatattggatgtccacggtgtgggctggaagaactttagcaagatcgcgagggatttggtgcgttgtatgcaaaaaatagatggtgactattatcctgagacattacatcaaatgtttattgtaaatgctggacctggtttcaagctgatatggagcactgttaagggacttcttgacccaaaaacgtcatctaaaatacacgttctaggaacaagataccaaagcagacttcttgaagctattgatgcaagccaattgccggattactttggtggttcatgcacatgttctaaccatggagggtgcctgaggtctaacaaaggtccctggagtgatccttcaataatgaagcttgtacatagcatggaattgttgaaggaagttgcgcacatatctgatatagaagaaacaattacaggctctgtgagattgcgtgctctcaagttacccgaacaaattagtgacacatcaaatgctgaatcaggctcagatgttgatgaccttggatcccctgtggctcctgaagatgttgaatatcctagtttggccccagttcgagaggaagtgagggaatcatggtctacaacgtacagtggttcgattggcatgtctcgtatggcggataaagttgtaggatccaacaggagatacaactctactggaaatgaaattaggcagttcaatacagaacaagattccctgacaaatgggggtttacctgcaccagcctatctcatgctcaaatatgggttcaaaccagcaggttggcgtgcccaaaatgatggtgaaggcaatgatgatgggttcttgaaatatatatcaagaagagtcattgctatatttcttaaagtactctcttttttgcggttcttcattcgtcgacgacaacacttggccaatgatcatccacatactgcaactgcacccagtaatctggcagatcttcagacatttaaggaagatcgtgtaaatccttgcctggaacggcttgataggcttgagttaatcagctgagcagaacttagtaggactttacttcacccagtaatcagctgagcagaaagcctccagagcttccacaggataaggatcgggccatacaagattcttttgacaggataaagtccattgagtttgatctggagaagacaaagaaggtattgcatgcaacagttatcaaacaaatgcagatggcagaaaccttggaagcagtaacggagcctgatcttaggcggaggaaattttgtacataatacacttacctgcaatgtacagaaacaaaagggctatttactaacgtctgctgcctgacagaattgaactagatcgcttggtacttgtacatggcccgatggccgccctttgcgattatctttctcactattctcagtctactatagagatgagtgccatggcatggtagcctcaataacaacagatatagtttacttgtgataaactgaagagatagtcatgaacagcgtcctggaaaatcaccagatactgcccaatctgaatctatagagctaagggaattctgtctgtgttatgctcctctaagtgctgagcctcctgatctgatgttgccccgtgaactttgagttccaaaactacacaatcatcacaagcaagtgcaaagggccaaagtttccagccggcccatgctgtgccgcactcaaggagttcgcgtgcccttactatacgtacctcaatgacgagagcaacgactgtgcatcgacaatgttcagctacatcaacctgtatggtaagtatccaccgggcctgttctccagcgagtgcaaagaaggcaagcaggggctctcttgcgcagatgtcctcgagagagacagtgccactgcaagcagtggtcatcacgctcaaatcagcttgcttgcgttgattactgtcttgagtgtggtagtagcgttgttccactgaactatatatgcattctccccaaatatggtgtgttacaactaatgaggtttgaattgcaccttttggtgctcatggtgggtgggattctaggttcttcctttttgtgtgtaaagtctcacataatgttattcatggcctattgcatacttttttaattcaatttaatatcgcagcgggtctgattaaggctatgactagtagatcgtccgtatgactgtacaaaatattgtttacattatagactattgttttacattgtgtactttgaaatgagagataattgtttacattatagactattgttttacattgtgtactttgaaatgagagataaagacgaggatgagtaaactgttggagtggagatagcttaagaggtgggtaaagcatttactcatatgtcccatgacaattcatccttctctatcaactagtacaatatttgtgtgtgcgatgtcatatcaatcatattggacggtatagtggtacaatggttgtatgacgtgatggtctagtggtaagacaatgtgatgtacccttttcacaaaaaataaatttaaaattaacaatatgatggactctttcaaaaaaataaatttaaaat

SEQ ID NO: 40672 - DNA, 3665 bp, Zea Mays
gtaccccttcttggaccgcccctgcgctgctctttctcggctgtgtccgcgtgtcgcgtcccctgagacgtcaccggcgtggagtgacaatccgatccggttcctcgttttctccgcagaatgtctccccccttagtctgttctgagccctaaaagttgaatacgcgctgtttcccccaatccatccagttgtcggcttgtttgttgcgtggtggagttcgtaccgacataggtggtttggtctagttttccgattttatttgggtgttcaactgagccccatgaccctcgttttatccgcccgccgctttggaatggagtgcactgctaattagatgcgaacacaacctctgaattcttacatgtatttagtatttacgaaccgttttatgtcagtgttcgggctgccgtatgcaatgaatcagtgatcgggcagagtaacgcaaagagggagggcctgatcatttgagctgcttttgttgacaatgtcagagggtaatatatggataacatcgaaatatctgtcagtaatgatgagaggaggaataggacagatgccgatatctcggaggacgagccgaggcacaccaggatgcggtcgctgaggaagaaagccctgcatgcatcgtcaaggctgacacactcgctgaagaagagagggaagagaaaagtggactgcagagtgccaagaatagctatagaggatgtcagggatgctgaagaagagcaggctgtgagctcgtttcgggaggttttgtttgctaggggcttgttaccaatcaagcatgatggttaccatatgatgcttagatttttgaaagcgaggaagttcgattttggaaaagctgcacagatgtgggcagacatgctgcggtggagaaaggagtttggtacagacacaatttttgaagattttgaatttcatgagctagaggaggtcctgcagtattaccctcatggttaccatggggttgacaaggaaggaaggcctgtgtacattgagttgcttgggaaagttgaacccaacaaacttatgcaaattacgacagttgagcgctatattaagtatcatgtacaagagtttgagagagttttccgggagaaattccctgcatgctcaatttctgccaaaaggcatatagatactacaactacgatattggatgtccacggtgtgggctggaagaactttagcaagatcgcgagggatttggtgcgttgtatgcaaaaaatagatggtgactattatcctgagacattacatcaaatgtttattgtaaatgctggacctggtttcaagctgatatggagcactgttaagggacttcttgacccaaaaacgtcatctaaaatacacgttctaggaacaagataccaaagcagacttcttgaagctattgatgcaagccaattgccggattactttggtggttcatgcacatgttctaaccatggagggtgcctgaggtctaacaaaggtccctggagtgatccttcaataatgaagcttgtacatagcatggaattgttgaaggaagttgcgcacatatctgatatagaagaaacaattacaggctctgtgagattgcgtgctctcaagttacccgaacaaattagtgacacatcaaatgctgaatcaggctcagatgttgatgaccttggatcccctgtggctcctgaagatgttgaatatcctagtttggccccagttcgagaggaagtgagggaatcatggtctacaacgtacagtggttcgattggcatgtctcgtatggcggataaagttgtaggatccaacaggagatacaactctactggaaatgaaattaggcagttcaatacagaacaagattccctgacaaatgggggtttacctgcaccagcaggttggcgtgcccaaaatgatggtgaaggcaatgatgatgggttcttgaaatatatatcaagaagagtcattgctatatttcttaaagtactctcttttttgcggttcttcattcgtcgacgacaacacttggccaatgatcatccacatactgcaactgcacccagtaatctggcagatcttcagacatttaaggaagatcgtgtaaatccttgcctggaacggcttgataggcttgagttaatcagctgagcagaacttagtaggactttacttcacccagtaatcagctgagcagaaagcctccagagcttccacaggataaggatcgggccatacaagattcttttgacaggataaagtccattgagtttgatctggagaagacaaagaaggtattgcatgcaacagttatcaaacaaatgcagatggcagaaaccttggaagcagtaacggagcctgatcttaggcggaggaaattttgtacataatacacttacctgcaatgtacagaaacaaaagggctatttactaacgtctgctgcctgacagaattgaactagatcgcttggtacttgtacatggcccgatggccgccctttgcgattatctttctcactattctcagtctactatagagatgagtgccatggcatggtagcctcaataacaacagatatagtttacttgtgataaactgaagagatagtcatgaacagcgtcctggaaaatcaccagatactgcccaatctgaatctatagagctaagggaattctgtctgtgttatgctcctctaagtgctgagcctcctgatctgatgttgccccgtgaactttgagttccaaaactacacaatcatcacaagcaagtgcaaagggccaaagtttccagccggcccatgctgtgccgcactcaaggagttcgcgtgcccttactatacgtacctcaatgacgagagcaacgactgtgcatcgacaatgttcagctacatcaacctgtatggtaagtatccaccgggcctgttctccagcgagtgcaaagaaggcaagcaggggctctcttgcgcagatgtcctcgagagagacagtgccactgcaagcagtggtcatcacgctcaaatcagcttgcttgcgttgattactgtcttgagtgtggtagtagcgttgttccactgaactatatatgcattctccccaaatatggtgtgttacaactaatgaggtttgaattgcaccttttggtgctcatggtgggtgggattctaggttcttcctttttgtgtgtaaagtctcacataatgttattcatggcctattgcatacttttttaattcaatttaatatcgcagcgggtctgattaaggctatgactagtagatcgtccgtatgactgtacaaaatattgtttacattatagactattgttttacattgtgtactttgaaatgagagataattgtttacattatagactattgttttacattgtgtactttgaaatgagagataaagacgaggatgagtaaactgttggagtggagatagcttaagaggtgggtaaagcatttactcatatgtcccatgacaattcatccttctctatcaactagtacaatatttgtgtgtgcgatgtcatatcaatcatattggacggtatagtggtacaatggttgtatgacgtgatggtctagtggtaagacaatgtgatgtacccttttcacaaaaaataaatttaaaattaacaatatgatggactctttcaaaaaaataaatttaaaat

SEQ ID NO: 40673 - DNA, 3484 bp, Zea Mays
tacgcgctgtttcccccaatccatccagttgtcggcttgtttgttgcgtggtggagttcgtaccgacataggtggtttggtctagttttccgattttatttgggtgttcaactgagccccatgaccctcgttttatccgcccgccgctttggaatggagtgcactgctaattagatgcgaacacaacctctgaattcttacatgtatttagtatttacgaaccgttttatgtcagtgttcgggctgccgtatgcaatgaatcagtgatcgggcagagtaacgcaaagagggagggcctgatcatttgagctgcttttgttgacaatgtcagagggtaatatatggataacatcgaaatatctgtcagtaatgatgagaggaggaataggacagatgccgatatctcggaggacgagccgaggcacaccaggatgcggtcgctgaggaagaaagccctgcatgcatcgtcaaggctgacacactcgctgaagaagagagggaagagaaaagtggactgcagagtgccaagaatagctatagaggatgtcagggatgctgaagaagagcaggctgtgagctcgtttcgggaggttttgtttgctaggggcttgttaccaatcaagcatgatggttaccatatgatgcttagatttttgaaagcgaggaagttcgattttggaaaagctgcacagatgtgggcagacatgctgcggtggagaaaggagtttggattttgaatttcatgagctagaggaggtcctgcagtattaccctcatggttaccatggggttgacaaggaaggaaggcctgtgtacattgagttgcttgggaaagttgaacccaacaaacttatgcaaattacgacagttgagcgctatattaagtatcatgtacaagagtttgagagagttttccgggagaaattccctgcatgctcaatttctgccaaaaggcatatagatactacaactacgatattggatgtccacggtgtgggctggaagaactttagcaagatcgcgagggatttggtgcgttgtatgcaaaaaatagatggtgactattatcctgagacattacatcaaatgtttattgtaaatgctggacctggtttcaagctgatatggagcactgttaagggacttcttgacccaaaaacgtcatctaaaatacacgttctaggaacaagataccaaagcagacttcttgaagctattgatgcaagccaattgccggattactttggtggttcatgcacatgttctaaccatggagggtgcctgaggtctaacaaaggtccctggagtgatccttcaataatgaagcttgtacatagcatggaattgttgaaggaagttgcgcacatatctgatatagaagaaacaattacaggctctgtgagattgcgtgctctcaagttacccgaacaaattagtgacacatcaaatgctgaatcaggctcagatgttgatgaccttggatcccctgtggctcctgaagatgttgaatatcctagtttggccccagttcgagaggaagtgagggaatcatggtctacaacgtacagtggttcgattggcatgtctcgtatggcggataaagttgtaggatccaacaggagatacaactctactggaaatgaaattaggcagttcaatacagaacaagattccctgacaaatgggggtttacctgcaccagcaggttggcgtgcccaaaatgatggtgaaggcaatgatgatgggttcttgaaatatatatcaagaagagtcattgctatatttcttaaagtactctcttttttgcggttcttcattcgtcgacgacaacacttggccaatgatcatccacatactgcaactgcacccagtaatctggcagatcttcagacatttaaggaagatcgtgtaaatccttgcctggaacggcttgataggcttgagttaatcagctgagcagaacttagtaggactttacttcacccagtaatcagctgagcagaaagcctccagagcttccacaggataaggatcgggccatacaagattcttttgacaggataaagtccattgagtttgatctggagaagacaaagaaggtattgcatgcaacagttatcaaacaaatgcagatggcagaaaccttggaagcagtaacggagcctgatcttaggcggaggaaattttgtacataatacacttacctgcaatgtacagaaacaaaagggctatttactaacgtctgctgcctgacagaattgaactagatcgcttggtacttgtacatggcccgatggccgccctttgcgattatctttctcactattctcagtctactatagagatgagtgccatggcatggtagcctcaataacaacagatatagtttacttgtgataaactgaagagatagtcatgaacagcgtcctggaaaatcaccagatactgcccaatctgaatctatagagctaagggaattctgtctgtgttatgctcctctaagtgctgagcctcctgatctgatgttgccccgtgaactttgagttccaaaactacacaatcatcacaagcaagtgcaaagggccaaagtttccagccggcccatgctgtgccgcactcaaggagttcgcgtgcccttactatacgtacctcaatgacgagagcaacgactgtgcatcgacaatgttcagctacatcaacctgtatggtaagtatccaccgggcctgttctccagcgagtgcaaagaaggcaagcaggggctctcttgcgcagatgtcctcgagagagacagtgccactgcaagcagtggtcatcacgctcaaatcagcttgcttgcgttgattactgtcttgagtgtggtagtagcgttgttccactgaactatatatgcattctccccaaatatggtgtgttacaactaatgaggtttgaattgcaccttttggtgctcatggtgggtgggattctaggttcttcctttttgtgtgtaaagtctcacataatgttattcatggcctattgcatacttttttaattcaatttaatatcgcagcgggtctgattaaggctatgactagtagatcgtccgtatgactgtacaaaatattgtttacattatagactattgttttacattgtgtactttgaaatgagagataattgtttacattatagactattgttttacattgtgtactttgaaatgagagataaagacgaggatgagtaaactgttggagtggagatagcttaagaggtgggtaaagcatttactcatatgtcccatgacaattcatccttctctatcaactagtacaatatttgtgtgtgcgatgtcatatcaatcatattggacggtatagtggtacaatggttgtatgacgtgatggtctagtggtaagacaatgtgatgtacccttttcacaaaaaataaatttaaaattaacaatatgatggactctttcaaaaaaataaatttaaaat

SEQ ID NO: 40674 - DNA, 1272 bp, Zea Mays
tttccttacaggagcatgctataaatttcatagaccaatttccttcgaaatttggtatgggctacgtccaagcatgacatctacctagtatcacattactcaattcgtcattggtcagcattgagtggtgtcgatactgaacttatcaacgtccaaggacacgtggcaccaagggagaagcatgcaggaagtttatcagagggtttttatcagactcaagttagtaccttggcagtcaaggacaatttactggtagctggtgggtttcaaggagagctgatctgtaaacaccttgatcgggaaggtattagtttttgctgtcgaacaacttatgatgataatgctattacaaatgcggttgagatatttaatacctctagtggcgctgttcacttcatcgcatcaaataacgattctggtgtgagatactatgacatggagagattccagctattcaagcatttgcagtttgaatggccagtgaatcatgcttctttgagtcctgacagaaaggtcgttgttattgtcggtgatgatcctgatggtctacttattgatgccaactctggaaagacactccattccataaaaggacatcgggactactcatttgcatcggcttggagccctgatgggcgaacatttgctactggcaaccaagacaagacatgccgaatctgggacgcgaggaatctctcaaaatccgtccatgtgttgaggggtaaccttggagccatccggtccatccgcttcacctcggatggccagttcatgtccatggctgaacctgctgactttgtgcacgtctacgacgtgaagagtgactacaacaaaaggcaggagctggacttctttggcgagatatccggcacatcgttcagcccagacactgacgcgcttttcgttggcgtgtgggataggatgtatggcagcctgcttcagtttggccgcctgtacaactactcgtatcttgactccgtgttttgatgtggaaccaaacggatgttggactgttgggtttggtgtgccgcggttctctgaatgttgtcagcatgattaggcggttatccttatatcaggattttaagttgacaaagataattgaattaataaatgttgtaccgtgcccgatgtgtatatataaaagaaatgtatacatatgcctattcagataccgagttgagatgtgacttggtctactccatgtgtgattgatgaattggttgtcgaagaggtttaaagctttcgacgcttgaagttgaacacagtgcg

SEQ ID NO: 40675 - DNA, 824 bp, Zea Mays
ctatatttggatcttcttgttggtgctatcattacaagcatgcttctttgagtcctgacagaaaggtcgttgttattgtcggtgatgatcctgatggtctacttattgatgccaactctggaaagacactccattccataaaaggacatcgggactactcatttgcatcggcttggagccctgatgggcgaacatttgctactggcaaccaagacaagacatgccgaatctgggacgcgaggaatctctcaaaatccgtccatgtgttgaggggtaaccttggagccatccggtccatccgcttcacctcggatggccagttcatgtccatggctgaacctgctgactttgtgcacgtctacgacgtgaagagtgactacaacaaaaggcaggagctggacttctttggcgagatatccggcacatcgttcagcccagacactgacgcgcttttcgttggcgtgtgggataggatgtatggcagcctgcttcagtttggccgcctgtacaactactcgtatcttgactccgtgttttgatgtggaaccaaacggatgttggactgttgggtttggtgtgccgcggttctctgaatgttgtcagcatgattaggcggttatccttatatcaggattttaagttgacaaagataattgaattaataaatgttgtaccgtgcccgatgtgtatatataaaagaaatgtatacatatgcctattcagataccgagttgagatgtgacttggtctactccatgtgtgattgatgaattggttgtcgaagaggtttaaagctttcgacgcttgaagttgaacacagtgcg

SEQ ID NO: 40676 - DNA, 821 bp, Zea Mays
aaagttaaagaagcttgactaagaacatagataaacatgcttctttgagtcctgacagaaaggtcgttgttattgtcggtgatgatcctgatggtctacttattgatgccaactctggaaagacactccattccataaaaggacatcgggactactcatttgcatcggcttggagccctgatgggcgaacatttgctactggcaaccaagacaagacatgccgaatctgggacgcgaggaatctctcaaaatccgtccatgtgttgaggggtaaccttggagccatccggtccatccgcttcacctcggatggccagttcatgtccatggctgaacctgctgactttgtgcacgtctacgacgtgaagagtgactacaacaaaaggcaggagctggacttctttggcgagatatccggcacatcgttcagcccagacactgacgcgcttttcgttggcgtgtgggataggatgtatggcagcctgcttcagtttggccgcctgtacaactactcgtatcttgactccgtgttttgatgtggaaccaaacggatgttggactgttgggtttggtgtgccgcggttctctgaatgttgtcagcatgattaggcggttatccttatatcaggattttaagttgacaaagataattgaattaataaatgttgtaccgtgcccgatgtgtatatataaaagaaatgtatacatatgcctattcagataccgagttgagatgtgacttggtctactccatgtgtgattgatgaattggttgtcgaagaggtttaaagctttcgacgcttgaagttgaacacagtgcg

SEQ ID NO: 40677 - DNA, 1021 bp, Zea Mays
ggctccacgcgtcagcccccgaaggtaactgcagacgaacgtttaccttggccactccttcacgtccatggccacacccttccggttcgcgcgtgcacccagccacccaccaacccctgcctccgccgcagtgcctgccatcaccgtcgtgcgccattcccaatcttgctggcgtttcttatccacgagttttcttctctagtgactactttcttccatgctgtgctgtgtctaaccccggccgagctttcttcattgattctctccatgccgagctgacattgttgggccctgcgacatcatctttttcctaccactgctggttgttccctggttcaaaggacgacactggtggccgcgctctacccaagttcggcgagtgggacgtgaacaacccggcgtccgcggacgggttcacggtcatcttcagcaaggccagggacgagaagaaagctcccccgacccaaggccacatcaggaacaacaggtcggtgtcggctgacagcaaggactccagggccgagaagatgacctcctacaacgccaggaccaacgcgtcgagaaatggttctgctgtgtctcgcccagccccacacaatcttgaggaagctaacgacagagaaatggtccattgcatcgctgcggctggcagaccggccgcgagtgaactctccggatacttgccagtgacagtgtatagccgccgttgcaaatgacagtgtatagcgttcttagctgcctgtgcataccgtcagttcaggttgatgtctgcttgtaatttttcttttctcgcctcttctctacggtgtgtaacccttcctcagcgttaatcctcctgctgcattttgctgtaacttgggcgagggtggatttgtttcggctctgaccaaaaccaggtcacagcgaattctcagattgctgcagtgaccgccaccaacctgacaaacaaaaatgctgcgacgttttcagagctgtagaggatgttctcatggaaatacgttatatattcatataattctta

SEQ ID NO: 40678 - DNA, 2107 bp, Zea Mays
gcgcccgagcagagagagcctgactctgcagctatacgagctcagactccctctcctccctcctttctcttaccttcctcgtgagacatcaccgccgtctcggtacgtggcagcaaccaaccgttcgcttctctctcctggagcgtcgcgcggggcccggcgggggaccgtacgtacctgtgcgcgaagacggggacggtggcggagttcgagatggaggcggcgccgatgcgaaaggcgtcgtcgcaggcgtcgctggcggacccagacgacttcgacctgacgcgcctgctgaaccacaagccgcggatcaacgtggacaggcagcggtcgttcgacgaccgctccctcggcgagatatcgctcgccggcgcgggcacggccagccgcggtggctggggctacggcggcggggggatggagagctacgagagcatgtactcccccggcggcgggctgcggtcctactgcggcacgccggcctcgtccacgcggctctcgttcgagccccacccgctcatcggcgaggcctgggacgcgctgcgccgctccatggtgtccttccgcggccagccgctcggcaccatcgccgccgtcgaccactcctccggcgaagtgctcaactacgaccaggggtgggagaagcggatcgaccgcttcaagctcggcgagggcgccatgccggcgagcttcaaggtgctcaaggacccgaagcgcggcgtcgacaagctggtggccgacttcggggagagcgccatcggccgcgtggcgccggtggattccgggttctggtggatcatcatcctgagggcctacaccaagtccaccggcgacatgaccctcgccgagacgcccatgtgccagaagggcatccggctcatcatgaaccagtgcctcgccgagggcttcgacaccttccccaccctgctctgcgccgacggctgctgcatgatcgatcgcaggatgggtgtgtatgggtacccgatcgagatccaggccctgttcttcatggcgctgcggtgcgcgctcctcatgctgaagccggatgcggaggggaaggagatcatggagcggatcgtgacgcggctgacggcgctgagctaccacatgcggagctacttctggctggacttccagcagctcaacgacatctacaggttcaagacggaggagtactcgcacacggccgtcaacaagttcaacgtgaacccggagtccatcccggactggctcttcgacttcatgcccacccgcggcggctacttcgtcggcaacgtcagccccgcccggatggacttccgctggttcgcgctcggcaactgcgtcgccatcctcgcctcgctcgccacgcccgaccaggccgccgccatcatggacctcatcgaggagcgctgggaggacctcgtcggcgagatgcccgtcaagatatgctacccggccatcgaggggcacgagtggcagatagtcacgggctgcgaccccaagaacacaagatggagctaccacaacgggggatcttggccagtgctgctgtggctgctcaccgcggcatgcatcaagaccgggaggctgaagatcgctcggcgcgcgatcgacctagccgaggcgaggctcgcgagggacggctggccagagtactacgacggcaagctgggtcgctacatcggcaagcaggcgaggaagctccagacgtggtccatcgcggggtacctagtggccaagatgatggtggaggatccgtcccacctcggcatgatctccctggaggaggagaagccgaccaagccggtgctcaggaggtcggcctcttggacagggtaaggtagtggcggccacaaagacggcagcaggacccgagttctggttctttgagctaacatctcgaatttctctgcaacttcttgctttacggctggggaagtaggcgtgtccaatgttttggtgggtcttccatgtatgaatctttatacgtcccgtcggtgaaataaggaaacaacgaaaagatttttcgtgttatttccagggcaacaagatgcgagctttatctattttatatctatttgctacagctcaactttaataataaaatgtttaaaaaaatataaaa

SEQ ID NO: 40679 - DNA, 1642 bp, Zea Mays
ttcagttccacatatagctgccatcttgccatcaaccgagcaagagcggcacaacaactaacacgaacacgaccagaattttgtaaactacgatcatctgcaacgaggaactatgcaaactgactaaccgaaccgcaactccgccgaagccaaaacagtcagagagcgcagcgtggtgtgatccttgcagggactgataacattcgacagacaaaacgactactgaataatatatcggcttcaagtatcaagttttcagaatcagaaaataaaaggtgattgataagctcatgatcacatcggcggataccagagagcatcaggcaataccctgattacatctgcagacaccaggaagcggggagcctccctccgcccaagccaaaggcagcattgacaaatatgaactaacggcgggcgacagatattcgagaaggtagtacaatttacaaccacagaaattactttattttacagctgtttatcgcacaaaaccagttcacaaatgttaataacaatgtcaaatcatgtcagtgcgaaaacaaaccgcagtccatgtgataatgaagcagcgttctgaatttcggaccacgccctcgtgaaaatttgtagccacggtcaaatatgcctactaagagaaattctgaacaagcatagaccacacagatttcatagtctgaaagatgttgcggccatgaagttcagagggaacaaacaagtgagaaccaccagttgactacagtggtaagaagccagcacgttttgtttcacaacttcctaccaaatgaataacattagcctaaaccattccagacttctgaactagcagttgcccacaaccacattgttacttcgtactccatacttcctttccaaaatataagacgctttggcttctgaacccagcctgatcggctgcacattttgtgctgcaggtgcaggtgcagctgctgctgcatgcacagttcagattctatgcagcagatttcaacggttcaaattttaagcagcatgcagcaacagatatagctgaaaagcacaggaagtgcagcattatgtatttagacatagtatatacctaagtgcacagcaaagaaaccttatgatttggaatggagggaatagtaaagattaaagaactatgctctgaaagatggtgaataagaacatttaaaaagtatcttcagagtaaaatatacagcaagaatccaattcaggtaaggatacatcatacttgcagggatgcagtagcttggtctacgatgtacaaatgtggttgcaagacacagcatcaaagtggaatccatgccgtgagggacattccatacttactaaagacttcacatgattgaaaacacaaagcaaatgaaatttgttcgaaattaagagcatcacataatagattagttggaggtggtgttattatagttacttgagctatgactagcttagtggcttccatcaattctcaatttatgccaactgagcagactaatcgaagtcatggaacctaactactcatccacaacagtacaagcacaagcagcctacaatatctaagttcataaccccaaggatccaccgctccagtaagcaagaaaaggataagcttatgataattagtagatacatgacttagaaa

SEQ ID NO: 40680 - DNA, 405 bp, Zea Mays
tatgaccagaagctttattctattccgaattcagctcatcatttcacacacaaaaaatgaagaaaagcaagcgcctagcaggcggggttcgatttatccgggcgcacacagcacagatcgaggaacccttggatccgttcggatcaagcaaagatgtgcaaacgagatcaggttacggagggcgcggcgccggcggactcggcctcgaggtaccggcagatccgctcgacgacctccctccccttggcgctattctgcagaaacctctcggcgcaccgggtctcgaccttctcagcgacggcggcgagggccgcgagcgggcggcaccggatcgtggtctcctgcctgaactgcgtccagtcgtcgggccggtccggatgtggtctgtaggaggcgcgctcctcg

SEQ ID NO: 40681 - DNA, 1385 bp, Zea Mays
gacctttcctcgtcaggcttgcagcgttgttgcaggctccgcctccgatggcgctctcgcgcctctcccaccgcctcctgagcccaacggctgtcgccgccgcgcacttccccatacctaaaacattcacccatggccgcgaccccttcatcctcctgaatcccggccgccgcttcttctccgcgccctcaaaccccagccccaacccctcctccacgacatcagagcccagccaaggcgccccatccgcgcccgcgtcgccggatgagatgcggcaccaggagatcgagggccccacggtggagcgcgatacgtcgccgctggccgacgaaacgcggcgggagctcgacgcgctccgccgcaccgtgcagcgcctcagcggctcgctcgcgctcctcggaggagcgcacctcgccgccggcgcgtggatatcttacggtgctccgcctctcggtgtcggatccgccgcggcagtgcagggagtggcggcgttcgcgttccccttcgcggtcgccctggtgctacgccgcgccatcaagcccatcgccttcttccagaagatggaggccaacgcgaggctgcaggtgctcacgttgtgcctccaggctacgaagaacgttaacctcatgctgctccggacacgggtgatggccatctcttgcgctctgggagtgtctgtcgcgtcagttgctgcggtgtttattagatgattttaagttcagacctctgccggaaggatacttagttttcagtatcaaaaggaataaaaatgcactgctaataggcaagtagacttcgaactaaagatattttggtgcttttggatgttggattatgcttagttttggtgattgtacacgggagaggggagattaaaatatgattgttcgagacatttctattacaatgatattaatcttcagcttgtagaaccaattggtaaaatgtagtatcttccttttaaatgaaccagctccataccgatatcctgtttgttaataaattggctacaaccacaattctttattgctgcttcccttttactattgaactgtgttttgggttcattggtgatttggcaaggtaacaaggttgtattaccaataccatcttacactagaatatcattgtagctgattgaattgatactcagatcaggatgaaatgtgttctcatacctttgtgattggcagcactgttttaaaggcgtcgcctaggcgtccaggcggtggcccaacgccttgctcgcctatctcgcctaggcgtccaagcggcagtccaacgctttgtatagccataccgctttgaaaaccatgataggcagtctagttatgtgcttagttcagaactccgatatgatcagatgttttcgttcttaaaagatg

SEQ ID NO: 40682 - DNA, 908 bp, Zea Mays
gttggccagttacccctgagattgtgtaagctcttccactgtctgcagagtgaaagcttcttctggactgtctagcgcagaagataactggttctctgcaatgatcacattggacagtgttttcttgaagagaattactgttctaaagatggaaaaagaggtccgttctcctttcatctttcctgatgtggttcaggtaactgaatgaggagctgtgcaagatgtacagtttagtggcaacactgcaaatccaaatttgaagccacatgtagctgctcagctgatttgcaacatcaggaatatttcatttcagctaattctgaagaaattttaggaatcgtacggtactttgtcgttatagatttgcatagaggatttccaggatcagcagacagatgttttagctcccaacatatacaaagcaatatgccgtgactgaagtgctgattctgccaatgcatatgttgtctaccgataaattccctatgcaagaaagtgtacctgtagaactctgtcagcacgtccctgggagtgccagcacgaacgatgcagttccactcatggtcagtaaggcacgaagagaagttgctgatgaactcggcggcggtttctccatggggctcggaaacggacacgatgtccaggccgacaaggcaaagtggctcggatgcaaagccgacgtagtccccatggtgcgaggtgctgaagttgaagttcgggaaggctgaacaattattctgctgcaagatgaaccattccagtatttggtcagtgactcagtggcaggatgcaaccgagcagacagaaaacctggagctccatatttttcttcttcttgttgcttggtagtgcacctcacgctctgctgacttggctgcactacacttcactgaactccgatgaagtct

SEQ ID NO: 40683 - DNA, 1392 bp, Zea Mays
atgaagcttgacattcttgctcagactcgcagtggcggtagctgggagagcttgggactggccagacgcgaccaactcaccactgtaataagacgacttttatacatagctgacagtacgcaacctcagttcaggcgcaaggtcatgaaaacttgcataactccattgacgaagctatcatgttgaaggtattgatcaagatcatatcagatatgtaccacttccacgcgcacctgtggtgggagatcgagatccagtgtggcctcaaccaccccaacgttccacgatgaagaacgagtcgtcctcatcctcgagcacgcggcccttggcgagatcaataagatccttcatgccactcgccgctcagtaaggttttgtgtttttgatttttttggacttgttatgtatttccctgcacatacatttagaaaaatattatataagtactgcaatctccaatatttatatctcatgcatctcattttggaagttttgtgtttttggttttttttggacttgttatgtatttccctgcacatacatttagaaaaatattatataagtactgcaatctccaatatttatatctcatgcatctcattttggaaaaactcatacgaaaagcagatttcaggtggaatttggtcttcagtgcatatacacctgcaatttgttgtttctatgtgaattttttgtttgagtctgaacatcaacaatttgtggcgatgtatagctgtaccatgcactatggaggtgtgttgtttcaaatttatcttaaattcctaggcatgtttttctaggggactaccacaattctcttgaaattgtggtaagaaaactaatgacactgaaacatacaattttcagatttttcatgggagactcactgaagcagatgcacacagatactttcagtagcttatcgacggtgttgatttttgtcacaagaaaaggagtctaccattgagacttaaaggatgcttagtgggtcaactgtagggatctttccttctacatacgacctgtgggactcgctttttggtcttattctacgggctacctgctatgggatttgactaaaacacacatttaccttgcttgtggtgagctctttggtgggaaacgtttgatgaagccatgtttccatgtttagagaatcacatcacagtcggacctggaactctggaagagaatacctaagggctagcaggatcaacaattgattacatggtttctgtaattttttgtactgaactgaatttaagcatttatgttatattataaagttcaatttagaaggtaaaaacaaaattgttttgtgctaaaccattgatgtgtgttgtacctttttttttgaaaatataacagaaatgctgaaattataaaagtgac

SEQ ID NO: 40684 - DNA, 3403 bp, Zea Mays
ctccagtccccactcgtcctccacccccaccgcgcctgaaatcccccacccacaacggagtactccccacaacgtcctctgcctcaccctcctcctcctcggccgcgggaggcagccacatctcaggctacggcatcgcggcggaccagacgggactgggcaggacaggacccttcacgcgccgtgcctattggaccgcagattgtgagatccaatccaatccaacaaccgaatccaatccaatccaatcagagaaaaagaaagacggcgaaaggctcatgtatgtgtggcaccacatcttgccatcagggaaaatggggctgtcaatctcgtacccaccggacgactacctgccagcagtggaggacgacatggggcggctgttcatctggtctctcagcttcgacgatatggaggctgccgccgattcgccttcgtattcgccttcggcattgcccccccgcctttggctccgggaagctgatcatggagggctccctgggcttcttcgaaagaagagaaactgacagcgtccagatgcagaacgtgctgtccatcaggaatcctaaacctcctaatagagaagcctgcagcagcgtcagtcccggtgctgcgacagctacttgtggctcaaggagaagacgatctttttaaagattttcatgttctttagcttttatcctctactagggacaattggttgcagtcaggtttttttgtaaagtcaaaattatagaccaaaattaggtaaaaagaccagtcgagtgacttttggatttttccccccgcttatcaggggttcacatggaagatctatgccttttgagtggtttgatttgtccacgattgtcagaaattgataaatccattatgtttcagattatgggcaaaattaaaaataagaaggtgaagccccatgcttgtatacctatggttgacattttttccatgatcttatccccgtgcaggtcatgaaaacttgcataactccattgacgaagctatcatgttgaaggtattgatcaagatcatatcagatatgtaccacttccacgcgcacctgtggtgggagatcgagatccagtgtggcctcaaccaccccaacgttccacgatgaagaacgagtcgtcctcatcctcgagcacgcggcccttggcgagatcaataagatccttcatgccactcgccgctcagtaaggttttgtgtttttgatttttttggacttgttatgtatttccctgcacatacatttagaaaaatattatataagtactgcaatctccaatatttatatctcatgcatctcattttggaagttttgtgtttttggttttttttggacttgttatgtatttccctgcacatacatttagaaaaatattatataagtactgcaatctccaatatttatatctcatgcatctcattttggaaaaactcatacgaaaagcagatttcaggtggaatttggtcttcagtgcatatacacctgcaatttgttgtttctatgtgaattttttgtttgagtctgaacatcaacaatttgtggcgatgtatagctgtaccatgcactatggagatttttcatgggagactcactgaagcagatgcacacagatactttcagtagcttatcgacggtgttgatttttgtcacaagaaaaggagtctaccattgagacttaaaggatgcttagtgggtcaactgtagggatctttccttctacatacgacctgtgggactcgctttttggtaagtcaattatctgttaattcttctatttctgaatcctaaagaaaaatggtccccaatagcttatggtttacttgaaaagttcatgaatactccggcaacagaattcaaggtgatattccagaacaatcatatctaatcgctctttcgcatgctctatatgtattcttttagggagggcaaccatctttagagtagcaattagctgaacctgccaaaaaatctttttgttagccctgatttgggaggatttccccaaaccagccaataatattatattggtaaaattaaaataaagtggacaaggaaaggcgccttgtcaggcaaagagaagagctgaagataggattagcttctatctatattgcagagtttgctggtaccaggaaacacaaaagaaatacaatactcctatctagcacctgtctagatctccttccagaaagaaaccataggctgaatggtggggccaccagcatagcatgagtatacaatgaaagcagatcataatcaccagcattatagctgattttaaaaagtaagtgttactgtgaaagtttctccttttcagggtcacaaatgattggatttttttggttatataccatttgtttgcttgcattatagttgcttttttgtggtttgaatctaacaggatttttcctacttttgttgtattgtttttttagaaaaaaacacagtaaaaatacgggcctccagtttataaacactcggcatgtagactagcgagatagtatatagattaaacaacagtcaataaatgatattaggaagaagcttgtgcagcatcggtggccctatgggggcatgctatgtcaacaatgcatcagtggccttgtcaactttattttgaccccctcaaggccttgcaaccatttcccaagccacagtatccaagaggtgacagtgtcactcaaagaagcagctgttcttagtatgtgatttaggaattcaatgaattatatctatgtatggttacacaagtcctatgctgacaatctgtaacatgtgtatgcttgtatttgaacctgaaacctgtgtaggctggtgtgagatctgtttgtggtatttttggtaacctgaaacctattttctatgctgtgtatattgctttttggtaacctgaaacctgttgtgtatgttgtgcatactacttcgtagaaacctgaaatctgttttgtatacagcagcttttatgctggtacgagattgaaaccatagaaggtgttgttttgtatgctgcttgcatgcccaaggtaccacaaagcttctatggtttagactaaagaacctactgttttgtatggcacatggtcccacaaggttaccaaagaagttgatgttttgtatgtttaacctgaaacctgtgtttgcacaaggtttcgacagcatcttccatgattcagacagcaacttctgcatcaaatagttttgttcagatttaacatagatttattcaaactaaaaacatttttcaacacagattctgcgttgtcctaatatggcgcccgtaagggcgcctcgagttctagtatgtttaagctatccctggctcttgaattactctagaatctggttaactttgtctttgctcttatgtacttatttactctctaatatacctataa

SEQ ID NO: 40685 - DNA, 2738 bp, Zea Mays
ctccagtccccactcgtcctccacccccaccgcgcctgaaatcccccacccacaacggagtactccccacaacgtcctctgcctcaccctcctcctcctcggccgcgggaggcagccacatctcaggctacggcatcgcggcggaccagacgggactgggcaggacaggacccttcacgcgccgtgcctattggaccgcagattgtgagatccaatccaatccaacaaccgaatccaatccaatccaatcagagaaaaagaaagacggcgaaaggctcatgtatgtgtggcaccacatcttgccatcagggaaaatggggctgtcaatctcgtacccaccggacgactacctgccagcagtggaggacgacatggggcggctgttcatctggtctctcagcttcgacgatatggaggctgccgccgattcgccttcgtattcgccttcggcattgcccccccgcctttggctccgggaagctgatcatggagggctccctgggcttcttcgaaagaagagaaactgacagcgtccagatgcagaacgtgctgtccatcaggaatcctaaacctcctaatagagaagcctgcagcagcgtcagtcccggtgctgcgacagctacttgtggctcaaggagaagacgatctttttaaagattttcatgttctttagcttttatcctctactaggtcatgaaaacttgcataactccattgacgaagctatcatgttgaaggtattgatcaagatcatatcagatatgtaccacttccacgcgcacctgtggtgggagatcgagatccagtgtggcctcaaccaccccaacgttccacgatgaagaacgagtcgtcctcatcctcgagcacgcggcccttggcgagatcaataagatccttcatgccactcgccgctcaatttttcatgggagactcactgaagcagatgcacacagatactttcagtagcttatcgacggtgttgatttttgtcacaagaaaaggagtctaccattgagacttaaaggatgcttagtgggtcaactgtagggatctttccttctacatacgacctgtgggactcgctttttggtaagtcaattatctgttaattcttctatttctgaatcctaaagaaaaatggtccccaatagcttatggtttacttgaaaagttcatgaatactccggcaacagaattcaaggtgatattccagaacaatcatatctaatcgctctttcgcatgctctatatgtattcttttagggagggcaaccatctttagagtagcaattagctgaacctgccaaaaaatctttttgttagccctgatttgggaggatttccccaaaccagccaataatattatattggtaaaattaaaataaagtggacaaggaaaggcgccttgtcaggcaaagagaagagctgaagataggattagcttctatctatattgcagagtttgctggtaccaggaaacacaaaagaaatacaatactcctatctagcacctgtctagatctccttccagaaagaaaccataggctgaatggtggggccaccagcatagcatgagtatacaatgaaagcagatcataatcaccagcattatagctgattttaaaaagtaagtgttactgtgaaagtttctccttttcagggtcacaaatgattggatttttttggttatataccatttgtttgcttgcattatagttgcttttttgtggtttgaatctaacaggatttttcctacttttgttgtattgtttttttagaaaaaaacacagtaaaaatacgggcctccagtttataaacactcggcatgtagactagcgagatagtatatagattaaacaacagtcaataaatgatattaggaagaagcttgtgcagcatcggtggccctatgggggcatgctatgtcaacaatgcatcagtggccttgtcaactttattttgaccccctcaaggccttgcaaccatttcccaagccacagtatccaagaggtgacagtgtcactcaaagaagcagctgttcttagtatgtgatttaggaattcaatgaattatatctatgtatggttacacaagtcctatgctgacaatctgtaacatgtgtatgcttgtatttgaacctgaaacctgtgtaggctggtgtgagatctgtttgtggtatttttggtaacctgaaacctattttctatgctgtgtatattgctttttggtaacctgaaacctgttgtgtatgttgtgcatactacttcgtagaaacctgaaatctgttttgtatacagcagcttttatgctggtacgagattgaaaccatagaaggtgttgttttgtatgctgcttgcatgcccaaggtaccacaaagcttctatggtttagactaaagaacctactgttttgtatggcacatggtcccacaaggttaccaaagaagttgatgttttgtatgtttaacctgaaacctgtgtttgcacaaggtttcgacagcatcttccatgattcagacagcaacttctgcatcaaatagttttgttcagatttaacatagatttattcaaactaaaaacatttttcaacacagattctgcgttgtcctaatatggcgcccgtaagggcgcctcgagttctagtatgtttaagctatccctggctcttgaattactctagaatctggttaactttgtctttgctcttatgtacttatttactctctaatatacctataa

SEQ ID NO: 40686 - DNA, 3239 bp, Zea Mays
ctccagtccccactcgtcctccacccccaccgcgcctgaaatcccccacccacaacggagtactccccacaacgtcctctgcctcaccctcctcctcctcggccgcgggaggcagccacatctcaggctacggcatcgcggcggaccagacgggactgggcaggacaggacccttcacgcgccgtgcctattggaccgcagattgtgagatccaatccaatccaacaaccgaatccaatccaatccaatcagagaaaaagaaagacggcgaaaggctcatgtatgtgtggcaccacatcttgccatcagggaaaatggggctgtcaatctcgtacccaccggacgactacctgccagcagtggaggacgacatggggcggctgttcatctggtctctcagcttcgacgatatggaggctgccgccgattcgccttcgtattcgccttcggcattgcccccccgcctttggctccgggaagctgatcatggagggctccctgggcttcttcgaaagaagagaaactgacagcgtccagatgcagaacgtgctgtccatcaggaatcctaaacctcctaatagagaagcctgcagcagcgtcagtcccggtgctgcgacagctacttgtggctcaaggagaagacgatctttttaaagattttcatgttctttagcttttatcctctactaggtcatgaaaacttgcataactccattgacgaagctatcatgttgaaggtattgatcaagatcatatcagatatgtaccacttccacgcgcacctgtggtgggagatcgagatccagtgtggcctcaaccaccccaacgttccacgatgaagaacgagtcgtcctcatcctcgagcacgcggcccttggcgagatcaataagatccttcatgccactcgccgctcagtaaggttttgtgtttttgatttttttggacttgttatgtatttccctgcacatacatttagaaaaatattatataagtactgcaatctccaatatttatatctcatgcatctcattttggaagttttgtgtttttggttttttttggacttgttatgtatttccctgcacatacatttagaaaaatattatataagtactgcaatctccaatatttatatctcatgcatctcattttggaaaaactcatacgaaaagcagatttcaggtggaatttggtcttcagtgcatatacacctgcaatttgttgtttctatgtgaattttttgtttgagtctgaacatcaacaatttgtggcgatgtatagctgtaccatgcactatggaggtgtgttgtttcaaatttatcttaaattcctaggcatgtttttctaggggactaccacaattctcttgaaattgtggtaagaaaactaatgacactgaaacatacaattttcagatttttcatgggagactcactgaagcagatgcacacagatactttcagtagcttatcgacggtgttgatttttgtcacaagaaaaggagtctaccattgagacttaaaggatgcttagtgggtcaactgtagggatctttccttctacatacgacctgtgggactcgctttttggtaagtcaattatctgttaattcttctatttctgaatcctaaagaaaaatggtccccaatagcttatggtttacttgaaaagttcatgaatactccggcaacagaattcaaggtgatattccagaacaatcatatctaatcgctctttcgcatgctctatatgtattcttttagggagggcaaccatctttagagtagcaattagctgaacctgccaaaaaatctttttgttagccctgatttgggaggatttccccaaaccagccaataatattatattggtaaaattaaaataaagtggacaaggaaaggcgccttgtcaggcaaagagaagagctgaagataggattagcttctatctatattgcagagtttgctggtaccaggaaacacaaaagaaatacaatactcctatctagcacctgtctagatctccttccagaaagaaaccataggctgaatggtggggccaccagcatagcatgagtatacaatgaaagcagatcataatcaccagcattatagctgattttaaaaagtaagtgttactgtgaaagtttctccttttcagggtcacaaatgattggatttttttggttatataccatttgtttgcttgcattatagttgcttttttgtggtttgaatctaacaggatttttcctacttttgttgtattgtttttttagaaaaaaacacagtaaaaatacgggcctccagtttataaacactcggcatgtagactagcgagatagtatatagattaaacaacagtcaataaatgatattaggaagaagcttgtgcagcatcggtggccctatgggggcatgctatgtcaacaatgcatcagtggccttgtcaactttattttgaccccctcaaggccttgcaaccatttcccaagccacagtatccaagaggtgacagtgtcactcaaagaagcagctgttcttagtatgtgatttaggaattcaatgaattatatctatgtatggttacacaagtcctatgctgacaatctgtaacatgtgtatgcttgtatttgaacctgaaacctgtgtaggctggtgtgagatctgtttgtggtatttttggtaacctgaaacctattttctatgctgtgtatattgctttttggtaacctgaaacctgttgtgtatgttgtgcatactacttcgtagaaacctgaaatctgttttgtatacagcagcttttatgctggtacgagattgaaaccatagaaggtgttgttttgtatgctgcttgcatgcccaaggtaccacaaagcttctatggtttagactaaagaacctactgttttgtatggcacatggtcccacaaggttaccaaagaagttgatgttttgtatgtttaacctgaaacctgtgtttgcacaaggtttcgacagcatcttccatgattcagacagcaacttctgcatcaaatagttttgttcagatttaacatagatttattcaaactaaaaacatttttcaacacagattctgcgttgtcctaatatggcgcccgtaagggcgcctcgagttctagtatgtttaagctatccctggctcttgaattactctagaatctggttaactttgtctttgctcttatgtacttatttactctctaatatacctataa

SEQ ID NO: 40687 - DNA, 2228 bp, Zea Mays
ccactcgtcctccacccccaccgcgcctgaaatcccccacccacaacggagtactccccacaacgtcctctgcctcaccctcctcctcctcggccgcgggaggcagccacatctcaggctacggcatcgcggcggaccagacgggactgggcaggacaggacccttcacgcgccgtgcctgtcatgaaaacttgcataactccattgacgaagctatcatgttgaaggtattgatcaagatcatatcagatatgtaccacttccacgcgcacctgtggtgggagatcgagatccagtgtggcctcaaccaccccaacgttccacgatgaagaacgagtcgtcctcatcctcgagcacgcggcccttggcgagatcaataagatccttcatgccactcgccgctcaatttttcatgggagactcactgaagcagatgcacacagatactttcagtagcttatcgacggtgttgatttttgtcacaagaaaaggagtctaccattgagacttaaaggatgcttagtgggtcaactgtagggatctttccttctacatacgacctgtgggactcgctttttggtaagtcaattatctgttaattcttctatttctgaatcctaaagaaaaatggtccccaatagcttatggtttacttgaaaagttcatgaatactccggcaacagaattcaaggtgatattccagaacaatcatatctaatcgctctttcgcatgctctatatgtattcttttagggagggcaaccatctttagagtagcaattagctgaacctgccaaaaaatctttttgttagccctgatttgggaggatttccccaaaccagccaataatattatattggtaaaattaaaataaagtggacaaggaaaggcgccttgtcaggcaaagagaagagctgaagataggattagcttctatctatattgcagagtttgctggtaccaggaaacacaaaagaaatacaatactcctatctagcacctgtctagatctccttccagaaagaaaccataggctgaatggtggggccaccagcatagcatgagtatacaatgaaagcagatcataatcaccagcattatagctgattttaaaaagtaagtgttactgtgaaagtttctccttttcagggtcacaaatgattggatttttttggttatataccatttgtttgcttgcattatagttgcttttttgtggtttgaatctaacaggatttttcctacttttgttgtattgtttttttagaaaaaaacacagtaaaaatacgggcctccagtttataaacactcggcatgtagactagcgagatagtatatagattaaacaacagtcaataaatgatattaggaagaagcttgtgcagcatcggtggccctatgggggcatgctatgtcaacaatgcatcagtggccttgtcaactttattttgaccccctcaaggccttgcaaccatttcccaagccacagtatccaagaggtgacagtgtcactcaaagaagcagctgttcttagtatgtgatttaggaattcaatgaattatatctatgtatggttacacaagtcctatgctgacaatctgtaacatgtgtatgcttgtatttgaacctgaaacctgtgtaggctggtgtgagatctgtttgtggtatttttggtaacctgaaacctattttctatgctgtgtatattgctttttggtaacctgaaacctgttgtgtatgttgtgcatactacttcgtagaaacctgaaatctgttttgtatacagcagcttttatgctggtacgagattgaaaccatagaaggtgttgttttgtatgctgcttgcatgcccaaggtaccacaaagcttctatggtttagactaaagaacctactgttttgtatggcacatggtcccacaaggttaccaaagaagttgatgttttgtatgtttaacctgaaacctgtgtttgcacaaggtttcgacagcatcttccatgattcagacagcaacttctgcatcaaatagttttgttcagatttaacatagatttattcaaactaaaaacatttttcaacacagattctgcgttgtcctaatatggcgcccgtaagggcgcctcgagttctagtatgtttaagctatccctggctcttgaattactctagaatctggttaactttgtctttgctcttatgtacttatttactctctaatatacctataa

SEQ ID NO: 40688 - DNA, 2233 bp, Zea Mays
ccactcgtcctccacccccaccgcgcctgaaatcccccacccacaacggagtactccccacaacgtcctctgcctcaccctcctcctcctcggccgcgggaggcagccacatctcaggctacggcatcgcggcggaccagacgggactgggcaggacaggacccttcacgcgccgtgcctgtcatgaaaacttgcataactccattgacgaagctatcatgttgaaggtattgatcaagatcatatcagatatgtaccacttccacgcgcacctgtggtgggagatcgagatccagtgtggcctcaaccaccccaacgttccacgatgaagaacgagtcgtcctcatcctcgagcacgcggcccttggcgagatcaataagatccttcatgccactcgccgctcagtaagatttttcatgggagactcactgaagcagatgcacacagatactttcagtagcttatcgacggtgttgatttttgtcacaagaaaaggagtctaccattgagacttaaaggatgcttagtgggtcaactgtagggatctttccttctacatacgacctgtgggactcgctttttggtaagtcaattatctgttaattcttctatttctgaatcctaaagaaaaatggtccccaatagcttatggtttacttgaaaagttcatgaatactccggcaacagaattcaaggtgatattccagaacaatcatatctaatcgctctttcgcatgctctatatgtattcttttagggagggcaaccatctttagagtagcaattagctgaacctgccaaaaaatctttttgttagccctgatttgggaggatttccccaaaccagccaataatattatattggtaaaattaaaataaagtggacaaggaaaggcgccttgtcaggcaaagagaagagctgaagataggattagcttctatctatattgcagagtttgctggtaccaggaaacacaaaagaaatacaatactcctatctagcacctgtctagatctccttccagaaagaaaccataggctgaatggtggggccaccagcatagcatgagtatacaatgaaagcagatcataatcaccagcattatagctgattttaaaaagtaagtgttactgtgaaagtttctccttttcagggtcacaaatgattggatttttttggttatataccatttgtttgcttgcattatagttgcttttttgtggtttgaatctaacaggatttttcctacttttgttgtattgtttttttagaaaaaaacacagtaaaaatacgggcctccagtttataaacactcggcatgtagactagcgagatagtatatagattaaacaacagtcaataaatgatattaggaagaagcttgtgcagcatcggtggccctatgggggcatgctatgtcaacaatgcatcagtggccttgtcaactttattttgaccccctcaaggccttgcaaccatttcccaagccacagtatccaagaggtgacagtgtcactcaaagaagcagctgttcttagtatgtgatttaggaattcaatgaattatatctatgtatggttacacaagtcctatgctgacaatctgtaacatgtgtatgcttgtatttgaacctgaaacctgtgtaggctggtgtgagatctgtttgtggtatttttggtaacctgaaacctattttctatgctgtgtatattgctttttggtaacctgaaacctgttgtgtatgttgtgcatactacttcgtagaaacctgaaatctgttttgtatacagcagcttttatgctggtacgagattgaaaccatagaaggtgttgttttgtatgctgcttgcatgcccaaggtaccacaaagcttctatggtttagactaaagaacctactgttttgtatggcacatggtcccacaaggttaccaaagaagttgatgttttgtatgtttaacctgaaacctgtgtttgcacaaggtttcgacagcatcttccatgattcagacagcaacttctgcatcaaatagttttgttcagatttaacatagatttattcaaactaaaaacatttttcaacacagattctgcgttgtcctaatatggcgcccgtaagggcgcctcgagttctagtatgtttaagctatccctggctcttgaattactctagaatctggttaactttgtctttgctcttatgtacttatttactctctaatatacctataa

SEQ ID NO: 40689 - DNA, 1317 bp, Zea Mays
ccactcgtcctccacccccaccgcgcctgaaatcccccacccacaacggagtactccccacaacgtcctctgcctcaccctcctcctcctcggccgcgggaggcagccacatctcaggctacggcatcgcggcggaccagacgggactgggcaggacaggacccttcacgcgccgtgcctgtcatgaaaacttgcataactccattgacgaagctatcatgttgaaggtattgatcaagatcatatcagatatgtaccacttccacgcgcacctgtggtgggagatcgagatccagtgtggcctcaaccaccccaacgttccacgatgaagaacgagtcgtcctcatcctcgagcacgcggcccttggcgagatcaataagatccttcatgccactcgccgctcagtaaggttttgtgtttttgatttttttggacttgttatgtatttccctgcacatacatttagaaaaatattatataagtactgcaatctccaatatttatatctcatgcatctcattttggaagttttgtgtttttggttttttttggacttgttatgtatttccctgcacatacatttagaaaaatattatataagtactgcaatctccaatatttatatctcatgcatctcattttggaaaaactcatacgaaaagcagatttcaggtggaatttggtcttcagtgcatatacacctgcaatttgttgtttctatgtgaattttttgtttgagtctgaacatcaacaatttgtggcgatgtatagctgtaccatgcactatggagatttttcatgggagactcactgaagcagatgcacacagatactttcagtagcttatcgacggtgttgatttttgtcacaagaaaaggagtctaccattgagacttaaaggatgcttagtgggtcaactgtagggatctttccttctacatacgacctgtgggactcgctttttggtcttattctacgggctacctgctatgggatttgactaaaacacacatttaccttgcttgtggtgagctctttggtgggaaacgtttgatgaagccatgtttccatgtttagagaatcacatcacagtcggacctggaactctggaagagaatacctaagggctagcaggatcaacaattgattacatggtttctgtaattttttgtactgaactgaatttaagcatttatgttatattataaagttcaatttagaaggtaaaaacaaaattgttttgtgctaaaccattgatgtgtgttgtacctttttttttgaaaatataacagaaatgctgaaattataaaagtgac

SEQ ID NO: 40690 - DNA, 2917 bp, Zea Mays
taaacttttagagaagacgttggattttggaggcaaggtctgtttcttgattcttggtcaatgtttgcaccattagttttccttctgatcttgcatgcccttctcaagataaagatggttgctgttcttgttgatttgcatgcttcctttactttccttgattgttctccattccttgcttcgtgacctgcaatctattcctgaagatgggaaactgtttgcaaagagcagcataaacccaacccaaaaaggcttcaaatgtgttcttttttctgaaacagttcttgcccaatcacaaaacttgaacctttttttagattcaggaacataacttgaacttggtgtccattcttccttggcacatgcagattggaccgcagattgtgagatccaatccaatccaacaaccgaatccaatccaatccaatcagagaaaaagaaagacggcgaaaggctcatgtatgtgtggcaccacatcttgccatcagggaaaatggggctgtcaatctcgtacccaccggacgactacctgccagcagtggaggacgacatggggcggctgttcatctggtctctcagcttcgacgatatggaggctgccgccgattcgccttcgtattcgccttcggcattgcccccccgcctttggctccgggaagctgatcatggagggctccctgggcttcttcgaaagaagagaaactgacagcgtccagatgcagaacgtgctgtccatcaggaatcctaaacctcctaatagagaagcctgcagcagcgtcagtcccggtgctgcgacagctacttgtggctcaaggagaagacgatctttttaaagattttcatgttctttagcttttatcctctactaggtcatgaaaacttgcataactccattgacgaagctatcatgttgaaggtattgatcaagatcatatcagatatgtaccacttccacgcgcacctgtggtgggagatcgagatccagtgtggcctcaaccaccccaacgttccacgatgaagaacgagtcgtcctcatcctcgagcacgcggcccttggcgagatcaataagatccttcatgccactcgccgctcaatttttcatgggagactcactgaagcagatgcacacagatactttcagtagcttatcgacggtgttgatttttgtcacaagaaaaggagtctaccattgagacttaaaggatgcttagtgggtcaactgtagggatctttccttctacatacgacctgtgggactcgctttttggtaagtcaattatctgttaattcttctatttctgaatcctaaagaaaaatggtccccaatagcttatggtttacttgaaaagttcatgaatactccggcaacagaattcaaggtgatattccagaacaatcatatctaatcgctctttcgcatgctctatatgtattcttttagggagggcaaccatctttagagtagcaattagctgaacctgccaaaaaatctttttgttagccctgatttgggaggatttccccaaaccagccaataatattatattggtaaaattaaaataaagtggacaaggaaaggcgccttgtcaggcaaagagaagagctgaagataggattagcttctatctatattgcagagtttgctggtaccaggaaacacaaaagaaatacaatactcctatctagcacctgtctagatctccttccagaaagaaaccataggctgaatggtggggccaccagcatagcatgagtatacaatgaaagcagatcataatcaccagcattatagctgattttaaaaagtaagtgttactgtgaaagtttctccttttcagggtcacaaatgattggatttttttggttatataccatttgtttgcttgcattatagttgcttttttgtggtttgaatctaacaggatttttcctacttttgttgtattgtttttttagaaaaaaacacagtaaaaatacgggcctccagtttataaacactcggcatgtagactagcgagatagtatatagattaaacaacagtcaataaatgatattaggaagaagcttgtgcagcatcggtggccctatgggggcatgctatgtcaacaatgcatcagtggccttgtcaactttattttgaccccctcaaggccttgcaaccatttcccaagccacagtatccaagaggtgacagtgtcactcaaagaagcagctgttcttagtatgtgatttaggaattcaatgaattatatctatgtatggttacacaagtcctatgctgacaatctgtaacatgtgtatgcttgtatttgaacctgaaacctgtgtaggctggtgtgagatctgtttgtggtatttttggtaacctgaaacctattttctatgctgtgtatattgctttttggtaacctgaaacctgttgtgtatgttgtgcatactacttcgtagaaacctgaaatctgttttgtatacagcagcttttatgctggtacgagattgaaaccatagaaggtgttgttttgtatgctgcttgcatgcccaaggtaccacaaagcttctatggtttagactaaagaacctactgttttgtatggcacatggtcccacaaggttaccaaagaagttgatgttttgtatgtttaacctgaaacctgtgtttgcacaaggtttcgacagcatcttccatgattcagacagcaacttctgcatcaaatagttttgttcagatttaacatagatttattcaaactaaaaacatttttcaacacagattctgcgttgtcctaatatggcgcccgtaagggcgcctcgagttctagtatgtttaagctatccctggctcttgaattactctagaatctggttaactttgtctttgctcttatgtacttatttactctctaatatacctataa

SEQ ID NO: 40691 - DNA, 1619 bp, Zea Mays
taaacttttagagaagacgttggattttggaggcaaggtctgtttcttgattcttggtcaatgtttgcaccattagttttccttctgatcttgcatgcccttctcaagataaagatggttgctgttcttgttgatttgcatgcttcctttactttccttgattgttctccattccttgcttcgtgacctgcaatctattcctgaagatgggaaactgtttgcaaagagcagcataaacccaacccaaaaaggcttcaaatgtgttcttttttctgaaacagttcttgcccaatcacaaaacttgaacctttttttagattcaggaacataacttgaacttggtgtccattcttccttggcacatgcagattggaccgcagattgtgagatccaatccaatccaacaaccgaatccaatccaatccaatcagagaaaaagaaagacggcgaaaggctcatgtatgtgtggcaccacatcttgccatcagggaaaatggggctgtcaatctcgtacccaccggacgactacctgccagcagtggaggacgacatggggcggctgttcatctggtctctcagcttcgacgatatggaggctgccgccgattcgccttcgtattcgccttcggcattgcccccccgcctttggctccgggaagctgatcatggagggctccctgggcttcttcgaaagaagagaaactgacagcgtccagatgcagaacgtgctgtccatcaggaatcctaaacctcctaatagagaagcctgcagcagcgtcagtcccggtgctgcgacagctacttgtggctcaaggagaagacgatctttttaaagattttcatgttctttagcttttatcctctactaggtcatgaaaacttgcataactccattgacgaagctatcatgttgaaggtattgatcaagatcatatcagatatgtaccacttccacgcgcacctgtggtgggagatcgagatccagtgtggcctcaaccaccccaacgttccacgatgaagaacgagtcgtcctcatcctcgagcacgcggcccttggcgagatcaataagatccttcatgccactcgccgctcaatttttcatgggagactcactgaagcagatgcacacagatactttcagtagcttatcgacggtgttgatttttgtcacaagaaaaggagtctaccattgagacttaaaggatgcttagtgggtcaactgtagggatctttccttctacatacgacctgtgggactcgctttttggtcttattctacgggctacctgctatgggatttgactaaaacacacatttaccttgcttgtggtgagctctttggtgggaaacgtttgatgaagccatgtttccatgtttagagaatcacatcacagtcggacctggaactctggaagagaatacctaagggctagcaggatcaacaattgattacatggtttctgtaattttttgtactgaactgaatttaagcatttatgttatattataaagttcaatttagaaggtaaaaacaaaattgttttgtgctaaaccattgatgtgtgttgtacctttttttttgaaaatataacagaaatgctgaaattataaaagtgac

SEQ ID NO: 40692 - DNA, 3155 bp, Zea Mays
cttgattcttggtcaatgtttgcaccattagttttccttctgatcttgcatgcccttctcaagataaagatggttgctgttcttgttgatttgcatgcttcctttactttccttgattgttctccattccttgcttcgtgacctgcaatctattcctgaagatgggaaactgtttgcaaagagcagcataaacccaacccaaaaaggcttcaaatgtgttcttttttctgaaacagttcttgcccaatcacaaaacttgaacctttttttagattcaggaacataacttgaacttggtgtccattcttccttggcacatgcagattggaccgcagattgtgagatccaatccaatccaacaaccgaatccaatccaatccaatcagagaaaaagaaagacggcgaaaggctcatgtatgtgtggcaccacatcttgccatcagggaaaatggggctgtcaatctcgtacccaccggacgactacctgccagcagtggaggacgacatggggcggctgttcatctggtctctcagcttcgacgatatggaggctgccgccgattcgccttcgtattcgccttcggcattgcccccccgcctttggctccgggaagctgatcatggagggctccctgggcttcttcgaaagaagagaaactgacagcgtccagatgcagaacgtgctgtccatcaggaatcctaaacctcctaatagagaagcctgcagcagcgtcagtcccggtgctgcgacagctacttgtggctcaaggagaagacgatctttttaaagattttcatgttctttagcttttatcctctactagggacaattggttgcagtcaggtttttttgtaaagtcaaaattatagaccaaaattaggtaaaaagaccagtcgagtgacttttggatttttccccccgcttatcaggggttcacatggaagatctatgccttttgagtggtttgatttgtccacgattgtcagaaattgataaatccattatgtttcagattatgggcaaaattaaaaataagaaggtgaagccccatgcttgtatacctatggttgacattttttccatgatcttatccccgtgcaggtcatgaaaacttgcataactccattgacgaagctatcatgttgaaggtattgatcaagatcatatcagatatgtaccacttccacgcgcacctgtggtgggagatcgagatccagtgtggcctcaaccaccccaacgttccacgatgaagaacgagtcgtcctcatcctcgagcacgcggcccttggcgagatcaataagatccttcatgccactcgccgctcagtaagatttttcatgggagactcactgaagcagatgcacacagatactttcagtagcttatcgacggtgttgatttttgtcacaagaaaaggagtctaccattgagacttaaaggatgcttagtgggtcaactgtagggatctttccttctacatacgacctgtgggactcgctttttggtaagtcaattatctgttaattcttctatttctgaatcctaaagaaaaatggtccccaatagcttatggtttacttgaaaagttcatgaatactccggcaacagaattcaaggtgatattccagaacaatcatatctaatcgctctttcgcatgctctatatgtattcttttagggagggcaaccatctttagagtagcaattagctgaacctgccaaaaaatctttttgttagccctgatttgggaggatttccccaaaccagccaataatattatattggtaaaattaaaataaagtggacaaggaaaggcgccttgtcaggcaaagagaagagctgaagataggattagcttctatctatattgcagagtttgctggtaccaggaaacacaaaagaaatacaatactcctatctagcacctgtctagatctccttccagaaagaaaccataggctgaatggtggggccaccagcatagcatgagtatacaatgaaagcagatcataatcaccagcattatagctgattttaaaaagtaagtgttactgtgaaagtttctccttttcagggtcacaaatgattggatttttttggttatataccatttgtttgcttgcattatagttgcttttttgtggtttgaatctaacaggatttttcctacttttgttgtattgtttttttagaaaaaaacacagtaaaaatacgggcctccagtttataaacactcggcatgtagactagcgagatagtatatagattaaacaacagtcaataaatgatattaggaagaagcttgtgcagcatcggtggccctatgggggcatgctatgtcaacaatgcatcagtggccttgtcaactttattttgaccccctcaaggccttgcaaccatttcccaagccacagtatccaagaggtgacagtgtcactcaaagaagcagctgttcttagtatgtgatttaggaattcaatgaattatatctatgtatggttacacaagtcctatgctgacaatctgtaacatgtgtatgcttgtatttgaacctgaaacctgtgtaggctggtgtgagatctgtttgtggtatttttggtaacctgaaacctattttctatgctgtgtatattgctttttggtaacctgaaacctgttgtgtatgttgtgcatactacttcgtagaaacctgaaatctgttttgtatacagcagcttttatgctggtacgagattgaaaccatagaaggtgttgttttgtatgctgcttgcatgcccaaggtaccacaaagcttctatggtttagactaaagaacctactgttttgtatggcacatggtcccacaaggttaccaaagaagttgatgttttgtatgtttaacctgaaacctgtgtttgcacaaggtttcgacagcatcttccatgattcagacagcaacttctgcatcaaatagttttgttcagatttaacatagatttattcaaactaaaaacatttttcaacacagattctgcgttgtcctaatatggcgcccgtaagggcgcctcgagttctagtatgtttaagctatccctggctcttgaattactctagaatctggttaactttgtctttgctcttatgtacttatttactctctaatatacctataa

SEQ ID NO: 40693 - DNA, 2929 bp, Zea Mays
cttgattcttggtcaatgtttgcaccattagttttccttctgatcttgcatgcccttctcaagataaagatggttgctgttcttgttgatttgcatgcttcctttactttccttgattgttctccattccttgcttcgtgacctgcaatctattcctgaagatgggaaactgtttgcaaagagcagcataaacccaacccaaaaaggcttcaaatgtgttcttttttctgaaacagttcttgcccaatcacaaaacttgaacctttttttagattcaggaacataacttgaacttggtgtccattcttccttggcacatgcagattggaccgcagattgtgagatccaatccaatccaacaaccgaatccaatccaatccaatcagagaaaaagaaagacggcgaaaggctcatgtatgtgtggcaccacatcttgccatcagggaaaatggggctgtcaatctcgtacccaccggacgactacctgccagcagtggaggacgacatggggcggctgttcatctggtctctcagcttcgacgatatggaggctgccgccgattcgccttcgtattcgccttcggcattgcccccccgcctttggctccgggaagctgatcatggagggctccctgggcttcttcgaaagaagagaaactgacagcgtccagatgcagaacgtgctgtccatcaggaatcctaaacctcctaatagagaagcctgcagcagcgtcagtcccggtgctgcgacagctacttgtggctcaaggagaagacgatctttttaaagattttcatgttctttagcttttatcctctactagggacaattggttgcagtcaggtttttttgtaaagtcaaaattatagaccaaaattaggtcatgaaaacttgcataactccattgacgaagctatcatgttgaaggtattgatcaagatcatatcagatatgtaccacttccacgcgcacctgtggtgggagatcgagatccagtgtggcctcaaccaccccaacgttccacgatgaagaacgagtcgtcctcatcctcgagcacgcggcccttggcgagatcaataagatccttcatgccactcgccgctcaatttttcatgggagactcactgaagcagatgcacacagatactttcagtagcttatcgacggtgttgatttttgtcacaagaaaaggagtctaccattgagacttaaaggatgcttagtgggtcaactgtagggatctttccttctacatacgacctgtgggactcgctttttggtaagtcaattatctgttaattcttctatttctgaatcctaaagaaaaatggtccccaatagcttatggtttacttgaaaagttcatgaatactccggcaacagaattcaaggtgatattccagaacaatcatatctaatcgctctttcgcatgctctatatgtattcttttagggagggcaaccatctttagagtagcaattagctgaacctgccaaaaaatctttttgttagccctgatttgggaggatttccccaaaccagccaataatattatattggtaaaattaaaataaagtggacaaggaaaggcgccttgtcaggcaaagagaagagctgaagataggattagcttctatctatattgcagagtttgctggtaccaggaaacacaaaagaaatacaatactcctatctagcacctgtctagatctccttccagaaagaaaccataggctgaatggtggggccaccagcatagcatgagtatacaatgaaagcagatcataatcaccagcattatagctgattttaaaaagtaagtgttactgtgaaagtttctccttttcagggtcacaaatgattggatttttttggttatataccatttgtttgcttgcattatagttgcttttttgtggtttgaatctaacaggatttttcctacttttgttgtattgtttttttagaaaaaaacacagtaaaaatacgggcctccagtttataaacactcggcatgtagactagcgagatagtatatagattaaacaacagtcaataaatgatattaggaagaagcttgtgcagcatcggtggccctatgggggcatgctatgtcaacaatgcatcagtggccttgtcaactttattttgaccccctcaaggccttgcaaccatttcccaagccacagtatccaagaggtgacagtgtcactcaaagaagcagctgttcttagtatgtgatttaggaattcaatgaattatatctatgtatggttacacaagtcctatgctgacaatctgtaacatgtgtatgcttgtatttgaacctgaaacctgtgtaggctggtgtgagatctgtttgtggtatttttggtaacctgaaacctattttctatgctgtgtatattgctttttggtaacctgaaacctgttgtgtatgttgtgcatactacttcgtagaaacctgaaatctgttttgtatacagcagcttttatgctggtacgagattgaaaccatagaaggtgttgttttgtatgctgcttgcatgcccaaggtaccacaaagcttctatggtttagactaaagaacctactgttttgtatggcacatggtcccacaaggttaccaaagaagttgatgttttgtatgtttaacctgaaacctgtgtttgcacaaggtttcgacagcatcttccatgattcagacagcaacttctgcatcaaatagttttgttcagatttaacatagatttattcaaactaaaaacatttttcaacacagattctgcgttgtcctaatatggcgcccgtaagggcgcctcgagttctagtatgtttaagctatccctggctcttgaattactctagaatctggttaactttgtctttgctcttatgtacttatttactctctaatatacctataa

SEQ ID NO: 40694 - DNA, 2326 bp, Zea Mays
ggacaattggttgcagtcaggtttttttgtaaagtcaaaattatagaccaaaattaggtaaaaagaccagtcgagtgacttttggatttttccccccgcttatcaggggttcacatggaagatctatgccttttgagtggtttgatttgtccacgattgtcagaaattgataaatccattatgtttcagattatgggcaaaattaaaaataagaaggtgaagccccatgcttgtatacctatggttgacattttttccatgatcttatccccgtgcaggtcatgaaaacttgcataactccattgacgaagctatcatgttgaaggtattgatcaagatcatatcagatatgtaccacttccacgcgcacctgtggtgggagatcgagatccagtgtggcctcaaccaccccaacgttccacgatgaagaacgagtcgtcctcatcctcgagcacgcggcccttggcgagatcaataagatccttcatgccactcgccgctcaatttttcatgggagactcactgaagcagatgcacacagatactttcagtagcttatcgacggtgttgatttttgtcacaagaaaaggagtctaccattgagacttaaaggatgcttagtgggtcaactgtagggatctttccttctacatacgacctgtgggactcgctttttggtaagtcaattatctgttaattcttctatttctgaatcctaaagaaaaatggtccccaatagcttatggtttacttgaaaagttcatgaatactccggcaacagaattcaaggtgatattccagaacaatcatatctaatcgctctttcgcatgctctatatgtattcttttagggagggcaaccatctttagagtagcaattagctgaacctgccaaaaaatctttttgttagccctgatttgggaggatttccccaaaccagccaataatattatattggtaaaattaaaataaagtggacaaggaaaggcgccttgtcaggcaaagagaagagctgaagataggattagcttctatctatattgcagagtttgctggtaccaggaaacacaaaagaaatacaatactcctatctagcacctgtctagatctccttccagaaagaaaccataggctgaatggtggggccaccagcatagcatgagtatacaatgaaagcagatcataatcaccagcattatagctgattttaaaaagtaagtgttactgtgaaagtttctccttttcagggtcacaaatgattggatttttttggttatataccatttgtttgcttgcattatagttgcttttttgtggtttgaatctaacaggatttttcctacttttgttgtattgtttttttagaaaaaaacacagtaaaaatacgggcctccagtttataaacactcggcatgtagactagcgagatagtatatagattaaacaacagtcaataaatgatattaggaagaagcttgtgcagcatcggtggccctatgggggcatgctatgtcaacaatgcatcagtggccttgtcaactttattttgaccccctcaaggccttgcaaccatttcccaagccacagtatccaagaggtgacagtgtcactcaaagaagcagctgttcttagtatgtgatttaggaattcaatgaattatatctatgtatggttacacaagtcctatgctgacaatctgtaacatgtgtatgcttgtatttgaacctgaaacctgtgtaggctggtgtgagatctgtttgtggtatttttggtaacctgaaacctattttctatgctgtgtatattgctttttggtaacctgaaacctgttgtgtatgttgtgcatactacttcgtagaaacctgaaatctgttttgtatacagcagcttttatgctggtacgagattgaaaccatagaaggtgttgttttgtatgctgcttgcatgcccaaggtaccacaaagcttctatggtttagactaaagaacctactgttttgtatggcacatggtcccacaaggttaccaaagaagttgatgttttgtatgtttaacctgaaacctgtgtttgcacaaggtttcgacagcatcttccatgattcagacagcaacttctgcatcaaatagttttgttcagatttaacatagatttattcaaactaaaaacatttttcaacacagattctgcgttgtcctaatatggcgcccgtaagggcgcctcgagttctagtatgtttaagctatccctggctcttgaattactctagaatctggttaactttgtctttgctcttatgtacttatttactctctaatatacctataa

SEQ ID NO: 40695 - DNA, 1207 bp, Zea Mays
ccagattcgtgtcgcttcagcttctccagcgaaaagatcagcggtggcgcttggaagcctagaggtcgcgatgcggacctatttttatatgtgggtcacggtgcggacattcctatatattaaagcgcgacacaaaggtcgctcttcgtgcagccacgtcattgaaatattaacagtcgtaggatcttcatcggactgagcagcccaccctttcgcggctcgaagagtctcgacgtttccggtcgccggttcctctacctcccacggatacgcggccgctagaccgcctactctccccatccctcgccgcctcgcttcaccccacctatggtcgccgctgctcgcatcgccctgcggcccccacctctctctccctttctcctcgcaacgccgcccccgtttgtccaccaagtcaccacgcgcctgggagatggatcaaggggcgcgcagcagtccggtcaagacacgctcaacgaaagcttcaagatagcacgggagatggaagccccaccatcggctaggaatcgttgcatcacgtcatccgattcctctcccttccgttcctttgctttcgtggtggatgagaagaaagcggcgaagggcgcatcggaaaagagagcctggaggaggaggcacaccatccttcctcttgcacacggagtcctcaagctttctcctcaccttgctggaattccgggtgccatacatcatctctgtcggcagttcgtcacctcccaacctgctacacgaagggataaaatttcattcccaagctgctaaatggggcataagtggtttcatctcagaataaaaaacgagtgctgctggagtattatgatgcctttctaggcacatggtcttattctacgggctacctgctatgggatttgactaaaacacacatttaccttgcttgtggtgagctctttggtgggaaacgtttgatgaagccatgtttccatgtttagagaatcacatcacagtcggacctggaactctggaagagaatacctaagggctagcaggatcaacaattgattacatggtttctgtaattttttgtactgaactgaatttaagcatttatgttatattataaagttcaatttagaaggtaaaaacaaaattgttttgtgctaaaccattgatgtgtgttgtacctttttttttgaaaatataacagaaatgctgaaattataaaagtgac

SEQ ID NO: 40696 - DNA, 955 bp, Zea Mays
agagtctcgacgtttccggtcgccggttcctctacctcccacggatacgcggccgctagaccgcctactctccccatccctcgccgcctcgcttcaccccacctatggtcgccgctgctcgcatcgccctgcggcccccacctctctctccctttctcctcgcaacgccgcccccgtttgtccaccaagtcaccacgcgcctgggagatggatcaaggggcgcgcagcagtccggtcaagacacgctcaacgaaagcttcaagatagcacgggagatggaagccccaccatcggctaggaatcgttgcatcacgtcatccgattcctctcccttccgttcctttgctttcgtggtggatgagaagaaagcggcgaagggcgcatcggaaaagagagcctggaggaggaggcacaccatccttcctcttgcacacggagtcctcaagctttctcctcaccttgctggaattccgggtgccatacatcatctctgtcggcagggataaaatttcattcccaagctgctaaatggggcataagtggtttcatctcagaataaaaaacgagtgctgctggagtattatgatgcctttctaggcacatggtcttattctacgggctacctgctatgggatttgactaaaacacacatttaccttgcttgtggtgagctctttggtgggaaacgtttgatgaagccatgtttccatgtttagagaatcacatcacagtcggacctggaactctggaagagaatacctaagggctagcaggatcaacaattgattacatggtttctgtaattttttgtactgaactgaatttaagcatttatgttatattataaagttcaatttagaaggtaaaaacaaaattgttttgtgctaaaccattgatgtgtgttgtacctttttttttgaaaatataacagaaatgctgaaattataaaagtgac

SEQ ID NO: 40697 - DNA, 1642 bp, Zea Mays
gttttgaggtggtaatggcggaccaggctaaccaacccactgtccttcataagctaggtggccagttccacctgagctccagcttctctgaaggtgtacgggcccgtaacatctgcccttctttctcaccttatgaaaggagatttgccacgaggaactacatgacccagagcctttggggcccttcaatgtctgttagcggtggcatcaatgttccagtgatgccgactccgctttttgccaatgctccagccgagaaaggtggcaaaaacttcatgattgatttcatgatgggcggtgtttcagctgctgtttcgaagactgcagctgctcccattgaacgagtgaagctgcttattcagaatcaggatgagatgatcaagtctggtaggctatcagagccgtacaagggtattgctgattgcttcaaacgtaccatcaaggatgagggtttctcttccttgtggaggggtaacactgctaatgttattcgttacttccctactcaggctttgaactttgcgtttaaggactacttcaagaggctgttcaacttcaagaaggacagggatggttactggaagtggtttgctggcaacctggcctctggtggtgctgctggtgcttcctctttgttttttgtgtactccctggattatgcgaggacaaggttggccaatgatgccaaggctgccaagggaggaggcgatagacaattcaatggtcttgtggatgtctaccgcaagacactcaaatctgatggtattgctgggctttaccgtggatttaacatatcttgtgttggaattattgtttatcgtggcctgtatttcggactttacgattctatcaagccagttgtcctcactggcagcctccaggacaacttctttgccagttttgctctgggttggctgatcaccaacggtgctggtcttgcatcttaccccattgatactgtccgcagaaggatgatgatgacttctggtgaggctgtcaagtacaagagctcattggacgcattccagcagatccttaagaaggaaggccccaagtccctgttcaagggtgctggtgctaacattcttcgtgccattgctggcgctggtgtgctttctggctacgaccagctccagatcctcttcttcggaaagaagtacggctccggcggtgcttaaatggagaaaaatgatgacgaacaagagcagttcgctcccggtccagcccagtcaggatctggtcaagtttttgcctttcatatcgaagaaattaataatttatgtaggagaatttttccaacattcgttttgggcggagacattgatctcaaaacactcgtaactgtcctactaggtggtggcatgggtccccaaaacatggtcatagggtgtgtctagtctgcccttcgttgcagccgggcaattttccttacatatattgcctttaatcaagtatcagatgagtgtcaagtcgctgcggttaattgtttgtttttcttatgctttgcttgattgtgatagcatttttattatgactgggtttcttgagaatggtgcatttggtttacatgtgcgtcagaaagactttgtaccagccgttgggattgctgcagccgcaatgtagaaaaaatagaagccgtttt

SEQ ID NO: 40698 - DNA, 1571 bp, Zea Mays
gtagatcgattatttccggtttaggcttggattgtttgtggtagcctcggcctttggagttcattcagatcggtgattcctgcgtcggccaacagttttgaggtggtaatggcggaccaggctaaccaacccactgtccttcataagctaggtggccagttccacctgagctccagcttctctgaaggtgtacgggcccgtaacatctgcccttctttctcaccttatgaaaggagatttgccacgaggaactacatgacccagagcctttggggcccttcaatgtctgttagcggtggcatcaatgttccagtgatgccgactccgctttttgccaatgctccagccgagaaaggtggcaaaaacttcatgattgatttcatgatgggcggtgtttcagctgctgtttcgaagactgcagctgctcccattgaacgagtgaagctgcttattcagaatcaggatgagatgatcaagtctggtaggctatcagagccgtacaagggtattgctgattgcttcaaacgtaccatcaaggatgagggtttctcttccttgtggaggggtaacactgctaatgttattcgttacttccctactcaggctttgaactttgcgtttaaggactacttcaagaggctgttcaacttcaagaaggacagggatggttactggaagtggtttgctggcaacctggcctctggtggtgctgctggtgcttcctctttgttttttgtgtactccctggattatgcgaggacaaggttggccaatgatgccaaggctgccaagggaggaggcgatagacaattcaatggtcttgtggatgtctaccgcaagacactcaaatctgatggtattgctgggctttaccgtggatttaacatatcttgtgttggaattattgtttatcgtggcctgtatttcggactttacgattctatcaagccagttgtcctcactggcagcctccaggacaacttctttgccagttttgctctgggttggctgatcaccaacggtgctggtcttgcatcttaccccattgatactgtccgcagaaggatgatgatgacttctggtgaggctgtcaagtacaagagctcattggacgcattccagcagatccttaagaaggaaggccccaagtccctgttcaagggtgctggtgctaacattcttcgtgccattgctggcgctggtgtgctttctggctacgaccagctccagatcctcttcttcggaaagaagtacggctccggcggtgcttaaatggagaaaaatgatgacgaacaagagcagttcgctcccggtccagcccagtcaggatctggtcaagtttttgcctttcatatcgaagaaattaataatttatgtaggagaatttttccaacattcgttttgggcggagacattgatctcaaaacactcgtaactgtcctactaggtggtggcatgggtccccaaaacatggtcatagggtgtgtctagtctgcccttcgttgcagccgggcaattttccttacatatattgcctttaatcaagtatcagatgagtgtcaaaaaaagag

SEQ ID NO: 40699 - DNA, 3003 bp, Zea Mays
gaaaaaaccatttttttcttcgatcaactcagccctctgaataaagcaataggaaggtggaaaaaagagcagctgtttcctcgattccaatggcttaacccaaagaaacctaattcggcgacaggacaaacacgagaaaccggccccacccctgccctcacctcctctccaccactttccctctgcgcctcggcccccacgaaatctggaaagcctggacgccattgctcacctttttccgtccagcgcaaagacaccgcgcgccagagagggtgagggattgccgtgaccgattcgaaagccgcttcgggcgcgggtgggatcggcccgtggccggcggagatgtccggattcgtcggtgtcgtcgtgtccgacccctcgctgcaggggcagttcacgcaggtcgagctccgatcgctcaaggccaagttcgtgtctctgaagagagattccggccatgtcaccactaagaatctcccggtgatgatgaagaagctgagggggctcaatgaggtggtctctgtggaggagatcgcggccttcctgtccgagtcgtaccccgacagcgatcaggagattgaattcgaatccttcctccgggagtatctgaatctgcaggcgcgggtgagtgccaaggagggtggtgccggcggtggccggggtggcaagtcgtcgttcctcaagtccagcaccactacgctgctgcacaacctcaatcaggcagagaaatcttcgtatgtggcgcacatcaatacttacctccgtgaagacccattcctgaagaagtacttgcccatggacccgtctggaaaccagctgttcgatctcatccgggatggtgttctgctctgcaaactgatcaatgtagctgtacctgggaccattgatgagagggcaataaataagaaaagagttcttaacccatgggagagaaatgaaaatcacacgctctgcctcaattccgccaaggccattggatgcactgttgtcaacattggcacacaggatttggtggagggaaggcctcatttagttcttggattgatatcacaaatcataaagattcaacttttagctgatcttaacctcaagaagacaccacagctggtggagctatttgatgacagcaaggatatagacgaggttttgagtttgtcgccagaaaagatgctacttcggtggatgaaccatcatctgaaaaaagctggctacaagaaaactgttaacaatttctcttcagatgtgaaggatggtgaagcgtatgcttaccttctgaaagctcttgctccagagcattcccctgaaactacattggacaccaaggatccgaatgagagggcaaaactagtacttgaacaagcggcgaagttggactgtaagagatacttgaccccgaaggatatcactgagggatctgccaatttaaatcttgcatttgttgcacaaatattccagcataggaatggtctcaccagtgacaccaaacaagttactctcacacagaccgcaacacctgatgatgttctagtatctagagaagaaagagcctttcggatgtggatcaacagccttgggatgggtacttcttgaagtgcttgacaaggtgtctcctggatctgtcaattggaagctggcaacaaaacctccaattaaattgccatttagaaaactggagaattgcaatcaagttgtaaaaattgggaagcagttgaagttttctttagtaaatctggctggaaacgatattgttcagggaaataagaaattgattgttgcacttctgtggcaattgatgagattcaatatcctccagctgttaaacaaactgagattccactcccaaggagggtcccaaggaaaagaaatttctgatgctgatattctagactgggccaacagcaaagtgaaagcgtccggaagaacatctcgaatggaaagtttcaaggacaagagcttatcaaatggattgttcttcctcgagcttcttagcacagtacagccaagggttgtgaactggaaagttgttactaaaggggaaactgatgaggacaagaagctgaatgctacgtacatcattagtgttgcaaggaagattggatgctctgtgttcctgttgccagaggacatcgtcgaggtgaatcagaagatgattctaacacttaccgctagcattatgtattggagcctacagaatcagcatcagtcacagtctgaaatgccagagcaatcagaaccatctagcatggcttcagacgcagcctctgacattgcctcggaggacggtgcttcaacgacagcaccatctgagttggatgaggtgaactcgctgtctgatagcgtatccaatttgacaacggatgatgctacttcaaacgccccatccactgaaaacggaaatggtgtggcagggtcctgatggttatagttatgcagacccagttctttttcccacacacagtgctgttttttttatacagggaacagtgcttttcatggtgctcaaagtcgtcgctaccagaagtggtttttttaatacttctgcttcatgagtatggtagcttgatagatacagcaagtgcagatagatatagatgccctttgttcatggaatctgcttagactatagggggcggggcgggaaagatagtatatgtcgctggccgggtagtttctgtatttgtggcacacgcacccatgcaaggttttacctctttatgtatcttgtcggtcaattcgttcatatgtttattggactggtcatcgcttgtaatgctgttgctgctctgaaccgtgcctgtacataacatacactcaaaagtgtttttgccttgtccctaagtttctgtttatactgcttttttattttccttctttacattggatgtgttatcatgaggtttcaatttgatttgattgccttccctccctgacggcatttcaaatcccatccaatccccgtttcatatcattccagattatcaggagccaaaacgataaaaaaaa

SEQ ID NO: 40700 - DNA, 2938 bp, Zea Mays
gcttaacccaaagaaacctaattcggcgacaggacaaacacgagaaaccggccccacccctgccctcacctcctctccaccactttccctctgcgcctcggcccccacgaaatctggaaagcctggacgccattgctcacctttttccgtccagcgcaaagacaccgcgcgccagagagggtgagggattgccgtgaccgattcgaaagccgcttcgggcgcgggtgggatcggcccgtggccggcggagatgtccggattcgtcggtgtcgtcgtgtccgacccctcgctgcaggggcagttcacgcaggtcgagctccgatcgctcaaggccaagttcgtgtctctgaagagagattccggccatgtcaccactaagaatctcccggtgatgatgaagaagctgagggggctcaatgaggtggtctctgtggaggagatcgcggccttcctgtccgagtcgtaccccgacagcgatcaggagattgaattcgaatccttcctccgggagtatctgaatctgcaggcgcgggtgagtgccaaggagggtggtgccggcggtggccggggtggcaagtcgtcgttcctcaagtccagcaccactacgctgctgcacaacctcaatcaggcagagaaatcttcgtatgtggcgcacatcaatacttacctccgtgaagacccattcctgaagaagtacttgcccatggacccgtctggaaaccagctgttcgatctcatccgggatggtgttctgctctgctgtacctgggaccattgatgagagggcaataaataagaaaagagttcttaacccatgggagagaaatgaaaatcacacgctctgcctcaattccgccaaggccattggatgcactgttgtcaacattggcacacaggatttggtggagggaaggcctcatttagttcttggattgatatcacaaatcataaagattcaacttttagctgatcttaacctcaagaagacaccacagctggtggagctatttgatgacagcaaggatatagacgaggttttgagtttgtcgccagaaaagatgctacttcggtggatgaaccatcatctgaaaaaagctggctacaagaaaactgttaacaatttctcttcagatgtgaaggatggtgaagcgtatgcttaccttctgaaagctcttgctccagagcattcccctgaaactacattggacaccaaggatccgaatgagagggcaaaactagtacttgaacaagcggcgaagttggactgtaagagatacttgaccccgaaggatatcactgagggatctgccaatttaaatcttgcatttgttgcacaaatattccagcataggaatggtctcaccagtgacaccaaacaagttactctcacacagaccgcaacacctgatgatgttctagtatctagagaagaaagagcctttcggatgtggatcaacagccttggggttgaatcatatgtaaacaatgtctttgaagatgttcgcaatggatgggtacttcttgaagtgcttgacaaggtgtctcctggatctgtcaattggaagctggcaacaaaacctccaattaaattgccatttagaaaactggagaattgcaatcaagttgtaaaaattgggaagcagttgaagttttctttagtaaatctggctggaaacgatattgttcagggaaataagaaattgattgttgcacttctgtggcaattgatgagattcaatatcctccagctgttaaacaaactgagattccactcccaaggagggtcccaaggaaaagaaatttctgatgctgatattctagactgggccaacagcaaagtgaaagcgtccggaagaacatctcgaatggaaagtttcaaggacaagagcttatcaaatggattgttcttcctcgagcttcttagcacagtacagccaagggttgtgaactggaaagttgttactaaaggggaaactgatgaggacaagaagctgaatgctacgtacatcattagtgttgcaaggaagattggatgctctgtgttcctgttgccagaggacatcgtcgaggtgaatcagaagatgattctaacacttaccgctagcattatgtattggagcctacagaatcagcatcagtcacagtctgaaatgccagagcaatcagaaccatctagcatggcttcagacgcagcctctgacattgcctcggaggacggtgcttcaacgacagcaccatctgagttggatgaggtgaactcgctgtctgatagcgtatccaatttgacaacggatgatgctacttcaaacgccccatccactgaaaacggaaatggtgtggcagggtcctgatggttatagttatgcagacccagttctttttcccacacacagtgctgttttttttatacagggaacagtgcttttcatggtgctcaaagtcgtcgctaccagaagtggtttttttaatacttctgcttcatgagtatggtagcttgatagatacagcaagtgcagatagatatagatgccctttgttcatggaatctgcttagactatagggggcggggcgggaaagatagtatatgtcgctggccgggtagtttctgtatttgtggcacacgcacccatgcaaggttttacctctttatgtatcttgtcggtcaattcgttcatatgtttattggactggtcatcgcttgtaatgctgttgctgctctgaaccgtgcctgtacataacatacactcaaaagtgtttttgccttgtccctaagtttctgtttatactgcttttttattttccttctttacattggatgtgttatcatgaggtttcaatttgatttgattgccttccctccctgacggcatttcaaatcccatccaatccccgtttcatatcattccagattatcaggagccaaaacgataaaaaaaa

SEQ ID NO: 40701 - DNA, 2781 bp, Zea Mays
ttaacccaaagaaacctaattcggcgacaggacaaacacgagaaaccggccccacccctgccctcacctcctctccaccactttccctctgcgcctcggcccccacgaaatctggaaagcctggacgccattgctcacctttttccgtccagcgcaaagacaccgcgcgccagagagggtgagggattgccgtgaccgattcgaaagccgcttcgggcgcgggtgggatcggcccgtggccggcggagatgtccggattcgtcggtgtcgtcgtgtccgacccctcgctgcaggggcagttcacgcaggtcgagctccgatcgctcaaggccaagttcgtgtctctgaagagagattccggccatgtcaccactaagaatctcccggtgatgatgaagaagctgagggggctcaatgaggtggtctctgtggaggagatcgcggccttcctgtccgagtcgtaccccgacagcgatcaggagattgaattcgaatccttcctccgggagtatctgaatctgcaggcgcgggtgagtgccaaggagggtggtgccggcggtggccggggtggcaagtcgtcgttcctcaagtccagcaccactacgctgctgcacaacctcaatcaggcagagaaatcttcgtatgtggcgcacatcaatacttacctccgtgaagacccattcctgaagaagtacttgcccatggacccgtctggaaaccagctgttcgatctcatccgggatggtgttctgctctgcctcatttagttcttggattgatatcacaaatcataaagattcaacttttagctgatcttaacctcaagaagacaccacagctggtggagctatttgatgacagcaaggatatagacgaggttttgagtttgtcgccagaaaagatgctacttcggtggatgaaccatcatctgaaaaaagctggctacaagaaaactgttaacaatttctcttcagatgtgaaggatggtgaagcgtatgcttaccttctgaaagctcttgctccagagcattcccctgaaactacattggacaccaaggatccgaatgagagggcaaaactagtacttgaacaagcggcgaagttggactgtaagagatacttgaccccgaaggatatcactgagggatctgccaatttaaatcttgcatttgttgcacaaatattccagcataggaatggtctcaccagtgacaccaaacaagttactctcacacagaccgcaacacctgatgatgttctagtatctagagaagaaagagcctttcggatgtggatcaacagccttggggttgaatcatatgtaaacaatgtctttgaagatgttcgcaatggatgggtacttcttgaagtgcttgacaaggtgtctcctggatctgtcaattggaagctggcaacaaaacctccaattaaattgccatttagaaaactggagaattgcaatcaagttgtaaaaattgggaagcagttgaagttttctttagtaaatctggctggaaacgatattgttcagggaaataagaaattgattgttgcacttctgtggcaattgatgagattcaatatcctccagctgttaaacaaactgagattccactcccaaggagggtcccaaggaaaagaaatttctgatgctgatattctagactgggccaacagcaaagtgaaagcgtccggaagaacatctcgaatggaaagtttcaaggacaagagcttatcaaatggattgttcttcctcgagcttcttagcacagtacagccaagggttgtgaactggaaagttgttactaaaggggaaactgatgaggacaagaagctgaatgctacgtacatcattagtgttgcaaggaagattggatgctctgtgttcctgttgccagaggacatcgtcgaggtgaatcagaagatgattctaacacttaccgctagcattatgtattggagcctacagaatcagcatcagtcacagtctgaaatgccagagcaatcagaaccatctagcatggcttcagacgcagcctctgacattgcctcggaggacggtgcttcaacgacagcaccatctgagttggatgaggtgaactcgctgtctgatagcgtatccaatttgacaacggatgatgctacttcaaacgccccatccactgaaaacggaaatggtgtggcagggtcctgatggttatagttatgcagacccagttctttttcccacacacagtgctgttttttttatacagggaacagtgcttttcatggtgctcaaagtcgtcgctaccagaagtggtttttttaatacttctgcttcatgagtatggtagcttgatagatacagcaagtgcagatagatatagatgccctttgttcatggaatctgcttagactatagggggcggggcgggaaagatagtatatgtcgctggccgggtagtttctgtatttgtggcacacgcacccatgcaaggttttacctctttatgtatcttgtcggtcaattcgttcatatgtttattggactggtcatcgcttgtaatgctgttgctgctctgaaccgtgcctgtacataacatacactcaaaagtgtttttgccttgtccctaagtttctgtttatactgcttttttattttccttctttacattggatgtgttatcatgaggtttcaatttgatttgattgccttccctccctgacggcatttcaaatcccatccaatccccgtttcatatcattccagattatcaggagccaaaacgataaaaaaaa

SEQ ID NO: 40702 - DNA, 346 bp, Zea Mays
cttgctgctgctcccctactgggctactgctactgagctgtatcatatatcgtcccttctctccgactctccctcccttctccacggcccagtgcgcacctctccctccacccctcgtcgcaaggcccaggcaccgagctaggcacgacgatgcaagtcaagccggaagctacggttccttcgccgtctccgccattgccggcagctccgtctttccatcaccgaagaacggaggaggagaacagcggcgtcgaaattccgcggcggtaaccggcggcctacacgtatcggcgtcgcggcatacaagggcgaggcgaacctgagaatgcccagccgaaacgtcaac

SEQ ID NO: 40703 - DNA, 3522 bp, Zea Mays
atcgcccgtgccctgcggtgttctactcactcccagctgcgacaatccccctcatcgcccgccccccctggtctcgtctctccttcgcgcatctcaccgccatctcactcccgaaccccccttcctttgcttcccgcgtctaatttagcgccagaacatttgaattccccgcaacttccgcttccagcggcttctcgaaccttccggaggcgccgccgatcgaccccggctccatccccttgcccccctagggtttcgcgttcccctcggggatgggggacgccgccaccgccgcagcggcggcggcagcgtcgcccgcttgcgccgcgcggaagcggcggcgcggcgacgacagcgcggggctgaggcgggtggcggagatcgtgatggtcctggccgcggccggggaggtacgcggcgggaggcagcccacggccgcggagcgcgcgctggcggccgaggcgcgggagactctggccaccgccgtcgccgagagggccgtgcggcccaaggatctgttcccgggggaagcggtgcgcgcggtcgtcgaggatctcgggctcaaccgctccaaggacccagctgccatggggtttcgcccgcccaaggcctccatcgccgataggctcatgcttactaagcgcaagatggaagaagtcaaggaagctccagtggttagcgcacctcaaacagtcgtctcaagtggaacgtctgagttccatggtttgaatggggctaccaagtttggtgttggagttcctaggaacccaccagttccatctttagctgctactggcccattaacctctacatccccagttaccttgaagccaccaggatcatctcctgtaaaaccagttgccaactcatcagttgttcctctagtcaatactggtccatcaaaccttaaattggacaaaaatgttagtggtcctctgaatttagcattcagtggagcaacggtcgtccactcaaacaagtcaactttagacacatctgctaggcccgatgtaaatgctgtacagagttccaatcagacggtgaaaaaccatgacacaaaaccagtggcagttcaagccgcgacaggtaaccctgttatgggtcatcgtgctacaccaggcgtggcatttgctccaccaaaacctactttcatcaatcacaatgagatagcaaagaatgttctacaatttcttcaccaacctgcaaaccatcctagctggactccaccatcaactgagtacatgcattctcgtttgtgctgtcaaatatgcaaagttgatatcattggtacagacaatttacttgtttgtgatgcttgcgagaggggagtacacttgaaatgccttcatcagtatggcaataagggcgtccccaaagctgagtggcattgttctgcatgcctgactcagagtaagggaaaacccttgccaccaaaatatggcaaggttacaaggactgtagttgcatcaaagactgctccacctggtggtggagcacagctttctttgcaggaatcagcagaaaacatggctgcaaaggaaaatcaccaaaagttggctgcaaatggaaatcttatgaagccattctccattcatggtggcagcacagtacccgacagtaatgtattggcactgagtgctgtcatggctggttcacaatcacaattagtttctaccttgagaccatcaatagtcgttaaagctgaaacaccctctaatggaaaggaaggaactgggcaaccatgcaatactgcaatacaacctaatgtgcgatcatcttctcttaacaacagattgagaagtgattcctgtttgaaccctgctgattcagcaaatgaaatcatgcatggtaagcatgctgcagaaatttctggtgttgaagcaaaggtcaagtctgaagcaaactctgaggttgttgtgagtacagatgaggaattggttcatagcagtggaacatcaatcgaaactgaacgagccaaggttgtcgctattgaagaaaacagggcacaatcaacctttgagacagataaaatgaaagttggggaaacaactatcaacacaggaacaacagatcaatgcatcaatactgaagaaaagctccccagtttagcaacttctgaggcacacacaatcactgacgtgaagatgactagcaatacaggaataccagtacagcaacacaacattgctactattgaagagaagacccagattgatgcagtgtctgatccacatccacatgcaatccaagatattcaagatatggaaatgggcaccaacaatggaccacccatagatcaaacaagcagtcttgttgaagaaaacccccctggacaatcctcttcaattgctgatgcgtgtgtcactgctaatactggaataccaacagatcaaacacagcatccaaatgagtcaactgaaaatgcagtaaagaaatctcccaacagagaactatataaagaaaaaccgggctgcaacataacctcagatattacccaaaaagtaacttcaaatggcatcatgtgccctgaggacaaaactttatgtgttcatgaagataaagcagtgggttgtgacacagaagcaaaagaagaaaactaatttagtagcaggttgcatccaattttcattttccaggtgtgtttgtaatcaaactagttattagaagtcttatgtctgaaaatcttgcctattttgatttatgctgatagtgattcttttaaagtacattatttgaaactgatgtttgtagttattctttacttattatagatatgtcaatcacattagcttatttgaactcatggtaataagtatgcttaagtgacctttaaggcctgtattttattgcagcacatgcttttcccccaactctggaaactgaaaccttgtatggccttttggattgaacatttgtatcttaccttaccttaaatctttccacagatggaactgttctgaatctaccattattttaccaacgtcagtgattgactgtgttctctacattctcttggacagcattatacatttagccattgccaaccatttttccaggaggtttgttctgtgccccttggaaacatgctcaccaggcttactccattcgtaatttactggtatccattgcctcctggtgtagtttagagaatcccagaacacaggaaatataatcgtgatgttgtactttatgtagattgataatcttgagttcctgactattgaattccatttccccctttatttgttccgtgctcatctggaatgctgtaactagatagggtttagctgagttaggactggattatcaagtcataataatgatacgtgccttcgccatcccttcggaccatgttccaatgtgatacaatctactaccatgcaatatatcaccatcagcctgctaacgcacgccactagctttaagtttccaatccttctgtcagtttgtaatgtttgcagctacttcatccgtttcaatttacacttcctatgtccaatctaatggtgtgtttggttgaaa

SEQ ID NO: 40704 - DNA, 3138 bp, Zea Mays
atcgcccgtgccctgcggtgttctactcactcccagctgcgacaatccccctcatcgcccgccccccctggtctcgtctctccttcgcgcatctcaccgccatctcactcccgaaccccccttcctttgcttcccgcgtctaatttagcgccagaacatttgaattccccgcaacttccgcttccagcggcttctcgaaccttccggaggcgccgccgatcgaccccggctccatccccttgcccccctagggtttcgcgttcccctcggggatgggggacgccgccaccgccgcagcggcggcggcagcgtcgcccgcttgcgccgcgcggaagcggcggcgcggcgacgacagcgcggggctgaggcgggtggcggagatcgtgatggtcctggccgcggccggggaggtacgcggcgggaggcagcccacggccgcggagcgcgcgctggcggccgaggcgcgggagactctggccaccgccgtcgccgagagggccgtgcggcccaaggatctgttcccgggggaagcggtgcgcgcggtcgtcgaggatctcgggctcaaccgctccaaggacccagctgccatggggtttcgcccgcccaaggcctccatcgccgataggctcatgcttactaagcgcaagatggaagaagtcaaggaagctccagtggttagcgcacctcaaacagtcgtctcaagtggaacgtctgagttccatggtttgaatggggctaccaagtttggtgttggagttcctaggaacccaccagttccatctttagctgctactggcccattaacctctacatccccagttaccttgaagccaccaggatcatctcctgtaaaaccagttgccaactcatcagttgttcctctagtcaatactggtccatcaaaccttaaattggacaaaaatgttagtggtcctctgaatttagcattcagtggagcaacggtcgtccactcaaacaagtcaactttagacacatctgctaggcccgatgtaaatgctgtacagagttccaatcagacggtgaaaaaccatgacacaaaaccagtggcagttcaagccgcgacaggtaaccctgttatgggtcatcgtgctacaccaggcgtggcatttgctccaccaaaacctactttcatcaatcacaatgagatagcaaagaatgttctacaatttcttcaccaacctgcaaaccatcctagctggactccaccatcaactgagtacatgcattctcgtttgtgctgtcaaatatgcaaagttgatatcattggtacagacaatttacttgtttgtgatgcttgcgagaggggagtacacttgaaatgccttcatcagtatggcaataagggcgtccccaaagctgagtggcattgttctgcatgcctgactcagagtaagggaaaacccttgccaccaaaatatggcaaggttacaaggactgtagttgcatcaaagactgctccacctggtggtggagcacagctttctttgcaggaatcagcagaaaacatggctgcaaaggaaaatcaccaaaagttggctgcaaatggaaatcttatgaagccattctccattcatggtggcagcacagtacccgacagtaatgtattggcactgagtgctgtcatggctggttcacaatcacaattagtttctaccttgagaccatcaatagtcgttaaagctgaaacaccctctaatggaaaggaaggaactgggcaaccatgcaatactgcaatacaacctaatgtgcgatcatcttctcttaacaacagattgagaagtgattcctgtttgaaccctgctgattcagcaaatgaaatcatgcatggtaagcatgctgcagaaatttctggtgttgaagcaaaggtcaagtctgaagcaaactctgaggttgttgtgagtacagatgaggaattggttcatagcagtggaacatcaatcgaaactgaacgagccaaggttgtcgctattgaagaaaacagggcacaatcaacctttgagacagataaaatgaaagttggggaaacaactatcaacacaggaacaacagatcaatgcatcaatactgaagaaaagctccccagtttagcaacttctgaggcacacacaatcactgacgtgaagatgactagcaatacaggaataccagtacagcaacacaacattgctactattgaagagaagacccagattgatgcagtgtctgatccacatccacatgcaatccaagatattcaagatatggaaatgggcaccaacaatggaccacccatagatcaaacaagcagtcttgttgaagaaaacccccctggacaatcctcttcaattgctgatgcgtgtgtcactgctaatactggaataccaacagatcaaacacagcatccaaatgagtcaactgaaaatgcagtaaagaaatctcccaacagagaactatataaagaaaaaccgggctgcaacataacctcagatattacccaaaaagtaacttcaaatggcatcatgtgccctgaggacaaaactttatgtgttcatgaagataaagcagtgggttgtgacacagaagcaaaagaagaaaactaatttagtagcaggttgcatccaattttcattttccagcattatacatttagccattgccaaccatttttccaggaggtttgttctgtgccccttggaaacatgctcaccaggcttactccattcgtaatttactggtatccattgcctcctggtgtagtttagagaatcccagaacacaggaaatataatcgtgatgttgtactttatgtagattgataatcttgagttcctgactattgaattccatttccccctttatttgttccgtgctcatctggaatgctgtaactagatagggtttagctgagttaggactggattatcaagtcataataatgatacgtgccttcgccatcccttcggaccatgttccaatgtgatacaatctactaccatgcaatatatcaccatcagcctgctaacgcacgccactagctttaagtttccaatccttctgtcagtttgtaatgtttgcagctacttcatccgtttcaatttacacttcctatgtccaatctaatggtgtgtttggttgaaa

SEQ ID NO: 40705 - DNA, 3463 bp, Zea Mays
atcgcccgtgccctgcggtgttctactcactcccagctgcgacaatccccctcatcgcccgccccccctggtctcgtctctccttcgcgcatctcaccgccatctcactcccgaaccccccttcctttgcttcccgcgtctaatttagcgccagaacatttgaattccccgcaacttccgcttccagcggcttctcgaaccttccggaggcgccgccgatcgaccccggctccatccccttgcccccctagggtttcgcgttcccctcggggatgggggacgccgccaccgccgcagcggcggcggcagcgtcgcccgcttgcgccgcgcggaagcggcggcgcggcgacgacagcgcggggctgaggcgggtggcggagatcgtgatggtcctggccgcggccggggaggtacgcggcgggaggcagcccacggccgcggagcgcgcgctggcggccgaggcgcgggagactctggccaccgccgtcgccgagagggccgtgcggcccaaggatctgttcccgggggaagcggtgcgcgcggtcgtcgaggatctcgggctcaaccgctccaaggacccagctgccatggggtttcgcccgcccaaggcctccatcgccgataggctcatgcttactaagcgcaagatggaagaagtcaaggaagctccagtggttagcgcacctcaaacagtcgtctcaagtggaacgtctgagttccatggtttgaatggggctaccaagtttggtgttggagttcctaggaacccaccagttccatctttagctgctactggcccattaacctctacatccccagttaccttgaagccaccaggatcatctcctgtaaaaccagttgccaactcatcagttgttcctctagtcaatactggtccatcaaaccttaaattggacaaaaatgttagtggtcctctgaatttagcattcagtggagcaacggtcgtccactcaaacaagtcaactttagacacatctgctaggcccgatgtaaatgctgtacagagttccaatcagacggtgaaaaaccatgacacaaaaccagtggcagttcaagccgcgacaggtaaccctgttatgggtcatcgtgctacaccaggcgtggcatttgctccaccaaaacctactttcatcaatcacaatgagatagcaaagaatgttctacaatttcttcaccaacctgcaaaccatcctagctggactccaccatcaactgagtacatgcattctcgtttgtgctgtcaaatatgcaaagttgatatcattggtacagacaatttacttgtttgtgatgcttgcgagaggggagtacacttgaaatgccttcatcagtatggcaataagggcgtccccaaagctgagtggcattgttctgcatgcctgactcagagtaagggaaaacccttgccaccaaaatatggcaaggttacaaggactgtagttgcatcaaagactgctccacctggtggtggagcacagctttctttgcaggaatcagcagaaaacatggctgcaaaggaaaatcaccaaaagttggctgcaaatggaaatcttatgaagccattctccattcatggtggcagcacagtacccgacagtaatgtattggcactgagtgctgtcatggctggttcacaatcacaattagtttctaccttgagaccatcaatagtcgttaaagctgaaacaccctctaatggaaaggaaggaactgggcaaccatgcaatactgcaatacaacctaatgtgcgatcatcttctcttaacaacagattgagaagtgattcctgtttgaaccctgctgattcagcaaatgaaatcatgcatggtaagcatgctgcagaaatttctggtgttgaagcaaaggtcaagtctgaagcaaactctgaggttgttgtgagtacagatgaggaattggttcatagcagtggaacatcaatcgaaactgaacgagccaaggttgtcgctattgaagaaaacagggcacaatcaacctttgagacagataaaatgaaagttggggaaacaactatcaacacaggaacaacagatcaatgcatcaatactgaagaaaagctccccagtttagcaacttctgaggcacacacaatcactgacgtgaagatgactagcaatacaggaataccagtacagcaacacaacattgctactattgaagagaagacccagattgatgcagtgtctgatccacatccacatgcaatccaagatattcaagatatggaaatgggcaccaacaatggaccacccatagatcaaacaagcagtcttgttgaagaaaacccccctggacaatcctcttcaattgctgatgcgtgtgtcactgctaatactggaataccaacagatcaaacacagcatccaaatgagtcaactgaaaatgcagtaaagaaatctcccaacagagaactatataaagaaaaaccgggctgcaacataacctcagatattacccaaaaagtaacttcaaatggcatcatgtgccctgaggacaaaactttatgtgttcatgaagataaagcagtgggttgtgacacagaagcaaaagaagaaaactaatttagtagcaggttgcatccaattttcattttccaggtgtgtttgtaatcaaactagttattagaagtcttatgtctgaaaatcttgcctattttgatttatgctgatagtgattcttttaaagtacattatttgaaactgatgtttgtagttattctttacttattatagatatgtcaatcacattagcttatttgaactcatggtaataagtatgcttaagtgacctttaaggcctgtattttattgcagcacatgcttttcccccaactctggaaactgaaaccttgtatggccttttggattgaacatttgtatcttaccttaccttaaatctttccacagatggaactgttctgaatctaccattattttaccaacgtcagtgattgactgtgttctctacattctcttggacagcattatacatttagccattgccaaccatttttccaggaggtatccattgcctcctggtgtagtttagagaatcccagaacacaggaaatataatcgtgatgttgtactttatgtagattgataatcttgagttcctgactattgaattccatttccccctttatttgttccgtgctcatctggaatgctgtaactagatagggtttagctgagttaggactggattatcaagtcataataatgatacgtgccttcgccatcccttcggaccatgttccaatgtgatacaatctactaccatgcaatatatcaccatcagcctgctaacgcacgccactagctttaagtttccaatccttctgtcagtttgtaatgtttgcagctacttcatccgtttcaatttacacttcctatgtccaatctaatggtgtgtttggttgaaa

SEQ ID NO: 40706 - DNA, 3079 bp, Zea Mays
atcgcccgtgccctgcggtgttctactcactcccagctgcgacaatccccctcatcgcccgccccccctggtctcgtctctccttcgcgcatctcaccgccatctcactcccgaaccccccttcctttgcttcccgcgtctaatttagcgccagaacatttgaattccccgcaacttccgcttccagcggcttctcgaaccttccggaggcgccgccgatcgaccccggctccatccccttgcccccctagggtttcgcgttcccctcggggatgggggacgccgccaccgccgcagcggcggcggcagcgtcgcccgcttgcgccgcgcggaagcggcggcgcggcgacgacagcgcggggctgaggcgggtggcggagatcgtgatggtcctggccgcggccggggaggtacgcggcgggaggcagcccacggccgcggagcgcgcgctggcggccgaggcgcgggagactctggccaccgccgtcgccgagagggccgtgcggcccaaggatctgttcccgggggaagcggtgcgcgcggtcgtcgaggatctcgggctcaaccgctccaaggacccagctgccatggggtttcgcccgcccaaggcctccatcgccgataggctcatgcttactaagcgcaagatggaagaagtcaaggaagctccagtggttagcgcacctcaaacagtcgtctcaagtggaacgtctgagttccatggtttgaatggggctaccaagtttggtgttggagttcctaggaacccaccagttccatctttagctgctactggcccattaacctctacatccccagttaccttgaagccaccaggatcatctcctgtaaaaccagttgccaactcatcagttgttcctctagtcaatactggtccatcaaaccttaaattggacaaaaatgttagtggtcctctgaatttagcattcagtggagcaacggtcgtccactcaaacaagtcaactttagacacatctgctaggcccgatgtaaatgctgtacagagttccaatcagacggtgaaaaaccatgacacaaaaccagtggcagttcaagccgcgacaggtaaccctgttatgggtcatcgtgctacaccaggcgtggcatttgctccaccaaaacctactttcatcaatcacaatgagatagcaaagaatgttctacaatttcttcaccaacctgcaaaccatcctagctggactccaccatcaactgagtacatgcattctcgtttgtgctgtcaaatatgcaaagttgatatcattggtacagacaatttacttgtttgtgatgcttgcgagaggggagtacacttgaaatgccttcatcagtatggcaataagggcgtccccaaagctgagtggcattgttctgcatgcctgactcagagtaagggaaaacccttgccaccaaaatatggcaaggttacaaggactgtagttgcatcaaagactgctccacctggtggtggagcacagctttctttgcaggaatcagcagaaaacatggctgcaaaggaaaatcaccaaaagttggctgcaaatggaaatcttatgaagccattctccattcatggtggcagcacagtacccgacagtaatgtattggcactgagtgctgtcatggctggttcacaatcacaattagtttctaccttgagaccatcaatagtcgttaaagctgaaacaccctctaatggaaaggaaggaactgggcaaccatgcaatactgcaatacaacctaatgtgcgatcatcttctcttaacaacagattgagaagtgattcctgtttgaaccctgctgattcagcaaatgaaatcatgcatggtaagcatgctgcagaaatttctggtgttgaagcaaaggtcaagtctgaagcaaactctgaggttgttgtgagtacagatgaggaattggttcatagcagtggaacatcaatcgaaactgaacgagccaaggttgtcgctattgaagaaaacagggcacaatcaacctttgagacagataaaatgaaagttggggaaacaactatcaacacaggaacaacagatcaatgcatcaatactgaagaaaagctccccagtttagcaacttctgaggcacacacaatcactgacgtgaagatgactagcaatacaggaataccagtacagcaacacaacattgctactattgaagagaagacccagattgatgcagtgtctgatccacatccacatgcaatccaagatattcaagatatggaaatgggcaccaacaatggaccacccatagatcaaacaagcagtcttgttgaagaaaacccccctggacaatcctcttcaattgctgatgcgtgtgtcactgctaatactggaataccaacagatcaaacacagcatccaaatgagtcaactgaaaatgcagtaaagaaatctcccaacagagaactatataaagaaaaaccgggctgcaacataacctcagatattacccaaaaagtaacttcaaatggcatcatgtgccctgaggacaaaactttatgtgttcatgaagataaagcagtgggttgtgacacagaagcaaaagaagaaaactaatttagtagcaggttgcatccaattttcattttccagcattatacatttagccattgccaaccatttttccaggaggtatccattgcctcctggtgtagtttagagaatcccagaacacaggaaatataatcgtgatgttgtactttatgtagattgataatcttgagttcctgactattgaattccatttccccctttatttgttccgtgctcatctggaatgctgtaactagatagggtttagctgagttaggactggattatcaagtcataataatgatacgtgccttcgccatcccttcggaccatgttccaatgtgatacaatctactaccatgcaatatatcaccatcagcctgctaacgcacgccactagctttaagtttccaatccttctgtcagtttgtaatgtttgcagctacttcatccgtttcaatttacacttcctatgtccaatctaatggtgtgtttggttgaaa

SEQ ID NO: 40707 - DNA, 3154 bp, Zea Mays
atcgcccgtgccctgcggtgttctactcactcccagctgcgacaatccccctcatcgcccgccccccctggtctcgtctctccttcgcgcatctcaccgccatctcactcccgaaccccccttcctttgcttcccgcgtctaatttagcgccagaacatttgaattccccgcaacttccgcttccagcggcttctcgaaccttccggaggcgccgccgatcgaccccggctccatccccttgcccccctagggtttcgcgttcccctcggggatgggggacgccgccaccgccgcagcggcggcggcagcgtcgcccgcttgcgccgcgcggaagcggcggcgcggcgacgacagcgcggggctgaggcgggtggcggagatcgtgatggtcctggccgcggccggggaggtacgcggcgggaggcagcccacggccgcggagcgcgcgctggcggccgaggcgcgggagactctggccaccgccgtcgccgagagggccgtgcggcccaaggatctgttcccgggggaagcggtgcgcgcggtcgtcgaggatctcgggctcaaccgctccaaggacccagctgccatggggtttcgcccgcccaaggcctccatcgccgataggctcatgcttactaagcgcaagatggaagaagtcaaggaagctccagtggttagcgcacctcaaacagtcgtctcaagtggaacgtctgagttccatggtttgaatggggctaccaagtttggtgttggagttcctaggaacccaccagttccatctttagctgctactggcccattaacctctacatccccagttaccttgaagccaccaggatcatctcctgtaaaaccagttgccaactcatcagttgttcctctagtcaatactggtccatcaaaccttaaattggacaaaaatgttagtggtcctctgaatttagcattcagtggagcaacggtcgtccactcaaacaagtcaactttagacacatctgctaggcccgatgtaaatgctgtacagagttccaatcagacggtgaaaaaccatgacacaaaaccagtggcagttcaagccgcgacaggtaaccctgttatgggtcatcgtgctacaccaggcgtggcatttgctccaccaaaacctactttcatcaatcacaatgagatagcaaagaatgttctacaatttcttcaccaacctgcaaaccatcctagctggactccaccatcaactgagtacatgcattctcgtttgtgctgtcaaatatgcaaagttgatatcattggtacagacaatttacttgtttgtgatgcttgcgagaggggagtacacttgaaatgccttcatcagtatggcaataagggcgtccccaaagctgagtggcattgttctgcatgcctgactcagagtaagggaaaacccttgccaccaaaatatggcaaggttacaaggactgtagttgcatcaaagactgctccacctggtggtggagcacagctttctttgcaggaatcagcagaaaacatggctgcaaaggaaaatcaccaaaagttggctgcaaatggaaatcttatgaagccattctccattcatggtggcagcacagtacccgacagtaatgtattggcactgagtgctgtcatggctggttcacaatcacaattagtttctaccttgagaccatcaatagtcgttaaagctgaaacaccctctaatggaaaggaaggaactgggcaaccatgcaatactgcaatacaacctaatgtgcgatcatcttctcttaacaacagattgagaagtgattcctgtttgaaccctgctgattcagcaaatgaaatcatgcatggtaagcatgctgcagaaatttctggtgttgaagcaaaggtcaagtctgaagcaaactctgaggttgttgtgagtacagatgaggaattggttcatagcagtggaacatcaatcgaaactgaacgagccaaggttgtcgctattgaagaaaacagggcacaatcaacctttgagacagataaaatgaaagttggggaaacaactatcaacacaggaacaacagatcaatgcatcaatactgaagaaaagctccccagtttagcaacttctgaggcacacacaatcactgacgtgaagatgactagcaatacaggaataccagtacagcaacacaacattgctactattgaagagaagacccagattgatgcagtgtctgatccacatccacatgcaatccaagatattcaagatatggaaatgggcaccaacaatggaccacccatagatcaaacaagcagtcttgttgaagaaaacccccctggacaatcctcttcaattgctgatgcgtgtgtcactgctaatactggaataccaacagatcaaacacagcatccaaatgagtcaactgaaaatgcagtaaagaaatctcccaacagagaactatataaagaaaaaccgggctgcaacataacctcagatattacccaaaaagtaacttcaaatggcatcatgtgccctgaggacaaaactttatgtgttcatgaagataaagcagtgggttgtgacacagaagcaaaagaagaaaactaatttagtagcaggttgcatccaattttcattttccagatggaactgttctgaatctaccattattttaccaacgtcagtgattgactgtgttctctacattctcttggacagcattatacatttagccattgccaaccatttttccaggaggtttccattgcctcctggtgtagtttagagaatcccagaacacaggaaatataatcgtgatgttgtactttatgtagattgataatcttgagttcctgactattgaattccatttccccctttatttgttccgtgctcatctggaatgctgtaactagatagggtttagctgagttaggactggattatcaagtcataataatgatacgtgccttcgccatcccttcggaccatgttccaatgtgatacaatctactaccatgcaatatatcaccatcagcctgctaacgcacgccactagctttaagtttccaatccttctgtcagtttgtaatgtttgcagctacttcatccgtttcaatttacacttcctatgtccaatctaatggtgtgtttggttgaaa

SEQ ID NO: 40708 - DNA, 3213 bp, Zea Mays
atcgcccgtgccctgcggtgttctactcactcccagctgcgacaatccccctcatcgcccgccccccctggtctcgtctctccttcgcgcatctcaccgccatctcactcccgaaccccccttcctttgcttcccgcgtctaatttagcgccagaacatttgaattccccgcaacttccgcttccagcggcttctcgaaccttccggaggcgccgccgatcgaccccggctccatccccttgcccccctagggtttcgcgttcccctcggggatgggggacgccgccaccgccgcagcggcggcggcagcgtcgcccgcttgcgccgcgcggaagcggcggcgcggcgacgacagcgcggggctgaggcgggtggcggagatcgtgatggtcctggccgcggccggggaggtacgcggcgggaggcagcccacggccgcggagcgcgcgctggcggccgaggcgcgggagactctggccaccgccgtcgccgagagggccgtgcggcccaaggatctgttcccgggggaagcggtgcgcgcggtcgtcgaggatctcgggctcaaccgctccaaggacccagctgccatggggtttcgcccgcccaaggcctccatcgccgataggctcatgcttactaagcgcaagatggaagaagtcaaggaagctccagtggttagcgcacctcaaacagtcgtctcaagtggaacgtctgagttccatggtttgaatggggctaccaagtttggtgttggagttcctaggaacccaccagttccatctttagctgctactggcccattaacctctacatccccagttaccttgaagccaccaggatcatctcctgtaaaaccagttgccaactcatcagttgttcctctagtcaatactggtccatcaaaccttaaattggacaaaaatgttagtggtcctctgaatttagcattcagtggagcaacggtcgtccactcaaacaagtcaactttagacacatctgctaggcccgatgtaaatgctgtacagagttccaatcagacggtgaaaaaccatgacacaaaaccagtggcagttcaagccgcgacaggtaaccctgttatgggtcatcgtgctacaccaggcgtggcatttgctccaccaaaacctactttcatcaatcacaatgagatagcaaagaatgttctacaatttcttcaccaacctgcaaaccatcctagctggactccaccatcaactgagtacatgcattctcgtttgtgctgtcaaatatgcaaagttgatatcattggtacagacaatttacttgtttgtgatgcttgcgagaggggagtacacttgaaatgccttcatcagtatggcaataagggcgtccccaaagctgagtggcattgttctgcatgcctgactcagagtaagggaaaacccttgccaccaaaatatggcaaggttacaaggactgtagttgcatcaaagactgctccacctggtggtggagcacagctttctttgcaggaatcagcagaaaacatggctgcaaaggaaaatcaccaaaagttggctgcaaatggaaatcttatgaagccattctccattcatggtggcagcacagtacccgacagtaatgtattggcactgagtgctgtcatggctggttcacaatcacaattagtttctaccttgagaccatcaatagtcgttaaagctgaaacaccctctaatggaaaggaaggaactgggcaaccatgcaatactgcaatacaacctaatgtgcgatcatcttctcttaacaacagattgagaagtgattcctgtttgaaccctgctgattcagcaaatgaaatcatgcatggtaagcatgctgcagaaatttctggtgttgaagcaaaggtcaagtctgaagcaaactctgaggttgttgtgagtacagatgaggaattggttcatagcagtggaacatcaatcgaaactgaacgagccaaggttgtcgctattgaagaaaacagggcacaatcaacctttgagacagataaaatgaaagttggggaaacaactatcaacacaggaacaacagatcaatgcatcaatactgaagaaaagctccccagtttagcaacttctgaggcacacacaatcactgacgtgaagatgactagcaatacaggaataccagtacagcaacacaacattgctactattgaagagaagacccagattgatgcagtgtctgatccacatccacatgcaatccaagatattcaagatatggaaatgggcaccaacaatggaccacccatagatcaaacaagcagtcttgttgaagaaaacccccctggacaatcctcttcaattgctgatgcgtgtgtcactgctaatactggaataccaacagatcaaacacagcatccaaatgagtcaactgaaaatgcagtaaagaaatctcccaacagagaactatataaagaaaaaccgggctgcaacataacctcagatattacccaaaaagtaacttcaaatggcatcatgtgccctgaggacaaaactttatgtgttcatgaagataaagcagtgggttgtgacacagaagcaaaagaagaaaactaatttagtagcaggttgcatccaattttcattttccagatggaactgttctgaatctaccattattttaccaacgtcagtgattgactgtgttctctacattctcttggacagcattatacatttagccattgccaaccatttttccaggaggtttgttctgtgccccttggaaacatgctcaccaggcttactccattcgtaatttactggtatccattgcctcctggtgtagtttagagaatcccagaacacaggaaatataatcgtgatgttgtactttatgtagattgataatcttgagttcctgactattgaattccatttccccctttatttgttccgtgctcatctggaatgctgtaactagatagggtttagctgagttaggactggattatcaagtcataataatgatacgtgccttcgccatcccttcggaccatgttccaatgtgatacaatctactaccatgcaatatatcaccatcagcctgctaacgcacgccactagctttaagtttccaatccttctgtcagtttgtaatgtttgcagctacttcatccgtttcaatttacacttcctatgtccaatctaatggtgtgtttggttgaaa

SEQ ID NO: 40709 - DNA, 3154 bp, Zea Mays
atcgcccgtgccctgcggtgttctactcactcccagctgcgacaatccccctcatcgcccgccccccctggtctcgtctctccttcgcgcatctcaccgccatctcactcccgaaccccccttcctttgcttcccgcgtctaatttagcgccagaacatttgaattccccgcaacttccgcttccagcggcttctcgaaccttccggaggcgccgccgatcgaccccggctccatccccttgcccccctagggtttcgcgttcccctcggggatgggggacgccgccaccgccgcagcggcggcggcagcgtcgcccgcttgcgccgcgcggaagcggcggcgcggcgacgacagcgcggggctgaggcgggtggcggagatcgtgatggtcctggccgcggccggggaggtacgcggcgggaggcagcccacggccgcggagcgcgcgctggcggccgaggcgcgggagactctggccaccgccgtcgccgagagggccgtgcggcccaaggatctgttcccgggggaagcggtgcgcgcggtcgtcgaggatctcgggctcaaccgctccaaggacccagctgccatggggtttcgcccgcccaaggcctccatcgccgataggctcatgcttactaagcgcaagatggaagaagtcaaggaagctccagtggttagcgcacctcaaacagtcgtctcaagtggaacgtctgagttccatggtttgaatggggctaccaagtttggtgttggagttcctaggaacccaccagttccatctttagctgctactggcccattaacctctacatccccagttaccttgaagccaccaggatcatctcctgtaaaaccagttgccaactcatcagttgttcctctagtcaatactggtccatcaaaccttaaattggacaaaaatgttagtggtcctctgaatttagcattcagtggagcaacggtcgtccactcaaacaagtcaactttagacacatctgctaggcccgatgtaaatgctgtacagagttccaatcagacggtgaaaaaccatgacacaaaaccagtggcagttcaagccgcgacaggtaaccctgttatgggtcatcgtgctacaccaggcgtggcatttgctccaccaaaacctactttcatcaatcacaatgagatagcaaagaatgttctacaatttcttcaccaacctgcaaaccatcctagctggactccaccatcaactgagtacatgcattctcgtttgtgctgtcaaatatgcaaagttgatatcattggtacagacaatttacttgtttgtgatgcttgcgagaggggagtacacttgaaatgccttcatcagtatggcaataagggcgtccccaaagctgagtggcattgttctgcatgcctgactcagagtaagggaaaacccttgccaccaaaatatggcaaggttacaaggactgtagttgcatcaaagactgctccacctggtggtggagcacagctttctttgcaggaatcagcagaaaacatggctgcaaaggaaaatcaccaaaagttggctgcaaatggaaatcttatgaagccattctccattcatggtggcagcacagtacccgacagtaatgtattggcactgagtgctgtcatggctggttcacaatcacaattagtttctaccttgagaccatcaatagtcgttaaagctgaaacaccctctaatggaaaggaaggaactgggcaaccatgcaatactgcaatacaacctaatgtgcgatcatcttctcttaacaacagattgagaagtgattcctgtttgaaccctgctgattcagcaaatgaaatcatgcatggtaagcatgctgcagaaatttctggtgttgaagcaaaggtcaagtctgaagcaaactctgaggttgttgtgagtacagatgaggaattggttcatagcagtggaacatcaatcgaaactgaacgagccaaggttgtcgctattgaagaaaacagggcacaatcaacctttgagacagataaaatgaaagttggggaaacaactatcaacacaggaacaacagatcaatgcatcaatactgaagaaaagctccccagtttagcaacttctgaggcacacacaatcactgacgtgaagatgactagcaatacaggaataccagtacagcaacacaacattgctactattgaagagaagacccagattgatgcagtgtctgatccacatccacatgcaatccaagatattcaagatatggaaatgggcaccaacaatggaccacccatagatcaaacaagcagtcttgttgaagaaaacccccctggacaatcctcttcaattgctgatgcgtgtgtcactgctaatactggaataccaacagatcaaacacagcatccaaatgagtcaactgaaaatgcagtaaagaaatctcccaacagagaactatataaagaaaaaccgggctgcaacataacctcagatattacccaaaaagtaacttcaaatggcatcatgtgccctgaggacaaaactttatgtgttcatgaagataaagcagtgggttgtgacacagaagcaaaagaagaaaactaatttagtagcaggttgcatccaattttcattttccagatggaactgttctgaatctaccattattttaccaacgtcagtgattgactgtgttctctacattctcttggacagcattatacatttagccattgccaaccatttttccaggaggtatccattgcctcctggtgtagtttagagaatcccagaacacaggaaatataatcgtgatgttgtactttatgtagattgataatcttgagttcctgactattgaattccatttccccctttatttgttccgtgctcatctggaatgctgtaactagatagggtttagctgagttaggactggattatcaagtcataataatgatacgtgccttcgccatcccttcggaccatgttccaatgtgatacaatctactaccatgcaatatatcaccatcagcctgctaacgcacgccactagctttaagtttccaatccttctgtcagtttgtaatgtttgcagctacttcatccgtttcaatttacacttcctatgtccaatctaatggtgtgtttggttgaaa

SEQ ID NO: 40710 - DNA, 1820 bp, Zea Mays
tactgtttatagagttaaatttgaaatagtagatgacataaaaagtctgatagagatggcctaatcaaactttttttgtgctatatctctctgtataaacgaattactaaaaacataaaaaatctcaatgaaatatattttattatattctctacaaatatatcaaatttaagttatatcctatgtttaaaagttttcaaaatacatccaatataaataatttaaaaataatataactagatggattaaaatttagtatatataatagagtgtacgtatatttgtttacaaattttgatttcacgaccctaaacagtaaacatcccgttctttaaagaacacccctccagtcaggccgtcccgcgccgacgtcaacggagacgtgtcaacggcggcggtgataagacccataaccttctagatttttttccgctgcctcaatggatctctgggagagggcccgggccttcgccggcgaggcggcgaagcggtcgcaggaactctccgcggaggcggccaagcgctcgtcggcgctggtctcggagacggcgaagaagtccaaggagatcttctccgaaaccgcctccaagtcgcgggagatcgccgctgaggccaccaagcaggccgacctcctcgccggccagatcaagcacctcgcctccgacctccctgtgccttcgatcccgcccatccccgcgatcccgcctatccccgccgctgcctcgtcggtgcccgacgcggccgagcttgagtgctacggcatcaccgacgacctccgcgagttcgtcaagggcatgaccataaacaccttccgcgacttcccactgcaaggatctgaacgagtggcaggccagacacggcacacttgtcctctcggcagtcaaggaaatatcaaagttcagatatgagctatgcccaagatacatgaaagagcgcaaattctggcgggtatattttttgctagtaaacagctatatagctccgtttgagaagaaatacttcgaggagctgaaagtgaaagcagaggaagagaaaaaggattcccagaaggaagcatcccaagcatctacaactgcagaaccgaaagacacaaaagtgccaagcaagacctcttcgacaaatccagaacatgacctggatgtatttctgctgggggatctgggtagcgatgatgaggcttctgttggtggtgatgatgggctagatgatgactttgataagattgatgcgacctcgggattggaaagtgatgacgatgacaaaaaggcagcaacagggaaggcagaaggtgtgtagtagtagactatggttttgagagatgacgccaatgatagcgaacttcaggattccatgatgatattgtatattagttgatcgcatgccgtatgttcatttgttatctcccaatgaaggaatgctaagcacttgttattacaattttcgattttttttactaaactgagacacctatctatggatggtgttactcttttcttattagaagtgttctgtgaactgtctctacgaaattgaactccgactgctcgagactgtaattcacatgatgcacccgtgtgtgaagataatagatttggtatatggtgcgatttttcaagcctgacgtacgtttttacacctgattacctgaaataatggggtctcattggaccacggtaaaatttctcgcctgagatttggcgaaattcggtaaaatttactatttctggtactgatcaggaaatggttttcaaacctatttcgttcaattttgtatttttttttgaaatttctgtaaaatcagaaaaatatgataaaaatac

SEQ ID NO: 40711 - DNA, 1918 bp, Zea Mays
tactgtttatagagttaaatttgaaatagtagatgacataaaaagtctgatagagatggcctaatcaaactttttttgtgctatatctctctgtataaacgaattactaaaaacataaaaaatctcaatgaaatatattttattatattctctacaaatatatcaaatttaagttatatcctatgtttaaaagttttcaaaatacatccaatataaataatttaaaaataatataactagatggattaaaatttagtatatataatagagtgtacgtatatttgtttacaaattttgatttcacgaccctaaacagtaaacatcccgttctttaaagaacacccctccagtcaggccgtcccgcgccgacgtcaacggagacgtgtcaacggcggcggtgataagacccataaccttctagatttttttccgctgcctcaatggatctctgggagagggcccgggccttcgccggcgaggcggcgaagcggtcgcaggaactctccgcggaggcggccaagcgctcgtcggcgctggtctcggagacggcgaagaagtccaaggagatcttctccgaaaccgcctccaagtcgcgggagatcgccgctgaggccaccaagcaggccgacctcctcgccggccagatcaagcacctcgcctccgacctccctgtgccttcgatcccgcccatccccgcgatcccgcctatccccgccgctgcctcgtcggtgcccgacgcggccgagcttgagtgctacggcatcaccgacgacctccgcgagttcgtcaagggcatgaccataaacaccttccgcgacttcccactgcaagatgagcctgaggtgtctgatgtgccaactgtgtcgaatgtgcgtcaggatctgaacgagtggcaggccagacacggcacacttgtcctctcggcagtcaagattaagcaatgaagatgaagcattgatggatatattagcaaatggaaaatggaaatatcaaagttcagatatgagctatgcccaagatacatgaaagagcgcaaattctggcgggtatattttttgctagtaaacagctatatagctccgtttgagaagaaatacttcgaggagctgaaagtgaaagcagaggaagagaaaaaggattcccagaaggaagcatcccaagcatctacaactgcagaaccgaaagacacaaaagtgccaagcaagacctcttcgacaaatccagaacatgacctggatgtatttctgctgggggatctgggtagcgatgatgaggcttctgttggtggtgatgatgggctagatgatgactttgataagattgatgcgacctcgggattggaaagtgatgacgatgacaaaaaggcagcaacagggaaggcagaaggtgtgtagtagtagactatggttttgagagatgacgccaatgatagcgaacttcaggattccatgatgatattgtatattagttgatcgcatgccgtatgttcatttgttatctcccaatgaaggaatgctaagcacttgttattacaattttcgattttttttactaaactgagacacctatctatggatggtgttactcttttcttattagaagtgttctgtgaactgtctctacgaaattgaactccgactgctcgagactgtaattcacatgatgcacccgtgtgtgaagataatagatttggtatatggtgcgatttttcaagcctgacgtacgtttttacacctgattacctgaaataatggggtctcattggaccacggtaaaatttctcgcctgagatttggcgaaattcggtaaaatttactatttctggtactgatcaggaaatggttttcaaacctatttcgttcaattttgtatttttttttgaaatttctgtaaaatcagaaaaatatgataaaaatac

SEQ ID NO: 40712 - DNA, 1398 bp, Zea Mays
cccactccaaattcctctcctcgcgctctcccttgtcgccacccgccatgcccacaactccgcgagaacgccctggctgctctccccacgcttgcccacgccgcatcctctccctccccggcgcccctacgtcgcggctcgcggtggctcccgctgccgcgctcgccacacggagtagcgagggtgctacttaccaccttaccggcgttggagaccgaggtggcggctttgccggacaagggtgatcctccgcgggcgtcgccgccgcaaagcagatggacgcagagaggatgaatgccctggaacagatgttcaagcgactggccctcgccgacgacacgcgcctgaagccgctcgctaatcgacctcatttaggagtcaatttatgaaccaaacggcaccttacttcttggaatttttaggagtcaatttatacagcctgcaacttctatccaaaaacaggttgctcaatttggtaaagagaagaccgttttacgcactgaggttgatcgcggtttcacgttttatgcactgaggttgatcgcggtttcactgcagaaatatttagcatgcatcctatgtcattttgtcagctttgtgacaaaggtaggtaagtaagctttggactatactgcatgccttgctttcctgttgcatgcgcacaacaaccaagtgctcagatggctggatctgaatgaatggcgtccgacagaattggattctttcattttttttccatttggtgctgccagtcggatcttagtttaagctaggattaatatttcattttattttccccatttgatacatgtgttgctcctttctggtggctggctcggcctggcgctgcacaactgtgccggtatgcataatcaaggccgatactatgagtccagcatgttgtagcagtacacggacccacaatccacgaggagatgcaatgcagcagtatctcctttctgttgctccccacctccccacctccactcccactgagctttctaattgtgcagtccaactcttagcctgtactctactagcttggtcctcccatcaaccatgttaattcccaggcgcctcttgggaggtggggttgggagcttcttatggtttgcattggatggatgaagcaacactaactcctcttcccggttggtggcgtcatgtattctgctactttaaaccatatcacattgacgcatcccctaccaccattcttatatgtcaaaaacaggaattcgcctccatacatattaaatttatagtctagatttttactctgtagacgacttaatcatatgtggactattaataatgctgtgtgatggcgattgtttaataacccgtattgttgtgcatgagaagttataattttccaaaatgttcgtttgcatgcag

SEQ ID NO: 40713 - DNA, 1122 bp, Zea Mays
aattcctctcctcgcgctctcccttgtcgccacccgccatgcccacaactccgcgagaacgccctggctgctctccccacgcttgcccacgccgcatcctctccctccccggcgcccctacgtcgcggctcgcggtggctcccgctgccgcgctcgccacacggagtagcgagggtgctacttaccaccttaccggcgttggagaccgaggtggcggctttgccggacaagggtgatcctccgcgggcgtcgccgccgcaaagcagatggacgcagagaggatgaatgccctggaacagatgttcaagcgactggccctcgccgacgacacgcgcctgaagccgctcgctaatcgacctcatttaggagtcaatttatgaaccaaacggcaccttacttcttggaatttttaggagtcaatttatacagcctgcaacttctatccaaaaacaggttgctcaatttggtaaagagaagaccgttttacgcactgaggttgatcgcggtttcacgttttatgcactgaggttgatcgcggtttcactgcagaaatatttagcatgcatcctatgtcattttgtcagctttgtgacaaaggtaggccgatactatgagtccagcatgttgtagcagtacacggacccacaatccacgaggagatgcaatgcagcagtatctcctttctgttgctccccacctccccacctccactcccactgagctttctaattgtgcagtccaactcttagcctgtactctactagcttggtcctcccatcaaccatgttaattcccaggcgcctcttgggaggtggggttgggagcttcttatggtttgcattggatggatgaagcaacactaactcctcttcccggttggtggcgtcatgtattctgctactttaaaccatatcacattgacgcatcccctaccaccattcttatatgtcaaaaacaggaattcgcctccatacatattaaatttatagtctagatttttactctgtagacgacttaatcatatgtggactattaataatgctgtgtgatggcgattgtttaataacccgtattgttgtgcatgagaagttataattttccaaaatgttcgtttgcatgcag

SEQ ID NO: 40714 - DNA, 1502 bp, Zea Mays
ttcctctcctcgcgctctcccttgtcgccacccgccatgcccacaactccgcgagaacgccctggctgctctccccacgcttgcccacgccgcatcctctccctccccggcgcccctacgtcgcggctcgcggtggctcccgctgccgcgctcgccacacggagtagcgagggtgctacttaccaccttaccggcgttggagaccgaggtggcggctttgccggacaagggtgatcctccgcgggcgtcgccgccgcaaagcagatggacgcagagaggatgaatgccctggaacagatgttcaagcgactggccctcgccgacgacacgcgcctgaagccgctcgctaatcgacctcatttaggagtcaatttatgaaccaaacggcaccttacttcttggaatttttaggagtcaatttatacagcctgcaacttctatccaaaaacagcttctgaatttttcgcctgcgatgcttacctggagaaatgcacaatcaccatgtttatgtggttggaagacagaccttggtccattatgagtagcagtccgaaatgatttgtttggttgctcaatttggtaaagagaagaccgttttacgcactgaggttgatcgcggtttcacgttttatgcactgaggttgatcgcggtttcactgcagaaatatttagcatgcatcctatgtcattttgtcagctttgtgacaaaggtaggtaagtaagctttggactatactgcatgccttgctttcctgttgcatgcgcacaacaaccaagtgctcagatggctggatctgaatgaatggcgtccgacagaattggattctttcattttttttccatttggtgctgccagtcggatcttagtttaagctaggattaatatttcattttattttccccatttgatacatgtgttgctcctttctggtggctggctcggcctggcgctgcacaactgtgccggtatgcataatcaaggccgatactatgagtccagcatgttgtagcagtacacggacccacaatccacgaggagatgcaatgcagcagtatctcctttctgttgctccccacctccccacctccactcccactgagctttctaattgtgcagtccaactcttagcctgtactctactagcttggtcctcccatcaaccatgttaattcccaggcgcctcttgggaggtggggttgggagcttcttatggtttgcattggatggatgaagcaacactaactcctcttcccggttggtggcgtcatgtattctgctactttaaaccatatcacattgacgcatcccctaccaccattcttatatgtcaaaaacaggaattcgcctccatacatattaaatttatagtctagatttttactctgtagacgacttaatcatatgtggactattaataatgctgtgtgatggcgattgtttaataacccgtattgttgtgcatgagaagttataattttccaaaatgttcgtttgcatgcag

SEQ ID NO: 40715 - DNA, 1116 bp, Zea Mays
ttcctctcctcgcgctctcccttgtcgccacccgccatgcccacaactccgcgagaacgccctggctgctctccccacgcttgcccacgccgcatcctctccctccccggcgcccctacgtcgcggctcgcggtggctcccgctgccgcgctcgccacacggagtagcgagggtgctacttaccaccttaccggcgttggagaccgaggtggcggctttgccggacaagggtgatcctccgcgggcgtcgccgccgcaaagcagatggacgcagagaggatgaatgccctggaacagatgttcaagcgactggccctcgccgacgacacgcgcctgaagccgctcgctaatcgacctcatttaggagtcaatttatgaaccaaacggcaccttacttcttggaatttttaggagtcaatttatacagcctgcaacttctatccaaaaacaggttgctcaatttggtaaagagaagaccgttttacgcactgaggttgatcgcggtttcacgttttatgcactgaggttgatcgcggtttcactgcagaaatatttagcatgcatcctatgtcattttgtcagctttgtgacaaaggccgatactatgagtccagcatgttgtagcagtacacggacccacaatccacgaggagatgcaatgcagcagtatctcctttctgttgctccccacctccccacctccactcccactgagctttctaattgtgcagtccaactcttagcctgtactctactagcttggtcctcccatcaaccatgttaattcccaggcgcctcttgggaggtggggttgggagcttcttatggtttgcattggatggatgaagcaacactaactcctcttcccggttggtggcgtcatgtattctgctactttaaaccatatcacattgacgcatcccctaccaccattcttatatgtcaaaaacaggaattcgcctccatacatattaaatttatagtctagatttttactctgtagacgacttaatcatatgtggactattaataatgctgtgtgatggcgattgtttaataacccgtattgttgtgcatgagaagttataattttccaaaatgttcgtttgcatgcag

SEQ ID NO: 40716 - DNA, 1219 bp, Zea Mays
ctcccttgtcgccacccgccatgcccacaactccgcgagaacgccctggctgctctccccacgcttgcccacgccgcatcctctccctccccggcgcccctacgtcgcggctcgcggtggctcccgctgccgcgctcgccacacggagtagcgagggtgctacttaccaccttaccggcgttggagaccgaggtggcggctttgccggacaagggtgatcctccgcgggcgtcgccgccgcaaagcagatggacgcagagaggatgaatgccctggaacagatgttcaagcgactggccctcgccgacgacacgcgcctgaagccgctcgctaatcgacctcatttaggagtcaatttatgaaccaaacggcaccttacttcttggaatttttaggagtcaatttatacagcctgcaacttctatccaaaaacagcttctgaatttttcgcctgcgatgcttacctggagaaatgcacaatcaccatgtttatgtggttggaagacagaccttggtccattatgagtagcagtccgaaatgatttgtttggttgctcaatttggtaaagagaagaccgttttacgcactgaggttgatcgcggtttcacgttttatgcactgaggttgatcgcggtttcactgcagaaatatttagcatgcatcctatgtcattttgtcagctttgtgacaaaggtaggccgatactatgagtccagcatgttgtagcagtacacggacccacaatccacgaggagatgcaatgcagcagtatctcctttctgttgctccccacctccccacctccactcccactgagctttctaattgtgcagtccaactcttagcctgtactctactagcttggtcctcccatcaaccatgttaattcccaggcgcctcttgggaggtggggttgggagcttcttatggtttgcattggatggatgaagcaacactaactcctcttcccggttggtggcgtcatgtattctgctactttaaaccatatcacattgacgcatcccctaccaccattcttatatgtcaaaaacaggaattcgcctccatacatattaaatttatagtctagatttttactctgtagacgacttaatcatatgtggactattaataatgctgtgtgatggcgattgtttaataacccgtattgttgtgcatgagaagttataattttccaaaatgttcgtttgcatgcag

SEQ ID NO: 40717 - DNA, 1165 bp, Zea Mays
ctggccctcgccgacgacacgcgcctgaagccgctcgctaatcgacctcatttaggagtcaatttatgaaccaaacggcaccttacttcttggaatttttaggagtcaatttatacagcctgcaacttctatccaaaaacagcttctgaatttttcgcctgcgatgcttacctggagaaatgcacaatcaccatgtttatgtggttggaagacagaccttggtccattatgagtagcagtccgaaatgatttgtttggttgctcaatttggtaaagagaagaccgttttacgcactgaggttgatcgcggtttcacgttttatgcactgaggttgatcgcggtttcactgcagaaatatttagcatgcatcctatgtcattttgtcagctttgtgacaaaggtaggccgatactatgagtccagcatgttgtagcagtacacggacccacaatccacgaggagatgcaatgcagcagtatctcctttctgttgctccccacctccccacctccactcccactgagctttctaattgtgcagtccaactcttaggtaagtttagagataatgttttaatttccatagaaattatgatcgtatgttgctgttgcatcatctattaatgtttatattctaattgtcgaatacatatcaagttgcatggtaaaatatgtacgttcatatttgtatttaggtcaactcaattagttatatgtactctactagcttggtcctcccatctgttcatacatctgttcattgaccaccttcttttcaatctttggtggcagcctgtactctactagcttggtcctcccatcaaccatgttaattcccaggcgcctcttgggaggtggggttgggagcttcttatggtttgcattggatggatgaagcaacactaactcctcttcccggttggtggcgtcatgtattctgctactttaaaccatatcacattgacgcatcccctaccaccattcttatatgtcaaaaacaggaattcgcctccatacatattaaatttatagtctagatttttactctgtagacgacttaatcatatgtggactattaataatgctgtgtgatggcgattgtttaataacccgtattgttgtgcatgagaagttataattttccaaaatgttcgtttgcatgcag

SEQ ID NO: 40718 - DNA, 1399 bp, Zea Mays
ctcacttcgcttacgtgttctgattatctgtatgacggcacatcaagtagcacatcaagtaggccccttctgttccatctccccatccacatcttcactttcgtgatgtagcatagaggtcagcacgcatgcggctagctccaagaggattgcatcagttggagcttcttgtgtatcgcagttctccacttcgcagctcgcactaacattgtcatctcttgcgtcatcgcgcaaacaccctcgctaatcgacctcatttaggagtcaatttatgaaccaaacggcaccttacttcttggaatttttaggagtcaatttatacagcctgcaacttctatccaaaaacagcttctgaatttttcgcctgcgatgcttacctggagaaatgcacaatcaccatgtttatgtggttggaagacagaccttggtccattatgagtagcagtccgaaatgatttgtttggttgctcaatttggtaaagagaagaccgttttacgcactgaggttgatcgcggtttcacgttttatgcactgaggttgatcgcggtttcactgcagaaatatttagcatgcatcctatgtcattttgtcagctttgtgacaaaggtaggtaagtaagctttggactatactgcatgccttgctttcctgttgcatgcgcacaacaaccaagtgctcagatggctggatctgaatgaatggcgtccgacagaattggattctttcattttttttccatttggtgctgccagtcggatcttagtttaagctaggattaatatttcattttattttccccatttgatacatgtgttgctcctttctggtggctggctcggcctggcgctgcacaactgtgccggtatgcataatcaaggccgatactatgagtccagcatgttgtagcagtacacggacccacaatccacgaggagatgcaatgcagcagtatctcctttctgttgctccccacctccccacctccactcccactgagctttctaattgtgcagtccaactcttagcctgtactctactagcttggtcctcccatcaaccatgttaattcccaggcgcctcttgggaggtggggttgggagcttcttatggtttgcattggatggatgaagcaacactaactcctcttcccggttggtggcgtcatgtattctgctactttaaaccatatcacattgacgcatcccctaccaccattcttatatgtcaaaaacaggaattcgcctccatacatattaaatttatagtctagatttttactctgtagacgacttaatcatatgtggactattaataatgctgtgtgatggcgattgtttaataacccgtattgttgtgcatgagaagttataattttccaaaatgttcgtttgcatgcag

SEQ ID NO: 40719 - DNA, 982 bp, Zea Mays
ctgctctacttagcgcggatgcactattgcggtgtacgaccttcaccacagggatcttatccctgatatccattaacggttatgggaagaaagctcgctaatcgacctcatttaggagtcaatttatgaaccaaacggcaccttacttcttggaatttttaggagtcaatttatacagcctgcaacttctatccaaaaacagcttctgaatttttcgcctgcgatgcttacctggagaaatgcacaatcaccatgtttatgtggttggaagacagaccttggtccattatgagtagcagtccgaaatgatttgtttggttgctcaatttggtaaagagaagaccgttttacgcactgaggttgatcgcggtttcacgttttatgcactgaggttgatcgcggtttcactgcagaaatatttagcatgcatcctatgtcattttgtcagctttgtgacaaaggccgatactatgagtccagcatgttgtagcagtacacggacccacaatccacgaggagatgcaatgcagcagtatctcctttctgttgctccccacctccccacctccactcccactgagctttctaattgtgcagtccaactcttagcctgtactctactagcttggtcctcccatcaaccatgttaattcccaggcgcctcttgggaggtggggttgggagcttcttatggtttgcattggatggatgaagcaacactaactcctcttcccggttggtggcgtcatgtattctgctactttaaaccatatcacattgacgcatcccctaccaccattcttatatgtcaaaaacaggaattcgcctccatacatattaaatttatagtctagatttttactctgtagacgacttaatcatatgtggactattaataatgctgtgtgatggcgattgtttaataacccgtattgttgtgcatgagaagttataattttccaaaatgttcgtttgcatgcag

SEQ ID NO: 40720 - DNA, 1285 bp, Zea Mays
cgaatgtccaactgattttttgggttatcacattcacatagcttgcttgctgcaaacgacactgtaacaaatttgtttagattgtaaagcagagtaggctcatgtggaaccatgttgatcgaatatcccaatatttttttggctaacatatttgcatagctatactgcaggtctgcagcacatctatttaaattgtaaagcaagattgactcatatgggccctacgcgaaacttgctcgatcgaataccccaaaagataatttttagctaacacattttcatggcttgcttattcaatcctcattactacaccagccatccttcctaatgtatataccttcacatatatatattaaatgttgcagatacatagtaactctaattgtgtttttgcagctcgctaatcgacctcatttaggagtcaatttatgaaccaaacggcaccttacttcttggaatttttaggagtcaatttatacagcctgcaacttctatccaaaaacagcttctgaatttttcgcctgcgatgcttacctggagaaatgcacaatcaccatgtttatgtggttggaagacagaccttggtccattatgagtagcagtccgaaatgatttgtttggttgctcaatttggtaaagagaagaccgttttacgcactgaggttgatcgcggtttcacgttttatgcactgaggttgatcgcggtttcactgcagaaatatttagcatgcatcctatgtcattttgtcagctttgtgacaaaggccgatactatgagtccagcatgttgtagcagtacacggacccacaatccacgaggagatgcaatgcagcagtatctcctttctgttgctccccacctccccacctccactcccactgagctttctaattgtgcagtccaactcttagcctgtactctactagcttggtcctcccatcaaccatgttaattcccaggcgcctcttgggaggtggggttgggagcttcttatggtttgcattggatggatgaagcaacactaactcctcttcccggttggtggcgtcatgtattctgctactttaaaccatatcacattgacgcatcccctaccaccattcttatatgtcaaaaacaggaattcgcctccatacatattaaatttatagtctagatttttactctgtagacgacttaatcatatgtggactattaataatgctgtgtgatggcgattgtttaataacccgtattgttgtgcatgagaagttataattttccaaaatgttcgtttgcatgcag

SEQ ID NO: 40721 - DNA, 1556 bp, Zea Mays
cgaatgtccaactgattttttgggttatcacattcacatagcttgcttgctgcaaacgacactgtaacaaatttgtttagattgtaaagcagagtaggctcatgtggaaccatgttgatcgaatatcccaatatttttttggctaacatatttgcatagctatactgcaggtctgcagcacatctatttaaattgtaaagcaagattgactcatatgggccctacgcgaaacttgctcgatcgaataccccaaaagataatttttagctaacacattttcatggcttgcttattcaatcctcattactacaccagccatccttcctaatgtatataccttcacatatatatattaaatgttgcagatacatagtaactctaattgtgtttttgcagctcgctaatcgacctcatttaggagtcaatttatgaaccaaacggcaccttacttcttggaatttttaggagtcaatttatacagcctgcaacttctatccaaaaacagcttctgaatttttcgcctgcgatgcttacctggagaaatgcacaatcaccatgtttatgtggttggaagacagaccttggtccattatgagtagcagtccgaaatgatttgtttggttgctcaatttggtaaagagaagaccgttttacgcactgaggttgatcgcggtttcacgttttatgcactgaggttgatcgcggtttcactgcagaaatatttagcatgcatcctatgtcattttgtcagctttgtgacaaaggtaggtaagtaagctttggactatactgcatgccttgctttcctgttgcatgcgcacaacaaccaagtgctcagatggctggatctgaatgaatggcgtccgacagaattggattctttcattttttttccatttggtgctgccagtcggatcttagtttaagctaggattaatatttcattttattttccccatttgatacatgtgttgctcctttctggtggctggctcggcctggcgctgcacaactgtgccggtatgcataatcaaggccgatactatgagtccagcatgttgtagcagtacacggacccacaatccacgaggagatgcaatgcagcagtatctcctttctgttgctccccacctccccacctccactcccactgagctttctaattgtgcagtccaactcttagcctgtactctactagcttggtcctcccatcaaccatgttaattcccaggcgcctcttgggaggtggggttgggagcttcttatggtttgcattggatggatgaagcaacactaactcctcttcccggttggtggcgtcatgtattctgctactttaaaccatatcacattgacgcatcccctaccaccattcttatatgtcaaaaacaggaattcgcctccatacatattaaatttatagtctagatttttactctgtagacgacttaatcatatgtggactattaataatgctgtgtgatggcgattgtttaataacccgtattgttgtgcatgagaagttataattttccaaaatgttcgtttgcatgcag

SEQ ID NO: 40722 - DNA, 893 bp, Zea Mays
gcgctggccacgggccacccaccgctgcgctgccagcgagggtaaaatacctcgcctcgccgcctataagaaaggtccctctccgtttcttcaaactttagttctagagcccaccaaagaaaaaacaaataccggatagatattaaagcattttcctcgtcgacttaaaaaatagaacaaaaaggttcttccttttcgcagctccatcgtccaccaacctcctccgattcggccgtcgtagcgtatagccgaattgccccactccaggactctcgccagcttctccggccgactagaggctgtttccggcgagtgctcggctgatctcctccgcgcggctgaggagatcacgcggtctcgctcgggggggctggggcgtgcatgatgggactttggttgattccgacgatggagactccggcgaggcttctgtggagcaccagcttcttccgccacaaaatcgccgacatgcttgcatcctcctcctgcttcttatagatcccacccctcgacgtcgtcgccggcagctagctcgctagcttctgtacatacgtcgacgccatatctagctagtctcttcatccagtcccgataagtgataactaataattaggagcttgcttcgacgaccttgcattggtccatggagtccggacggctcatcttcaacgcgcccggctccggcgccgggcagatgctcttcctggactgcggcgcaggcggtggtcccggcggcggcttgttgcatcgagtcatgaaggcgggagaccgatgcttggccttgaagaagggcgcggcgtaaaacggcccttctacacctcgcccgacgagctcctcgaggaggagtactacgacgagcagctgccggagaagaagcgccgcctgacgccggt

SEQ ID NO: 40723 - DNA, 885 bp, Zea Mays
gcgctggccacgggccacccaccgctgcgctgccagcgagggtaaaatacctcgcctcgccgcctataagaaaggtccctctccgtttcttcaaactttagttctagagcccaccaaagaaaaaacaaataccggatagatattaaagcattttcctcgtcgacttaaaaaatagaacaaaaaggttcttccttttcgcagctccatcgtccaccaacctcctccgattcggccgtcgtagcgtatagccgaattgccccactccaggactctcgccagcttctccggccgactagaggctgtttccggcgagtgctcggctgatctcctccgcgcggctgaggagatcacgcggtctcgctcgggggggctggggcgtgcatgatgggactttggttgattccgacgatggagactccggcgaggcttctgtggagcaccagcttcttccgccacaaaatcgccgacatgcttgcatcctcctcctgcttcttatagatcccacccctcgacgtcgtcgccggcagctagctcgctagcttctgtacatacgtcgacgccatatctagctagtctcttcatccagtcccgataagtgataactaataattaggagcttgcttcgacgaccttgcattggtccatggagtccggacggctcatcttcaacgcgcccggctccggcgccgggcagatgctcttcctggactgcggcgcaggcggtggtcccggcggcggcttgttgcatcgaggcgggagaccgatgcttggccttgaagaagggcgcggcgtaaaacggcccttctacacctcgcccgacgagctcctcgaggaggagtactacgacgagcagctgccggagaagaagcgccgcctgacgccggt

SEQ ID NO: 40724 - DNA, 3438 bp, Zea Mays
caaaaaggcactaaaaccggcaaaacgtagagacggagtacgtatcaagcctgatacaacaagcaagtaagcaaacggctccacgcgcctcgttccgtcgaaagccacacgcaagcttccagtcccctcgccggcgcgccacctcccgcggatacaagaacggcctacgtgcctgcgtgctttgcttcactccactccactctacttcgtccatacagggaaaacaaaggcagcgtggtctggaatccaaaacagggcgagcggcacggcagcggaggggagaccacggtggttggctggctagttgccctctccgcccgccagagacctctcctctcctgtccccaccccctttggcctttgctcgttcgtggcgctcccgtacgcgtccagcgacgagagtttaccgctccggtttcgcttcgtacgggcggttgatacttgatagcggttgataagaggcgcggcggcggggcgagagagcttggttgcgccgaggttgcgcgaaactactagaaggaggggggacgaggaggagtgcggagtgtgtcttgctttgctttgcctcgcctgtccgggctggttggttggtctcccgctcgctacagtccaagccgacgcacaaatctcggtctcggacgcgccgccgcggtaggattccgggtgcctcgattccttgtttctttccgaggtatccacgaggttcgctgccatggagccagcaggcgtggcgcattgaggcgcgcgtgcggggccgtggagtggaggggcatggatctggaagccgcgggcggcgcggaggcggcgcacgggaagcggcgggcgacgctgctgctagcgtaccagagcctcggggttgtgtacggcgacgtggccacgtcgccgctctacgtctacaagagcgccttcgcgggcgacgacatccagcactcggagggcaacgaggagatctacggcgtgctctcattcgtcttctggacgctcaccctcatcaccctcctcaagtacgtggtcattgtcctccgtgccgacgacggcggggagggcggcaccttcgcgctctactccctcatctgccgccacgtccgcgccggcctcctgcccggcggcggcaccagagatgagctcatggaggaagagaaggccaccgggcgtcgtggcgagcggcccgtgtccagggtcagggcggtgcttgagaagtacagagtgctgcagcggctgttgctgctgttcgcactgctcgggacatgcatggtcatcggggacggcgtgctcacccctgcagtctctgtgttttctgcggtatctgggcttgagttgtcgttggaaaaggaacagcacaaatatatagaacttcctgtggcctgtgccatacttatatgcttgtttgcgctgcaacactacggcacacacaaagttgggtttctttttgcaccaatcgtatgcatttggcttctctgcataagtgcaataggcctctacaatatcatccgttgggaccaccatgtttatcgagccctctcgccatattacatgtatcaattcctcaggaagactcaaactggtggctggatgtcactgggtggaatccttctctgtgtaacaggctctgaagctatgtatgcagatcttggacatttttcgcaatcagcaatacagattgcattcatatatgtggtttatcctgcacttgtattggcttacatgggacaagcggcttttatttcacaacatcacaacttcgagagcagttatcatattggattttatgtgtcagtaccagatggcctgttctggtgattgctatactggcagctgtagttgggagtcaggcaattattactggaaccttttcaatcatcaagcagtgctcttcattaagttgtttccctggagtgaagattgtgcacacatcctcgacagtgcatggtcagatatacataccagaaatcaattggatgctgatgatactctgcctggctgttactattggcttcagagacacaaagcacttggcaaatgcacaagggttggcagtaataactgtcatgcttgttaccacttgcttaatgtcactcgttattgtgctttgctggaacaagagtatcttccttgcccttggtttcctgcttttctttggcgcgatcgaagtaatctacttctcagcttcccttgtcaagtttcatgaaggtgcttgggttcctattactctctccttcatatttatggtggtcatgtgtgtctggcactatggcacgataaagaagtacgagttcgatgtgcaaaacaaggtttcagtaaactggctcttaaaccttggtccttcgctgggcattgttcgtgttcgaggcattgggctaatacatacagaactgatgtctggaatcccagctatcttctcccacttcgtcaccaatctgcctgcgtttcaccaggtactggtattcctctgtgtcaaatcagttcctgtgccgcatgtgcaacctgaggaacgatttctggtgggtcgcattggtccgaaagagtataggctatacagggtcattgtcagatacggttatcgcgatgtccagaaagatgacctagagttcgagaaggagctagtcggcaacattgcagagttcatccgcagcagcgcggaatacgacaagaatggcttcgccgaggacacagataagccctccgggaagctgtccaccatcagcactggaattaacatgtgggaagaggatggagaacctgatgcatcctcatcccctcgcaaggagacagacccacgcgacgcagcacccgagcgaaagaaagcgaggttcatgataccaaagagcgcccaggtggacagcgaggtgcggcgcgagctgcaggagctcatggacgccagggaggcgggcatgtccttcatcctgggacgctcgtacatgaaggcgaagagcgggtcgggtttcgtaaagcgggtcgtgataaacttgttgtacgagttcttgaggaagaacagccgtggccctgcgtacgccgcgagcataccccatgcctccactcttgaggtaggaatggtctaccaggtctgacaaacagttagcggggtgtgtaaaggtagaagaaactagaagagatgagacgacgcttgtatatacacccacttgttgctgccgataccgttaacataattacaggataacacagagtagagagacatttgaaaacagctgtggatagcccaaccagaagcatgtgtttagtttcgtgatatgtttgctgctgctgttgacttgctgagtctcagacagtacttgtgagctgtcattgtctgtgagctgtaattgtctgggcgactagcaaaatagcagttttgacgtgcagcgacctctgtagttctgctacttttctatagctgatgtttcaggtagcagcttaattgtatgtttggaaaccctaaag

SEQ ID NO: 40725 - DNA, 3978 bp, Zea Mays
gcttcactccactccactctacttcgtccatacagggaaaacaaaggcagcgtggtctggaatccaaaacagggcgagcggcacggcagcggaggggagaccacggtggttggctggctagttgccctctccgcccgccagagacctctcctctcctgtccccaccccctttggcctttgctcgttcgtggcgctcccgtacgcgtccagcgacgagagtttaccgctccggtttcgcttcgtacgggcggttgatacttgatagcggttgataagaggcgcggcggcggggcgagagagcttggttgcgccgaggttgcgcgaaactactagaaggaggggggacgaggaggagtgcggagtgtgtcttgctttgctttgcctcgcctgtccgggctggttggttggtctcccgctcgctacagtccaagccgacgcacaaatctcggtctcggacgcgccgccgcggtaggattccgggtgcctcgattccttgtttctttccgaggtatccacgaggttcgctgccatggagccagcaggcgtggcgcattgaggcgcgcgtgcggggccgtggagtggaggggcatggatctggaagccgcgggcggcgcggaggcggcgcacgggaagcggcgggcgacgctgctgctagcgtaccagagcctcggggttgtgtacggcgacgtggccacgtcgccgctctacgtctacaagagcgccttcgcgggcgacgacatccagcactcggagggcaacgaggagatctacggcgtgctctcattcgtcttctggacgctcaccctcatcaccctcctcaagtacgtggtcattgtcctccgtgccgacgacggcggggagggcggcaccttcgcgctctactccctcatctgccgccacgtccgcgccggcctcctgcccggcggcggcaccagagatgagctcatggaggaagagaaggccaccgggcgtcgtggcgagcggcccgtgtccagggtcagggcggtgcttgagaagtacagagtgctgcagcggctgttgctgctgttcgcactgctcgggacatgcatggtcatcggggacggcgtgctcacccctgcagtctctgtgttttctgcggtatctgggcttgagttgtcgttggaaaaggaacagcacaaatatatagaacttcctgtggcctgtgccatacttatatgcttgtttgcgctgcaacactacggcacacacaaagttgggtttctttttgcaccaatcgtatgcatttggcttctctgcataagtgcaataggcctctacaatatcatccgttgggaccaccatgtttatcgagccctctcgccatattacatgtatcaattcctcaggaagactcaaactggtggctggatgtcactgggtggaatccttctctgtgtaacaggctctgaagctatgtatgcagatcttggacatttttcgcaatcagcaatacaggtatagacgagactgttacaacttacaacagcaagccaacgactatgaaaagtgattactgttatatttatagaattttattgattcccagtgttcaccattttctcgtaataaaatcatatatagtttacctcagtttcttattctttgtacaagatactccagatgtttacacgactcacattaaaactcttattttcattgtatttgcatatcatcatcataacttagacttctgcaaatgtagaaaaattgtaatgcactaagaaccgctagtataattttctaattgccattaacatttaaactactttttttaatccacattgtttctttccttaggaattttgtgctgagtcagttcctgacccagtaaaatcattcctgaaagcatctgcctcttgactgaaatcttttaattatagggctgggagatttaaattttcatgcaaacactaattactgatttctttgaaaggtcaaccaagtgcctgtactcgatgcatgtttaagttgtcagcatatctgtaattctttatattttatattatactcgctatccttgacatccctgcattgcatgagatattgacattagcgtcatctctgaatcttgattgtgctagctactcaccacacttgaaaaaaggaaaatataaatgttgaactgtcatcagattctgaacgtttttttttaaaaaaaatcctgacagattgcattcatatatgtggtttatcctgcacttgtattggcttacatgggacaagcggcttttatttcacaacatcacaacttcgagagcagttatcatattggattttatgtgtcagtaccagaaacactcagatggcctgttctggtgattgctatactggcagctgtagttgggagtcaggcaattattactggaaccttttcaatcatcaagcagtgctcttcattaagttgtttccctggagtgaagattgtgcacacatcctcgacagtgcatggtcagatatacataccagaaatcaattggatgctgatgatactctgcctggctgttactattggcttcagagacacaaagcacttggcaaatgcacaagggttggcagtaataactgtcatgcttgttaccacttgcttaatgtcactcgttattgtgctttgctggaacaagagtatcttccttgcccttggtttcctgcttttctttggcgcgatcgaagtaatctacttctcagcttcccttgtcaagtttcatgaaggtgcttgggttcctattactctctccttcatatttatggtggtcatgtgtgtctggcactatggcacgataaagaagtacgagttcgatgtgcaaaacaaggtttcagtaaactggctcttaaaccttggtccttcgctgggcattgttcgtgttcgaggcattgggctaatacatacagaactgatgtctggaatcccagctatcttctcccacttcgtcaccaatctgcctgcgtttcaccaggtactggtattcctctgtgtcaaatcagttcctgtgccgcatgtgcaacctgaggaacgatttctggtgggtcgcattggtccgaaagagtataggctatacagggtcattgtcagatacggttatcgcgatgtccagaaagatgacctagagttcgagaaggagctagtcggcaacattgcagagttcatccgcagcagcgcggaatacgacaagaatggcttcgccgaggacacagataagccctccgggaagctgtccaccatcagcactggaattaacatgtgggaagaggatggagaacctgatgcatcctcatcccctcgcaaggagacagacccacgcgacgcagcacccgagcgaaagaaagcgaggttcatgataccaaagagcgcccaggtggacagcgaggtgcggcgcgagctgcaggagctcatggacgccagggaggcgggcatgtccttcatcctgggacgctcgtacatgaaggcgaagagcgggtcgggtttcgtaaagcgggtcgtgataaacttgttgtacgagttcttgaggaagaacagccgtggccctgcgtacgccgcgagcataccccatgcctccactcttgaggtaggaatggtctaccaggtctgacaaacagttagcggggtgtgtaaaggtagaagaaactagaagagatgagacgacgcttgtatatacacccacttgttgctgccgataccgttaacataattacaggataacacagagtagagagacatttgaaaacagctgtggatagcccaaccagaagcatgtgtttagtttcgtgatatgtttgctgctgctgttgacttgctgagtctcagacagtacttgtgagctgtcattgtctgtgagctgtaattgtctgggcgactagcaaaatagcagttttgacgtgcagcgacctctgtagttctgctacttttctatagctgatgtttcaggtagcagcttaattgtatgtttggaaaccctaaag

SEQ ID NO: 40726 - DNA, 2247 bp, Zea Mays
cgatgatgagtgaacatccgctgcatcaccctctgcacgtgacccgctccactcccctgcactgcacggcacacacacactctctctctgatcagtcatcgccaccggaccaccgtcacgcggagctctctcctactctcctcttcccctctaaaaccccacgaaatcgccgaaaggagtagcggacgcagcccccaccaccacttgttcaatctctctcctctcccgtctcgcctcccggagcgcaagaaaagctcggattcctggtggtttctaccatcctccgtcctcgatctgagcgttgcctgcttccctgcccccccgctcagatgtccgccttccgtgtcctgtaaaatctttcgccgcgcagcaatctccccccacttgtcggctgtcctgctgctgctgctgccaatggcgaccaagggagggaacgcaaggggcgttccggtgggggcgctgctggtggccgcgctcctccttagctccttggttcccacctccgcgtcctcgtaccccgcaagggtcgtgagcgggttcctctccaatgcggcgtcggcggtggtgaagcggctgtggtcgctcaaatccaccaccaagacagcgagcgggggaaagtctatggtgaagtacgagggcgggtacactgtggagacggtcttcgacggcagcaagctggggatcgagccctactccgtggaggtcacccagagcggcgaactactcgtcatggactccatgaacagcaacatctacaggatggcgctgccgctgtcccgatatagcaggccaaagcttgttgccggttctcccgaaggatttcctggtcatgttgatgggaagctgcgagaggcgaggatgaaccatccgaagggatttacagtggatgacaagggtaacatctatgtggctgatgccatgaacatggctattagaaagatcagtgatacaggggttacaactattgctgggggaaaatcaggcagaggagggcatgttgacgggccaagtgacgaggcaaaattttctactgattttgaagttcgttacattggcagtagctgctcgcttctggtgattgacagaggaaaccaagcaatccgggagattcagctccactttgatgactgtgtataccagtatgaagctggttttcctctaggagtggcactacttcttgctgccgcattctttggctacatgcttgcactgctccaacgccgagttttagggatgtattcaaatggagatgaagacgagagtccagtgaaagctaaactatctagcatcccacctccgtaccagaagccactgaagtcttctcttcgccccccgctgattccaaatgatgacgaacccgtgaaacaagaggaggaagggctcttcacgtcgattggcaaactcgtgggtgtagcaagatcatcagtcgcagagatcgtcggcgccacattctccagaaagaagcgagtgaacgttcaccaccaccagctgggcaggccgacctcgtggccagtgcaagagagctacgccatcccgcgggacgagaccccgccgccactggacacgagggcgccgaccccacgcaagagctacgccttcatgtcaaaggagccggagaagatccaccacatccggcacggtcggcctcagtcacacggctggaccggagaagctgctgctgctcctcagcagcaggcggcgtcgctgccgccgcagcagcagcagcagcagcagcaggtgcatcaccagcagtaccacaacaggcagtactcggccgggccgcagaccttctacgagccgagctgcgatgcggcgaaggagatcgtcttcggagccgtgcaggagggggacaccggccgccgccgtcccgtggagatcaagcccgtgaaccacggcgacgtggcgccgttcgagctgaacgggctgcggttccgcagcagttacggcatgggctaaaccagtggcaataagcagtcgaggaagagatctattgttgcctccgtccgtcctagtagtgttttggcgtcctccgttgtactggtagctgcctgtaaagtgtaaggaaaagagagggagcgatatagagatatcagtgcactcgaggggagcatttgacaagtgcaacggagaagttgggagttttggtaggaagagcttggtcatcatcatggttattggactctttactggcggtgatatatataatatatgtatgtatatgcgttttgatctcattcgacgcgaatt

SEQ ID NO: 40727 - DNA, 2054 bp, Zea Mays
agtcatcgccaccggaccaccgtcacgcggagctctctcctactctcctcttcccctctaaaaccccacgaaatcgccgaaaggagtagcggacgcagcccccaccaccacttgttcaatctctctcctctcccgtctcgcctcccggagcgcaagaaaagctcggattcctggtggtttctaccatcctccgtcctcgatctgagcgttgcctgcttccctgcccccccgctcagatgtccgccttccgtgtcctgtaaaatctttcgccgcgcagcaatctccccccacttgtcggctgtcctgctgctgctgctgccaatggcgaccaagggagggaacgcaaggggcgttccggtgggggcgctgctggtggccgcgctcctccttagctccttggttcccacctccgcgtcctcgtaccccgcaagggtcgtgagcgggttcctctccaatgcggcgtcggcggtggtgaagcggctgtggtcgctcaaatccaccaccaagacagcgagcgggggaaagtctatggtgaagtacgagggcgggtacactgtggagacggtcttcgacggcagcaagctggggatcgagccctactccgtggaggtcacccagagcggcgaactactcgtcatggactccatgaacagcaacatctacaggatggcgctgccgctgtcccgatatagcaggccaaagcttgttgccggttctcccgaaggatttcctggtcatgttgatgggaagctgcgagaggcgaggatgaaccatccgaagggatttacagtggatgacaagggtaacatctatgtggctgatgccatgaacatggctattagaaagatcagtgatacagtagctgctcgcttctggtgattgacagaggaaaccaagcaatccgggagattcagctccactttgatgactgtgtataccagtatgaagctggttttcctctaggagtggcactacttcttgctgccgcattctttggctacatgcttgcactgctccaacgccgagttttagggatgtattcaaatggagatgagcaggaagacgagagtccagtgaaagctaaactatctagcatcccacctccgtaccagaagccactgaagtcttctcttcgccccccgctgattccaaatgatgacgaacccgtgaaacaagaggaggaagggctcttcacgtcgattggcaaactcgtgggtgtagcaagatcatcagtcgcagagatcgtcggcgccacattctccagaaagaagcgagtgaacgttcaccaccaccagctgggcaggccgacctcgtggccagtgcaagagagctacgccatcccgcgggacgagaccccgccgccactggacacgagggcgccgaccccacgcaagagctacgccttcatgtcaaaggagccggagaagatccaccacatccggcacggtcggcctcagtcacacggctggaccggagaagctgctgctgctcctcagcagcaggcggcgtcgctgccgccgcagcagcagcagcagcagcagcaggtgcatcaccagcagtaccacaacaggcagtactcggccgggccgcagaccttctacgagccgagctgcgatgcggcgaaggagatcgtcttcggagccgtgcaggagggggacaccggccgccgccgtcccgtggagatcaagcccgtgaaccacggcgacgtggcgccgttcgagctgaacgggctgcggttccgcagcagttacggcatgggctaaaccagtggcaataagcagtcgaggaagagatctattgttgcctccgtccgtcctagtagtgttttggcgtcctccgttgtactggtagctgcctgtaaagtgtaaggaaaagagagggagcgatatagagatatcagtgcactcgaggggagcatttgacaagtgcaacggagaagttgggagttttggtaggaagagcttggtcatcatcatggttattggactctttactggcggtgatatatataatatatgtatgtatatgcgttttgatctcattcgacgcgaatt

SEQ ID NO: 40728 - DNA, 2895 bp, Zea Mays
atggatatagtggtggaggaaggaaatgccgatgttggcaatactgctgaaccatcgtatgaggttgtggctaaaagtggttgttcagcacaattgtcaactaatgacactgatgaacatgaactggctatagagagcgaggatagtaaggtcagtgttggtaatgctgcaaaacaatcacacgatgttgtgggagtaggcattgactgtattttcaatcatgctaaagtgtcaactgaagccgatcttggaccacaaccggatgtgatacacttgacatctttggatgttccaaatgaatcaagtcaaataagttctgatgcagatatggtagagcagaacaaaaaagatgctttggacacacttattagaatatcacaacataaaaaaccaaagaaatcgaatgtagctcgagttgtctctgaagattataagtgcaccccagaagatgttcagcttattgaatacattaaaacattaccggggaaacaagttgtggtgaacatcgacagcgcatggttaaatagaaatgatatggaatgtctttttcatggtgacatcgaattgtctgtcgaagctctcagtgcatatatacactgtattagggatgaagagcatttacttcatagagaaggtggaaaggtcttcttggagaacacattcatttccagtctgcttaagcgtgatggcgaccctaaggtgttcattccaatgaatatagaaaattttcactggtacatggcagttctgaatgcaaaaaaaagtgagttaaaaggtctagaaagacaaattaaacttgcagcagaacataaagagctttaccaaggcaagtggtcgaaccttgatgttgcatcatggccagttatagagaagatcacaacacaaatgcaaaccgatggggtatcttgcgggctatggatgataaactatatggaatactggacaggatcctccctatctgataacgtaactcaggatgatataacaatgtttaggtttaagctacctgcaatattatgggactcgagattaaacacaaagaaaggacatcaaaatcttgaccacaatgtggatgaagatggagagagttcaagtgatgttcaaataatcgatactccattaacatcaacaaacacgcaagaactgatgtttgtattatggacatatatcatggggatagacaacgccaaatatttaaagaaacattggattcagagtactaaaccttatccaatttctttaagtcttcaaaaacttaaagatatattggatgtaaataagccgatggatacagattgttttaacatggctgtttggatgatcgcatgcaatgatgccttgttcttgttggaagacaaataccactacatggatctacagttctgttccataactaaatttggtcgagaccctcgccttcgtgcaaagccagatatcaacatgttggcaaaattattagaatgttggcctgacatggagtacgatgtttcagattgcaaacaaattctattgcccttttctttcatgggtcacttcaccttatatgtacttaacatggacactagaagcatctatataatggactccatgcctataccatcatggtttaagggtgatcatcctagcatgcattatatacataatatacattatattgccaataatatgaatgctgccatggaattggccaatcctacatggaaagacgatatttatatgtggcgtcgtatagtaccaacatgggttccaagaacattaaactgggatttatctggctttcttgttatcaactttatgcacgattggaatggtataaggttaccctgcatttgcactgtatggagggatagggctcatcgcaccttctacctcggggtcggcgtcgcgttcccgaagccaacactactccccagcccctccaggaggtgtgactccacctcctgcccgactgggaggaagccaagcggattatgtggtgcagcattatacattgctgcactctctcatgggtgtaattacaccaaggcagatattgtctctgttgtgcatgtgtgtgaggccactctaacgaagcgattgatagagttcgaaaatacagattctggcagcttaacacctgtttcaaaacattcgcccaagtctggagaaattatctgcaaacacaaggataaaggttttgagcattttgctcatggactttgtgaaaaatgctacaataagttcactaaactgtcgggtggactagaaggtggttctgtccctccagcattccaacgagctgaaaagaaaagacttgaagctgctaaaagggctgaagaagctgcagcagctaaggaggcagcgctggaaaaatctctttgcgacacacagaattctgaggttgagagtgccatgactcctagaaagggtttaagtggagataaatcttcgaaaatgggatctgagggactcataaatgactctatgccacccaaggatcctgaagagggaggtgaaaattgtgaaggcaatgcagatccagaaagcctttctgacattgacgatgcagaggttgatgggtaccttcacaatgaggaagaaacacaatataaaaagattatctgggaggaaatgaacaaagagtaccttgaggaacaagcagacaaggaagctttggcagctgaattggcagctagagggattgatccagaagcgggaaagaaaaaacgaaaacgtaatgaagacacgaagagctcgacacctgctgaaacaccagcagaagccacgtgcaacatgctgaaacggaagggacttggttcaaagatcaatgtgggagctgttgacgaattgtacaaggaagcgttagtgacaggtgatacatgcagtgggatgtatgaaaatcggaaaaatattttg

SEQ ID NO: 40729 - DNA, 1596 bp, Zea Mays
acagcagtacgcagcaacaacctagctatagctagccaagtcgcaagagccagtacgtgtgtgctgctgtgctagtcggtgcgatcgaaatggctcctcatggtgacatcgaccttgccaaggcctaccatcacgtcactgtgtcaatgagggagcacacggagaaagtgatggtgaagctcaccgcgccccacaccggcaagggcgacacggcgccgctcgacatcgtggttgtcctggacatcagcgggagcatgcgtgggacgaagctcgagcacatgaagcacgccatgaccaggttcataatcgagaagctcggcatccgcggtgaccgcctcgccatcatcacattcgaatcgaaggcacataaagtgttcgatctgtcgtccatgctcccggaccaagtgaagaaggcggtggccgttgtggaaggtctgaaagccggtggagacaccaacatcaaggccggcctcgaggctggcctcgatgtgctcaagacccgtagggggcattcgcataatgcttcctgtatcttcctcatgtccgatgggcatgagaacgtggacaaggcgaggaccctccttgaccgtgtcggcgagcactccgtggtcacgtttggttttggtgagaagagcgacgaacagttgctgtacgacatcgcataccacagccgtgcagctccctcaagtacagcatgagcaaaaagataagccggtcattcatgtcaaatatgaatatagttctcccaagaaggtgaaggtcaccaacaccctggacatcaagatgaaccgcgtccagaatccgggacaggctgccatgaatccaaatgtgagccgggagctggcccgtcgcgcacaggtggagcacctgagaaaggtgatggatctggccaacaagaaaaaccttggtgcggccaaagatgaggtggagagagccaggaacgccttgaactctatcacccacgacacagatgacgccgtcgattccctcttcaacgagctggacaatatcgaagaatttctggagacgtacgacatctacaacaagctcggccgctcctacctgctggcctgcatctcctcgcatgaacgccagcgctacgcagagagaggcggtgccgctcccgtcgacctctacctcacgcagcgcatgaacaagtacttggatcaagcccacaaagttcacaagaatcccaaaaccaaaatctgatctcatgcatgcgatgatcagctagcaagacgatgattcatccgcaccgcgtgcactcgcatcgatcatccaccaataattcccctttactttctttgcttatataataacaggcccagttctatatgttctagtaggccctggattatttactgctgcatgctgctactaaagtttgcttttgcttcttaatttcccttgttcgacattttcattttatcctgtatctttgtaataactgctctgacgagatggctagcgcgctgcccaagtgtccaatattgtatctgctagccaactaaccagagggggttatggcattttaattaattttctttgatttccagttggcccaaaattgacaattgagatatatatggatcatgc

SEQ ID NO: 40730 - DNA, 2742 bp, Zea Mays
cgcccgggaatcactccgcacgcgaaccgcagtcgcggacaccccacgcccagctcagctcggcacgaccaccaccaccaccaccaccagtcctccctcgccctccctccgttgtccgttccatccccgcgccgcgccgcgccgcgccggatgcctggagagctggagtccatcgagcagcggccggcacggcactcggcctttctttaatccgggacccgccctgagctcccccgcactacactgcatcgcgctcgcggctcgcgcgacgttgacattgggcatggccccttccccaccaccgccaccatcaccaccacctcgtcgtccactccctcccctccccctccacgcggagcggtgagctgtctcccccccccccccccctctgggagagcacaggcggcaacaacggggagtctcgtcgaaatggcggcggcggcggcggcggagatcgtgcgggagatcgcagcggtgggcgccgccgacctggccgccgccgccgatccgctgcgcgcggactgcctccgcctcgcgcggaaggtgtccctgctctcgcacctcgtggccgaggtcgccgacgccggggccggggccggggcgggcgatgcggcggcggaggcgtggctgcgcgacctcgtcagggcgctcgaggctgcccggaggtttgtcgcgctcggacggacgccggccgctgcgggggcgtcagatcaggatgccatctgcaagaatactggtcttcagttcaagtatgtgacctggcagttgcaagctgctctggcaaacctgccacatagctgttttgagatatcagacgaagttcaagaagaggttgacttagtgcgagctcagcttagaagagaaatggaaaagaatggaggtcttgatgtaaccgtatttatgaaagttcatgatatcttagctcaaattgacaatgctgcaccacaatctcaacagccgcatcaacaaccagagcagccacagatggagaaattcagtaatgatgacctggagttgcgaaatgtcgtattgctagtttctgaaataagcgggttatccaaacctgacatgtcaaaaatagtatcagatctaattcaaggacttgaaaatgttgaaactcctgagtctccgaaaccagacaacgttgatcgccaaccaccaagtgatgaaacaaaaggctcatctgaggaagttaagaagtcggactctgtagctattcctgaagatttccgttgcccaatatctctcgagctgatgagagatccagtaattgtttcaacgggacagacctatgagcgcgctttcattcagaggtggattgactgtggaaaccgaacctgcccaaaaactcagcagaagctccagaacctttcgttgaccccaaactacgtgcttagaagcttaatactgcagtggtgcgaggaaaaggggatggaaccacctagcaggtctaaaagcgacggttctcctcttgaggttgctggcaacagattagcaattgaagcgttagtccgcaacctctcgagcagttcattagatgatcggaaatctgctgcggctgaaataagatccttggccaagaaaagcacagacaaccgtatacttctagcggaatctagcgctataccggctctggtgaaactcctgtcgtccaaggacccgaaaacccaagagcacgcagtgacagctctcctgaacctctccatatacgatcagaacaaggagctggtagtggttgccggtgccatcgtcccaatcacacaggtgctgaggacgggtagcatggaagcaagagagaacgcagccgcggctatcttcagcctgtcactgatggacgacaacaagatcatgatagggagcaccccaggggcaatcgaggcgctggtggagctgctgcagagcggtagctcgaggggcaagaaggacgcggcgacagcgctgttcaacctgtgcatataccaggcgaacaaggtgagggccgtccgagcggggattctggtgccgctgatccggatgctgcaggactcgtccaggagcggagccgtcgacgaggcgctgacgatcctgtcggtcctcgcgagccaccacgagtgcaagaccgccatatccaaggcccacgccatacctttcctgatcgacttgctgcggtcaggccaggcccgcaacagggagaacgctgccgccatcatactcgcgctgtgcaagagagacgccgagaacctcgcctgcgtagggaggctgggcgcccagatcccgctcgccgagctggcgaagaccggcacggaccgagccaagcgcaaggcaacctcgctcctggagcacctcagcaagctgcaggtgctctagtagtcccacccaccactgtccatccacagccacaccactctgtgcgcgcgcgtgcgttttcgacttttccacgccacggtgtatgcgtacaaatgcgagtagtgtagcatcatcatcatcatctgtcgtcgagtgtgatttcggtggggttggtgataagttcgtttcagtcagaggagcaagaccaaacgcttgttcgttctgtcagctcatgtctgcgtgtagtttgattcgagctttttcaaaagctcgcggtgtgggaattacctcggtcgccatcgaaattttctacttatattattattatgactcctttgtcttcaagacatcaacctgacatcaacctggtaccatcagcacttaattcctggggctaccttcagcattaacttgttg

SEQ ID NO: 40731 - DNA, 2187 bp, Zea Mays
cgcccgggaatcactccgcacgcgaaccgcagtcgcggacaccccacgcccagctcagctcggcacgaccaccaccaccaccaccaccagtcctccctcgccctccctccgttgtccgttccatccccgcgccgcgccgcgccgcgccggatgcctggagagctggagtccatcgagcagcggccggcacggcactcggcctttctttaatccgggacccgccctgagctcccccgcactacactgcatcgcgctcgcggctcgcgcgacgttgacattgggcatggccccttccccaccaccgccaccatcaccaccacctcgtcgtccactccctcccctccccctccacgcggagcggtgagctgtctcccccccccccccccctctgggagagcacaggcggcaacaacggggagtctcgtcgaaatggcggcggcggcggcggcggagatcgtgcgggagatcgcagcggtgggcgccgccgacctggccgccgccgccgatccgctgcgcgcggactgcctccgcctcgcgcggaaggtgtccctgctctcgcacctcgtggccgaggtcgccgacgccggggccggggccggggcgggcgatgcggcggcggaggcgtggctgcgcgacctcgtcagggcgctcgaggctgcccggaggtttgtcgcgctcggacggacgccggccgctgcgggggcgtcagatcaggatgccatctgcaagaatactggtcttcagttcaagtatgtgacctggcagttgcaagctgctctggcaaacctgccacatagctgttttgagatatcagacgaagttcaagaagaggttgacttagtgcgagctcagcttagaagagaaatggaaaagaatggaggtcttgatgtaaccgtatttatgaaagttcatgatatcttagctcaaattgacaatgctgcaccacaatctcaacagccgcatcaacaaccagagcagccacagatggagaaattcagtaatgatgacctggagttgcgaaatgtcgtattgctagtttctgaaataagcgggttatccaaacctgacatgtcaaaaatagtatcagatctaattcaaggacttgaaaatgttgaaactcctgagtctccgaaaccagacaacgttgatcgccaaccaccaagtgatgaaacaaaaggctcatctgaggaagttaagaagtcggactctgtagctattcctgaagatttccgttgcccaatatctctcgagctgatgagagatccagtaattgtttcaacgggacagaaaaaggcgcggttcgtagagttgccggacgagctgatagcgtgacctgggcttcgccgaagcgagttaacactcccttttttttccttcttcttcaatgtactgtcgcaaagcatgtttggtgatcgtgaggccaggagacgaggaattgtaaacttatctccaggcgggcgcgctgtactccttcagccgctcatatccgagcgaaacacaaagtatggtttgaagatgagaagccgcccgatggcttccgattcaccttgctccagtgatctgactgactgacaccgtgttacttataccgtcagtatgttttccttccgccttcttctcgaacctctctctctctctctctctctctgattgtgtgttccttcctgttgtctcaccagtcaccactacggtgcgttatgtgctacattgccaaggccaattattccagtcagctctggttgccattgggggcagcttcgtcgtaggaagaggcgcgtgtgcatatgcatctctgcatgattttgaaaacgaaaaaaaaaggatatgtataacagccgctctacgctgaatggttccttgagagttagtaagctggtggaccgtctgttggagaatcattgggaggcgttgctcaactgaattcctcttgcacatgcaagcagcaagagcaagagcatcgtctgcacaagtcgtgcggtctcttctcgccacaccgaccatgcggtgcgggcttggataaaagatatattgccgccagtcacctgtaaaccttcacatgacaagcagtatgatctgaccttagacctacaacccgtaggagcgtgtacagtgtactatatatacaatgcgcccccaagtcaagagtaacatgcgtgccgcgcttcttcaaacaaacaaggccatccc

SEQ ID NO: 40732 - DNA, 783 bp, Zea Mays
atgtggatacgagatttgcagctggcatttggaaatctgtctgtaattgcagccctcaaatttagttgcattaatgttttggtaagcctgtcccatgttctgacttttgcctctcttagtaatgttagtaccatttgttctgatatcccttttctctctctcttggttaaggatgccatctgcaagaatactggtcttcagttcaagtatgtgacctggcagttgcaagctgctctggcaaacctgccacatagctgttttgagatatcagacgaagttcaagaagaggttgacttagtgcgagctcagcttagaagagaaatggaaaagaatggaggtcttgatgtaaccgtatttatgaaagttcatgatatcttagctcaaattgacaatgctgcaccacaatctcaacagccgcatcaacaaccagagcagccacagatggagaaattcagtaatgatgacctggagttgcgaaatgtcgtattgctagtttctgaaataagcgggttatccaaacctgacatgtcaaaaatagtatcagatctaattcaaggacttgaaaatgttgaaactcctgagtctccgaaaccagacaacgttgatcgccaaccaccaagtgatgaaacaaaaggctcatctgaggaagttaagaagtcggactctgtagctattcctgaagatttccgttgcccaatatctctcgagctgatgagagatccagtaattgtttcaacgggacagcacttaattcctggggctaccttcagcattaacttgttg

SEQ ID NO: 40733 - DNA, 2099 bp, Zea Mays
atgtggatacgagatttgcagctggcatttggaaatctgtctgtaattgcagccctcaaatttagttgcattaatgttttggatgccatctgcaagaatactggtcttcagttcaagtatgtgacctggcagttgcaagctgctctggcaaacctgccacatagctgttttgagatatcagacgaagttcaagaagagtgcgagctcagcttagaagagaaatggaaaagaatggaggtcttgatgtaaccgtatttatgaaagttcatgatatcttagctcaaattgacaatgctgcaccacaatctcaacagccgcatcaacaaccagagcagccacagatggagaaattcagtaatgatgacctggagttgcgaaatgtcgtattgctagtttctgaaataagcgggttatccaaacctgacatgtcaaaaatagtatcagatctaattcaaggacttgaaaatgttgaaactcctgagtctccgaaaccagacaacgttgatcgccaaccaccaagtgatgaaacaaaaggctcatctgaggaagttaagaagtcggactctgtagctattcctgaagatttccgttgcccaatatctctcgagctgatgagagatccagtaattgtttcaacgggacagacctatgagcgcgctttcattcagaggtggattgactgtggaaaccgaacctgcccaaaaactcagcagaagctccagaacctttcgttgaccccaaactacgtgcttagaagcttaatactgcagtggtgcgaggaaaaggggatggaaccacctagcaggtctaaaagcgacggttctcctcttgaggttgctggcaacagattagcaattgaagcgttagtccgcaacctctcgagcagttcattagatgatcggaaatctgctgcggctgaaataagatccttggccaagaaaagcacagacaaccgtatacttctagcggaatctagcgctataccggctctggtgaaactcctgtcgtccaaggacccgaaaacccaagagcacgcagtgacagctctcctgaacctctccatatacgatcagaacaaggagctggtagtggttgccggtgccatcgtcccaatcacacaggtgctgaggacgggtagcatggaagcaagagagaacgcagccgcggctatcttcagcctgtcactgatggacgacaacaagatcatgatagggagcaccccaggggcaatcgaggcgctggtggagctgctgcagagcggtagctcgaggggcaagaaggacgcggcgacagcgctgttcaacctgtgcatataccaggcgaacaaggtgagggccgtccgagcggggattctggtgccgctgatccggatgctgcaggactcgtccaggagcggagccgtcgacgaggcgctgacgatcctgtcggtcctcgcgagccaccacgagtgcaagaccgccatatccaaggcccacgccatacctttcctgatcgacttgctgcggtcaggccaggcccgcaacagggagaacgctgccgccatcatactcgcgctgtgcaagagagacgccgagaacctcgcctgcgtagggaggctgggcgcccagatcccgctcgccgagctggcgaagaccggcacggaccgagccaagcgcaaggcaacctcgctcctggagcacctcagcaagctgcaggtgctctagtagtcccacccaccactgtccatccacagccacaccactctgtgcgcgcgcgtgcgttttcgacttttccacgccacggtgtatgcgtacaaatgcgagtagtgtagcatcatcatcatcatctgtcgtcgagtgtgatttcggtggggttggtgataagttcgtttcagtcagaggagcaagaccaaacgcttgttcgttctgtcagctcatgtctgcgtgtagtttgattcgagctttttcaaaagctcgcggtgtgggaattacctcggtcgccatcgaaattttctacttatattattattatgactcctttgtcttcaagacatcaacctgacatcaacctggtaccatcagcacttaattcctggggctaccttcagcattaacttgttg

SEQ ID NO: 40734 - DNA, 1572 bp, Zea Mays
cgtaacccagccttttgcccaaatcacccatccgcaccatccgcgagcaagctccagcgatccagccgcatgccacgcaggccctatgacgcccgccatcctcatccaggagtgcccccacccccagcgccccttccacccccgcaccgccgtcctgcccctctcccctcccacacccactcccttcctccatctccatgctcggcgccctcaccatctcccctctgcctccgctccacctccctaaccgcctccgacctaaccgcctccccccatagaccgaacgggatcttcgcgtccgacgcgcccatcgacgtggacgccgccatggaggacgagctacgggagaaggaggacggtgcgtatgtggaacgtctcagatctgccactctatctccggcaacctaggtcgggtgaggtagttcttcgatgtgatgcctgagtggaacttggtatcctagaacgagatgttgggaacgtatgcctacacagcagactccaggcgccacccggggtacctctcgcgccagatccactcatccacatgccagcaaccccgcgtcgccggcgaccgcgctccggtcgtaggctcatccacagccagcggtggagattcctcccccccagccatacaacttccacaacctcgactgtcgcaccatactcctcgtcgaggcaccgtacgcacctacttcaccctgccccctgaccaccccttcgagccggtgcccttgctaccctttccacaacacctgctcccccgcgccgcccccaacgtctggccaccgcagatatgcattcccatgctcacaccgatgcagacacagccacacgacgctaggtgcactgcaaacaccctgccaaccagcttccattgcgatggttctggttgaaatttatttttattgtgatatcttaaaatacacaaggttccggtgcttatgtattgcatctttctactgcttcttattttgctttatagttgcttcaaatggtttataggtagccccaggcaactcgaaagaggtagcagctgcactgtctcaggctttaagaaattctttagaaagaatgagcagttcagagatgcacttgcgaagcacagacttctgacaccaacgacaccattagcaaggcagggatccgatgatatgtccttggtgtcatccgtgatataaaccacttcctttagtcatgtgctattcttcactgttattcatgtgtacagttgttcctttccatagtcacagagtgtaggtttctagattttttgcttgtgaagtctacccacgctgcctcgctcttgttctttataatgagatgaaattgtatggtggctttgcgagtgagatgaaatgtatggtggctttgtgagtgaaccattgtggtttaccaagtctatttcaactcaaaaaatggcatcgggaggcaaaacaactgcaaaagggagcaaggctatgacggtaccggtagcgaaggcccaggtcgtcgtgcaagtctaagccatatgcctggcgacaaatgaccatgtgctatatatgttgctaagttacaacatagaccaaataaatt

SEQ ID NO: 40735 - DNA, 2603 bp, Zea Mays
gccgcatgccacgcaggccctatgacgcccgccatcctcatccaggagtgcccccacccccagcgccccttccacccccgcaccgccgtcctgcccctctcccctcccacacccactcccttcctccatctccatgctcggcgccctcaccatctcccctctgcctccgctccacctccctaaccgcctccgacctaaccgcctccccccatagaccgaacgggatcttcgcgtccgacgcgcccatcgacgtggacgccgccatggaggacgagctacgggagaaggaggacggtgcgtatgtggaacgtctcagatctgccactctatctccggcaacctaggtcgggtgaggtagccccaggcaactcgaaagaggtagcagctgcactgtctcaggctttaagaaattctttagaaaggtattcttgtacttctttaatatttgatgcagaaagaaatcatcgatatttcttatcaatgcatgctaagctatcatttaaagtgccatgcttggtttgtgagggtttggaggatatgttggctcactttaaatatatactatgtatttttaaatgtaaggcatgaaatatgtaatgaatcctgctactcttgtgcttagataggcttttgtttttatattggtaccctaatctgtttgaacaaacctaattggatcatcaaactgcattataactatatataactttatggtctgctatttttcctttcaccataggttttggaaattatttttgtgccattttggttacctttattatgtgataagaacatagcacaagagtatttactcttgtatgacaaacaccagttctgaatctttaatgctgacggactggtcttctcatggctggtactaagactgacggcgtagcgaatgataaaagtatgctacattgcattttacactacttaaaggggtaggtcaactgttgtgtagagaattattaaacatgccatcattatattgtttcatcaggtgtggggttctcattgtgcaagaactattcttatgtatggtcacttgtttattgttaaaactttggaccacacaaatatcattagatgtatttctaatgatacgtacataggtggtagagaaaggagtagcacaatttaatttgatggcatatatatagaatgaaatagtagtactatcagctataactattgataaatgatgcagtctaagagcataccaatatgatttgccacactggtagaaactatgacttgtctgctgcatcctgcacatgagcatgtgatttgaagaatcgcaccatttgaagcaatcaatgggattttaggtctgcaagtaatgggtcttggatttactaggtactagcaacctcacaaccaaaacatggtgaccacaatatccaggattagatgagattagagtcaggtagttcaaaagtaagattagaccgcccaagacatcatcgctgatttattgaccaacaccaacgatgacccaaatagcgcagatttgccagttcatggagaggaacccggatgtgaggttcctgcatgcaggtgaactatgaggagcacaagtctatgcgctacaaccttaatgtccatgtcatccctttcttcacgttctacaggggagcttagggtcgactctgcaacttcagttgtatcaaggcaactgtgagatcctatgttctactgtcaatagttctgtgtccctattctaattgttgtttaagtaaggttgagtacaattattttggaagatgtttctgtggccaatgagcaattatattaactaattcagtgaaatgaaaagttttgagggtcttgttattatttgcaaatgaaaaaatggcattagtaggtggtcccaagtacgtgccttttgcaacgccttcagatctactaggcaaagaaatcaaggaggcccttgcggctgaatgcaataacagttccttggtctggtacttgtctttgatgtgccatctgacttccattgcaataacagttccttagtgcttcagcatagataaggtccaatatttattgttaatggctaccagttgatttaacttatacaattggtgactgttgtatgcagaatgagcagttcagagatgcacttgcgaagcacagacttctgacaccaacgacaccattagcaaggcagggatccgatgatatgtccttggtgtcatccgtgatataaaccacttcctttagtcatgtgctattcttcactgttattcatgtgtacagttgttcctttccatagtcacagagtgtaggtttctagattttttgcttgtgaagtctacccacgctgcctcgctcttgttctttataatgagatgaaattgtatggtggctttgcgagtgagatgaaatgtatggtggctttgtgagtgaaccattgtggtttaccaagtctatttcaactcaaaaaatggcatcgggaggcaaaacaactgcaaaagggagcaaggctatgacggtaccggtagcgaaggcccaggtcgtcgtgcaagtctaagccatatgcctggcgacaaatgaccatgtgctatatatgttgctaagttacaacatagaccaaataaatt

SEQ ID NO: 40736 - DNA, 884 bp, Zea Mays
gccgcatgccacgcaggccctatgacgcccgccatcctcatccaggagtgcccccacccccagcgccccttccacccccgcaccgccgtcctgcccctctcccctcccacacccactcccttcctccatctccatgctcggcgccctcaccatctcccctctgcctccgctccacctccctaaccgcctccgacctaaccgcctccccccatagaccgaacgggatcttcgcgtccgacgcgcccatcgacgtggacgccgccatggaggacgagctacgggagaaggaggacgttgcttcaaatggtttataggtagccccaggcaactcgaaagaggtagcagctgcactgtctcaggctttaagaaattctttagaaagaatgagcagttcagagatgcacttgcgaagcacagacttctgacaccaacgacaccattagcaaggcagggatccgatgatatgtccttggtgtcatccgtgatataaaccacttcctttagtcatgtgctattcttcactgttattcatgtgtacagttgttcctttccatagtcacagagtgtaggtttctagattttttgcttgtgaagtctacccacgctgcctcgctcttgttctttataatgagatgaaattgtatggtggctttgcgagtgagatgaaatgtatggtggctttgtgagtgaaccattgtggtttaccaagtctatttcaactcaaaaaatggcatcgggaggcaaaacaactgcaaaagggagcaaggctatgacggtaccggtagcgaaggcccaggtcgtcgtgcaagtctaagccatatgcctggcgacaaatgaccatgtgctatatatgttgctaagttacaacatagaccaaataaatt

SEQ ID NO: 40737 - DNA, 2543 bp, Zea Mays
gccgcatgccacgcaggccctatgacgcccgccatcctcatccaggagtgcccccacccccagcgccccttccacccccgcaccgccgtcctgcccctctcccctcccacacccactcccttcctccatctccatgctcggcgccctcaccatctcccctctgcctccgctccacctccctaaccgcctccgacctaaccgcctccccccatagaccgaacgggatcttcgcgtccgacgcgcccatcgacgtggacgccgccatggaggacgagctacgggagaaggaggacggtagccccaggcaactcgaaagaggtagcagctgcactgtctcaggctttaagaaattctttagaaaggtattcttgtacttctttaatatttgatgcagaaagaaatcatcgatatttcttatcaatgcatgctaagctatcatttaaagtgccatgcttggtttgtgagggtttggaggatatgttggctcactttaaatatatactatgtatttttaaatgtaaggcatgaaatatgtaatgaatcctgctactcttgtgcttagataggcttttgtttttatattggtaccctaatctgtttgaacaaacctaattggatcatcaaactgcattataactatatataactttatggtctgctatttttcctttcaccataggttttggaaattatttttgtgccattttggttacctttattatgtgataagaacatagcacaagagtatttactcttgtatgacaaacaccagttctgaatctttaatgctgacggactggtcttctcatggctggtactaagactgacggcgtagcgaatgataaaagtatgctacattgcattttacactacttaaaggggtaggtcaactgttgtgtagagaattattaaacatgccatcattatattgtttcatcaggtgtggggttctcattgtgcaagaactattcttatgtatggtcacttgtttattgttaaaactttggaccacacaaatatcattagatgtatttctaatgatacgtacataggtggtagagaaaggagtagcacaatttaatttgatggcatatatatagaatgaaatagtagtactatcagctataactattgataaatgatgcagtctaagagcataccaatatgatttgccacactggtagaaactatgacttgtctgctgcatcctgcacatgagcatgtgatttgaagaatcgcaccatttgaagcaatcaatgggattttaggtctgcaagtaatgggtcttggatttactaggtactagcaacctcacaaccaaaacatggtgaccacaatatccaggattagatgagattagagtcaggtagttcaaaagtaagattagaccgcccaagacatcatcgctgatttattgaccaacaccaacgatgacccaaatagcgcagatttgccagttcatggagaggaacccggatgtgaggttcctgcatgcaggtgaactatgaggagcacaagtctatgcgctacaaccttaatgtccatgtcatccctttcttcacgttctacaggggagcttagggtcgactctgcaacttcagttgtatcaaggcaactgtgagatcctatgttctactgtcaatagttctgtgtccctattctaattgttgtttaagtaaggttgagtacaattattttggaagatgtttctgtggccaatgagcaattatattaactaattcagtgaaatgaaaagttttgagggtcttgttattatttgcaaatgaaaaaatggcattagtaggtggtcccaagtacgtgccttttgcaacgccttcagatctactaggcaaagaaatcaaggaggcccttgcggctgaatgcaataacagttccttggtctggtacttgtctttgatgtgccatctgacttccattgcaataacagttccttagtgcttcagcatagataaggtccaatatttattgttaatggctaccagttgatttaacttatacaattggtgactgttgtatgcagaatgagcagttcagagatgcacttgcgaagcacagacttctgacaccaacgacaccattagcaaggcagggatccgatgatatgtccttggtgtcatccgtgatataaaccacttcctttagtcatgtgctattcttcactgttattcatgtgtacagttgttcctttccatagtcacagagtgtaggtttctagattttttgcttgtgaagtctacccacgctgcctcgctcttgttctttataatgagatgaaattgtatggtggctttgcgagtgagatgaaatgtatggtggctttgtgagtgaaccattgtggtttaccaagtctatttcaactcaaaaaatggcatcgggaggcaaaacaactgcaaaagggagcaaggctatgacggtaccggtagcgaaggcccaggtcgtcgtgcaagtctaagccatatgcctggcgacaaatgaccatgtgctatatatgttgctaagttacaacatagaccaaataaatt

SEQ ID NO: 40738 - DNA, 607 bp, Zea Mays
cacaagtctatgcgctacaaccttaatgtccatgtcatccctttcttcacgttctacaggggagcttagggtcgactctgcaacttcagttgtatcaaggcaactaatgagcagttcagagatgcacttgcgaagcacagacttctgacaccaacgacaccattagcaaggcagggatccgatgatatgtccttggtgtcatccgtgatataaaccacttcctttagtcatgtgctattcttcactgttattcatgtgtacagttgttcctttccatagtcacagagtgtaggtttctagattttttgcttgtgaagtctacccacgctgcctcgctcttgttctttataatgagatgaaattgtatggtggctttgcgagtgagatgaaatgtatggtggctttgtgagtgaaccattgtggtttaccaagtctatttcaactcaaaaaatggcatcgggaggcaaaacaactgcaaaagggagcaaggctatgacggtaccggtagcgaaggcccaggtcgtcgtgcaagtctaagccatatgcctggcgacaaatgaccatgtgctatatatgttgctaagttacaacatagaccaaataaatt

SEQ ID NO: 40739 - DNA, 2588 bp, Zea Mays
gaaattctatacgtcattcatttcaactttctaacgtcccaacatgtgcgaaattaaaggaaatgatcgaaatcaattgcacacggcgccacaacgcaaaactttaatccgatcacaaaccaatctcgaactagactagaacgtgaaaccctaaaactaatgggtttactgctaattagggtgttatcatgtcgacgaacaatatcagacgtacacgtacacgtgtggtgcagagcgccgggcgcgtatggttcatgacgccgccgccgtgtccatcatggccttgaactcgtcgaagcagaccaccccgtcgccgtctatgtccaccaccgcgatcatctctgcgcaccgctcggccgtcatctcctccccgacgatccccagcctccacagagcgcggcgcagctcctccgcggtgatcacgccgtcgccgttctcgtcgtactcggcgaacgcagcgcgcaacgtgtctgaccggtcgccgtcctcaaacagcgcctcgagctcctcgaggctgatgaacccatctccatcgcggtccgcgacagctaccatctcgtctgcctccacggctgtgcacccgcacaactcgcgcatctcgtccgccgagatgcggccgtcgccgtccgcgtcgaagtggcggaacacgcggacgagggccggctccggtattgtgtacgtgggcgggggagtgctagccgcggctgggggaggcggacttgaggagcggcgtcggctgaagaagatatcgctgcaggacgcggtggcggagacgacgagacccattgccggccgggtgcgacagctttgaatttgattgacggccttgacagggttttgaccctgtttttatataggagtaggacccgccagatagatgaaactcctacgcggttagtttcggtcccatctggtcttatcgtatactggtgcggacctagttgccctctccgcatccaaccagctagcgcgtccgtccccatggcggccgccgccgcggggtttacgccggcgactgcaaggaaggccctcttcactactacagtcactctcctctcatcgtcactctcacgtagggccagcagcatccgcagccgcaacctctcctgctctgccgcgttcaccgccgccacgcgcctcgcgccgcagccgccggacctggtccggtgggtgcagcgcgagggcggattcgtccaccgtgccctccgcgtagcgaatcatccggaacacgggctcgggatctcagcctcttccgccgcggcctacggcgacatcccaattggggacgtcctcatcgcgctcccgagccagcttccattacgactacgccggcccaccagtgccgcggacgacgtgcttgtgcagctcgcccaacaagtcccggatgaactatgggctatgaagctgggcttgaggttgcttcaagaaagggccaaatctgattcattttggtggccatatattgccaatttgccagagacatttactgttccaatcttctttcctggggaagacataaaaaatttgcagtatgcccctatcctccaccaggtcaataaaagatgtcgttttctcctcgagtttgagaaagagctgcctcttctcgtgcattccgtttgcatggtgaagtcccaatgttgttgcctcttattgatatgtgcaatcatagtttcaacccaaatgctaggattgtccaggaaagaagtgtaaacagcttagacatgtcagtaaaggttcttgctgagaagaagattaagcaaaatgaagcaataacactgaactatggctgctacccaaatgatttctttcttcttgattatggatttgtgataacacagaatccttacgatcaagtggaactaagttacgatggagcccttcttgatgctgcaagcatggcagctggagtctcttctcccaatttttcagcgccagccaagtggcaacaagatatattgtcacagctaaacctacatggagagggtgccgttttaaaggtgagcttaggaggccctgacgttgttgatggacgcctgttagctgctctaagggtgcttcttgccgatgatccagaggctgtgcacaagcatgacctgaatacattgatgtctcttgacgtgcaagttcctttaggtcccactgttgaagcatcagcactccggacagttcttgcgctttgcgcgattgctctccaacactttcacacaaaaataatggacgaccaggccattctaggcggtgggccgcctcttatcacgcaactggccgtccagtttagattgcagaagaagttcacgatcgttgacgtgatgcagaatatcagcaggagaatcaagatgttatcgccgcagaaatccactgggtagttctttaatctgtcgtcagacagtcagttaccattctgtactggctactgcagatagcacaaatcccagttgtgattctgtaccatgttcttgttatgatacttccagtgcctgtcattgaaaagttacatctgcgtcgaacagttaattacttccctgtactgattattgcgtataataataagtcccgattttgagtcttgtaccatttcgttgtcttcc

SEQ ID NO: 40740 - DNA, 2848 bp, Zea Mays
cgtcattcatttcaactttctaacgtcccaacatgtgcgaaattaaaggaaatgatcgaaatcaattgcacacggcgccacaacgcaaaactttaatccgatcacaaaccaatctcgaactagactagaacgtgaaaccctaaaactaatgggtttactgctaattagggtgttatcatgtcgacgaacaatatcagacgtacacgtacacgtgtggtgcagagcgccgggcgcgtatggttcatgacgccgccgccgtgtccatcatggccttgaactcgtcgaagcagaccaccccgtcgccgtctatgtccaccaccgcgatcatctctgcgcaccgctcggccgtcatctcctccccgacgatccccagcctccacagagcgcggcgcagctcctccgcggtgatcacgccgtcgccgttctcgtcgtactcggcgaacgcagcgcgcaacgtgtctgaccggtcgccgtcctcaaacagcgcctcgagctcctcgaggctgatgaacccatctccatcgcggtccgcgacagctaccatctcgtctgcctccacggctgtgcacccgcacaactcgcgcatctcgtccgccgagatgcggccgtcgccgtccgcgtcgaagtggcggaacacgcggacgagggccggctccggtattgtgtacgtgggcgggggagtgctagccgcggctgggggaggcggacttgaggagcggcgtcggctgaagaagatatcgctgcaggacgcggtggcggagacgacgagacccattgccggccgggtgcgacagctttgaatttgattgacggccttgacagggttttgaccctgtttttatataggagtaggacccgccagatagatgaaactcctacgcggttagtttcggtcccatctggtcttatcgtatactggtgcggacctagttgccctctccgcatccaaccagctagcgcgtccgtccccatggcggccgccgccgcggggtttacgccggcgactgcaaggaaggccctcttcactactacagtcactctcctctcatcgtcactctcacgtagggccagcagcatccgcagccgcaacctctcctgctctgccgcgttcaccgccgccacgcgcctcgcgccgcagccgccggacctggtccggtgggtgcagcgcgagggcggattcgtccaccgtgccctccgcgtagcgaatcatccggaacacgggctcgggatctcagcctcttccgccgcggcctacggcgacatcccaattggggacgtcctcatcgcgctcccgagccagcttccattacgactacgccggcccaccagtgccgcggacgacgtgcttgtgcagctcgcccaacaagtcccggaagcttgcagcttcgactttcttccttgccgtccatatgtgctagacgaagcttctctccgcatttcttcggctattctgggcagcttcagctgaaggctagcttcgttcgccgttatctgtatacctgaaacacatttgttcacaccgaagtaaaagctttatgaggacctttggcagaatgaactatgggctatgaagctgggcttgaggttgcttcaagaaagggccaaatctgattcattttggtggccatatattgccaatttgccagagacatttactgttccaatcttctttcctggggaagacataaaaaatttgcagtatgcccctatcctccaccaggtcaataaaagatgtcgttttctcctcgagtttgagaaagaggtacagcagaagcttcatactgtgcccttggtagatcatcctttttatggacaagatgtaaattcatcttcccttggatgggctatgtcagctgcctcttctcgtgcattccgtttgcatggtgaagtcccaatgttgttgcctcttattgatatgtgcaatcatagtttcaacccaaatgctaggattgtccaggaaagaagtgtaaacagcttagacatgtcagtaaaggttcttgctgagaagaagattaagcaaaatgaagcaataacactgaactatggctgctacccaaatgatttctttcttcttgattatggatttgtgataacacagaatccttacgatcaagtggaactaagttacgatggagcccttcttgatgctgcaagcatggcagctggagtctcttctcccaatttttcagcgccagccaagtggcaacaagatatattgtcacagctaaacctacatggagagggtgccgttttaaaggtgagcttaggaggccctgacgttgttgatggacgcctgttagctgctctaagggtgcttcttgccgatgatccagaggctgtgcacaagcatgacctgaatacattgatgtctcttgacgtgcaagttcctttaggtcccactgttgaagcatcagcactccggacagttcttgcgctttgcgcgattgctctccaacactttcacacaaaaataatggacgaccaggccattctaggcggtgggccgcctcttatcacgcaactggccgtccagtttagattgcagaagaagttcacgatcgttgacgtgatgcagaatatcagcaggagaatcaagatgttatcgccgcagaaatccactgggtagttctttaatctgtcgtcagacagtcagttaccattctgtactggctactgcagatagcacaaatcccagttgtgattctgtaccatgttcttgttatgatacttccagtgcctgtcattgaaaagttacatctgcgtcgaacagttaattacttccctgtactgattattgcgtataataataagtcccgattttgagtcttgtaccatttcgttgtcttcc

SEQ ID NO: 40741 - DNA, 2605 bp, Zea Mays
attaaaggaaatgatcgaaatcaattgcacacggcgccacaacgcaaaactttaatccgatcacaaaccaatctcgaactagactagaacgtgaaaccctaaaactaatgggtttactgctaattagggtgttatcatgtcgacgaacaatatcagacgtacacgtacacgtgtggtgcagagcgccgggcgcgtatggttcatgacgccgccgccgtgtccatcatggccttgaactcgtcgaagcagaccaccccgtcgccgtctatgtccaccaccgcgatcatctctgcgcaccgctcggccgtcatctcctccccgacgatccccagcctccacagagcgcggcgcagctcctccgcggtgatcacgccgtcgccgttctcgtcgtactcggcgaacgcagcgcgcaacgtgtctgaccggtcgccgtcctcaaacagcgcctcgagctcctcgaggctgatgaacccatctccatcgcggtccgcgacagctaccatctcgtctgcctccacggctgtgcacccgcacaactcgcgcatctcgtccgccgagatgcggccgtcgccgtccgcgtcgaagtggcggaacacgcggacgagggccggctccggtattgtgtacgtgggcgggggagtgctagccgcggctgggggaggcggacttgaggagcggcgtcggctgaagaagatatcgctgcaggacgcggtggcggagacgacgagacccattgccggccgggtgcgacagctttgaatttgattgacggccttgacagggttttgaccctgtttttatataggagtaggacccgccagatagatgaaactcctacgcggttagtttcggtcccatctggtcttatcgtatactggtgcggacctagttgccctctccgcatccaaccagctagcgcgtccgtccccatggcggccgccgccgcggggtttacgccggcgactgcaaggaaggccctcttcactactacagtcactctcctctcatcgtcactctcacgtagggccagcagcatccgcagccgcaacctctcctgctctgccgcgttcaccgccgccacgcgcctcgcgccgcagccgccggacctggtccggtgggtgcagcgcgagggcggattcgtccaccgtgccctccgcgtagcgaatcatccggaacacgggctcgggatctcagcctcttccgccgcggcctacggcgacatcccaattggggacgtcctcatcgcgctcccgagccagcttccattacgactacgccggcccaccagtgccgcggacgacgtgcttgtgcagctcgcccaacaagtcccggatgaactatgggctatgaagctgggcttgaggttgcttcaagaaagggccaaatctgattcattttggtggccatatattgccaatttgccagagacatttactgttccaatcttctttcctggggaagacataaaaaatttgcagtcaataaaagatgtcgttttctcctcgagtttgagaaagaggtacagcagaagcttcatactgtgcccttggtagatcatcctttttatggacaagatgtaaattcatcttcccttggatgggctatgtcagctgcctcttctcgtgcattccgtttgcatggtgaagtcccaatgttgttgcctcttattgatatgtgcaatcatagtttcaacccaaatgctaggattgtccaggaaagaagtgtaaacagcttagacatgtcagtaaaggttcttgctgagaagaagattaagcaaaatgaagcaataacactgaactatggctgctacccaaatgatttctttcttcttgattatggatttgtgataacacagaatccttacgatcaagtggaactaagttacgatggagcccttcttgatgctgcaagcatggcagctggagtctcttctcccaatttttcagcgccagccaagtggcaacaagatatattgtcacagctaaacctacatggagagggtgccgttttaaaggtgagcttaggaggccctgacgttgttgatggacgcctgttagctgctctaagggtgcttcttgccgatgatccagaggctgtgcacaagcatgacctgaatacattgatgtctcttgacgtgcaagttcctttaggtcccactgttgaagcatcagcactccggacagttcttgcgctttgcgcgattgctctccaacactttcacacaaaaataatggacgaccaggccattctaggcggtgggccgcctcttatcacgcaactggccgtccagtttagattgcagaagaagttcacgatcgttgacgtgatgcagaatatcagcaggagaatcaagatgttatcgccgcagaaatccactgggtagttctttaatctgtcgtcagacagtcagttaccattctgtactggctactgcagatagcacaaatcccagttgtgattctgtaccatgttcttgttatgatacttccagtgcctgtcattgaaaagttacatctgcgtcgaacagttaattacttccctgtactgattattgcgtataataataagtcccgattttgagtcttgtaccatttcgttgtcttcc

SEQ ID NO: 40742 - DNA, 3020 bp, Zea Mays
aaatgatcgaaatcaattgcacacggcgccacaacgcaaaactttaatccgatcacaaaccaatctcgaactagactagaacgtgaaaccctaaaactaatgggtttactgctaattagggtgttatcatgtcgacgaacaatatcagacgtacacgtacacgtgtggtgcagagcgccgggcgcgtatggttcatgacgccgccgccgtgtccatcatggccttgaactcgtcgaagcagaccaccccgtcgccgtctatgtccaccaccgcgatcatctctgcgcaccgctcggccgtcatctcctccccgacgatccccagcctccacagagcgcggcgcagctcctccgcggtgatcacgccgtcgccgttctcgtcgtactcggcgaacgcagcgcgcaacgtgtctgaccggtcgccgtcctcaaacagcgcctcgagctcctcgaggctgatgaacccatctccatcgcggtccgcgacagctaccatctcgtctgcctccacggctgtgcacccgcacaactcgcgcatctcgtccgccgagatgcggccgtcgccgtccgcgtcgaagtggcggaacacgcggacgagggccggctccggtattgtgtacgtgggcgggggagtgctagccgcggctgggggaggcggacttgaggagcggcgtcggctgaagaagatatcgctgcaggacgcggtggcggagacgacgagacccattgccggccgggtgcgacagctttgaatttgattgacggccttgacagggttttgaccctgtttttatataggagtaggacccgccagatagatgaaactcctacgcggttagtttcggtcccatctggtcttatcgtatactggtgcggacctagttgccctctccgcatccaaccagctagcgcgtccgtccccatggcggccgccgccgcggggtttacgccggcgactgcaaggaaggccctcttcactactacagtcactctcctctcatcgtcactctcacgtagggccagcagcatccgcagccgcaacctctcctgctctgccgcgttcaccgccgccacgcgcctcgcgccgcagccgccggacctggtccggtgggtgcagcgcgagggcggattcgtccaccgtgccctccgcgtagcgaatcatccggaacacgggctcgggatctcagcctcttccgccgcggcctacggcgacatcccaattggggacgtcctcatcgcgctcccgagccagcttccattacgactacgccggcccaccagtgccgcggacgacgtgcttgtgcagctcgcccaacaagtcccggaagcttgcagcttcgactttcttccttgccgtccatatgtgctagacgaagcttctctccgcatttcttcggctattctgggcagcttcagctgaaggctagcttcgttcgccgttatctgtatacctgaaacacatttgttcacaccgaagtaaaagctttatgaggacctttggcagagtatgcccccaacagatagtatattgatttgaacaagattgtgttaaggttttcttattattgtattcctcgataatctgtgtgtaactgatgctacaatgttgttgagtttacggatgctgaaatgtgccatttttaccacaacccctcttttggatatataaggggatttctttctatttgtaaattcaaacaaggaataagttcaatcattttcacagatgaactatgggctatgaagctgggcttgaggttgcttcaagaaagggccaaatctgattcattttggtggccatatattgccaatttgccagagacatttactgttccaatcttctttcctggggaagacataaaaaatttgcagtatgcccctatcctccaccaggtcaataaaagatgtcgttttctcctcgagtttgagaaagaggtacagcagaagcttcatactgtgcccttggtagatcatcctttttatggacaagatgtaaattcatcttcccttggatgggctatgtcagctgcctcttctcgtgcattccgtttgcatggtgaagtcccaatgttgttgcctcttattgatatgtgcaatcatagtttcaacccaaatgctaggattgtccaggaaagaagtgtaaacagcttagacatgtcagtaaaggttcttgctgagaagaagattaagcaaaatgaagcaataacactgaactatggctgctacccaaatgatttctttcttcttgattatggatttgtgataacacagaatccttacgatcaagtggaactaagttacgatggagcccttcttgatgctgcaagcatggcagctggagtctcttctcccaatttttcagcgccagccaagtggcaacaagatatattgtcacagctaaacctacatggagagggtgccgttttaaaggtgagcttaggaggccctgacgttgttgatggacgcctgttagctgctctaagggtgcttcttgccgatgatccagaggctgtgcacaagcatgacctgaatacattgatgtctcttgacgtgcaagttcctttaggtcccactgttgaagcatcagcactccggacagttcttgcgctttgcgcgattgctctccaacactttcacacaaaaataatggacgaccaggccattctaggcggtgggccgcctcttatcacgcaactggccgtccagtttagattgcagaagaagttcacgatcgttgacgtgatgcagaatatcagcaggagaatcaagatgttatcgccgcagaaatccactgggtagttctttaatctgtcgtcagacagtcagttaccattctgtactggctactgcagatagcacaaatcccagttgtgattctgtaccatgttcttgttatgatacttccagtgcctgtcattgaaaagttacatctgcgtcgaacagttaattacttccctgtactgattattgcgtataataataagtcccgattttgagtcttgtaccatttcgttgtcttcc

SEQ ID NO: 40743 - DNA, 3269 bp, Zea Mays
aaatgatcgaaatcaattgcacacggcgccacaacgcaaaactttaatccgatcacaaaccaatctcgaactagactagaacgtgaaaccctaaaactaatgggtttactgctaattagggtgttatcatgtcgacgaacaatatcagacgtacacgtacacgtgtggtgcagagcgccgggcgcgtatggttcatgacgccgccgccgtgtccatcatggccttgaactcgtcgaagcagaccaccccgtcgccgtctatgtccaccaccgcgatcatctctgcgcaccgctcggccgtcatctcctccccgacgatccccagcctccacagagcgcggcgcagctcctccgcggtgatcacgccgtcgccgttctcgtcgtactcggcgaacgcagcgcgcaacgtgtctgaccggtcgccgtcctcaaacagcgcctcgagctcctcgaggctgatgaacccatctccatcgcggtccgcgacagctaccatctcgtctgcctccacggctgtgcacccgcacaactcgcgcatctcgtccgccgagatgcggccgtcgccgtccgcgtcgaagtggcggaacacgcggacgagggccggctccggtattgtgtacgtgggcgggggagtgctagccgcggctgggggaggcggacttgaggagcggcgtcggctgaagaagatatcgctgcaggacgcggtggcggagacgacgagacccattgccggccgggtgcgacagctttgaatttgattgacggccttgacagggttttgaccctgtttttatataggagtaggacccgccagatagatgaaactcctacgcggttagtttcggtcccatctggtcttatcgtatactggtgcggacctagttgccctctccgcatccaaccagctagcgcgtccgtccccatggcggccgccgccgcggggtttacgccggcgactgcaaggaaggccctcttcactactacagtcactctcctctcatcgtcactctcacgtagggccagcagcatccgcagccgcaacctctcctgctctgccgcgttcaccgccgccacgcgcctcgcgccgcagccgccggacctggtccggtgggtgcagcgcgagggcggattcgtccaccgtgccctccgcgtagcgaatcatccggaacacgggctcgggatctcagcctcttccgccgcggcctacggcgacatcccaattggggacgtcctcatcgcgctcccgagccagcttccattacgactacgccggcccaccagtgccgcggacgacgtgcttgtgcagctcgcccaacaagtcccggatgaactatgggctatgaagctgggcttgaggttgcttcaagaaagggccaaatctgattcattttggtggccatatattgccaatttgccagagacatttactgttccaatcttctttcctggggaagacataaaaaatttgcagtatgcccctatcctccaccaggtcaataaaagatgtcgttttctcctcgagtttgagaaagaggtacagcagaagcttcatactgtgcccttggtagatcatcctttttatggacaagatgtaaattcatcttcccttggatgggctatgtcagctgcctcttctcgtgcattccgtttgcatggtgaagtcccaatgttgttgcctcttattgatatgtgcaatcatagtttcaacccaaatgctaggattgtccaggaaagaagtgtaaacagcttagacatgtcagtaaaggtaagcatcctgtcatgttcttgcactctaaaattttccatctttacactcctgaaatttttgttccagaatcaaactatctttttcctctttctcatatccacttctcaaatggggatgatattatctcactgtaactttaagccactgcagctgcctacagctcttttcccagcatcaagtattgttactatgaaaatatctgtctttcacgaactttctagtttgacttctgcttgtcatttgatacactcattccttacatctttgcacaatttgcaacctccatgtatcagttgtgttcgtcactactcttttccatatacaatttcaatgttggactgcacttgttagctatgcaacacttgaattaacttatctccccacttttatgctctctgtgctgttgctagcgtcttttcgtctagtgagcaatgcatactgcaataaagacttcatcacttttgaacctatgggtgactaattttcttgattagtaccaaaacaatgcaaagttatggcacgctaaagtgcatttagtcaactgatttactgggagcatattgcttttagtccataatttccttgtttgtgcaatatgcacgataagtctattgacttcatcttcacatttctattgctgtatataggttcttgctgagaagaagattaagcaaaatgaagcaataacactgaactatggctgctacccaaatgatttctttcttcttgattatggatttgtgataacacagaatccttacgatcaagtggaactaagttacgatggagcccttcttgatgctgcaagcatggcagctggagtctcttctcccaatttttcagcgccagccaagtggcaacaagatatattgtcacagctaaacctacatggagagggtgccgttttaaaggtgagcttaggaggccctgacgttgttgatggacgcctgttagctgctctaagggtgcttcttgccgatgatccagaggctgtgcacaagcatgacctgaatacattgatgtctcttgacgtgcaagttcctttaggtcccactgttgaagcatcagcactccggacagttcttgcgctttgcgcgattgctctccaacactttcacacaaaaataatggacgaccaggccattctaggcggtgggccgcctcttatcacgcaactggccgtccagtttagattgcagaagaagttcacgatcgttgacgtgatgcagaatatcagcaggagaatcaagatgttatcgccgcagaaatccactgggtagttctttaatctgtcgtcagacagtcagttaccattctgtactggctactgcagatagcacaaatcccagttgtgattctgtaccatgttcttgttatgatacttccagtgcctgtcattgaaaagttacatctgcgtcgaacagttaattacttccctgtactgattattgcgtataataataagtcccgattttgagtcttgtaccatttcgttgtcttcc

SEQ ID NO: 40744 - DNA, 2998 bp, Zea Mays
aaatgatcgaaatcaattgcacacggcgccacaacgcaaaactttaatccgatcacaaaccaatctcgaactagactagaacgtgaaaccctaaaactaatgggtttactgctaattagggtgttatcatgtcgacgaacaatatcagacgtacacgtacacgtgtggtgcagagcgccgggcgcgtatggttcatgacgccgccgccgtgtccatcatggccttgaactcgtcgaagcagaccaccccgtcgccgtctatgtccaccaccgcgatcatctctgcgcaccgctcggccgtcatctcctccccgacgatccccagcctccacagagcgcggcgcagctcctccgcggtgatcacgccgtcgccgttctcgtcgtactcggcgaacgcagcgcgcaacgtgtctgaccggtcgccgtcctcaaacagcgcctcgagctcctcgaggctgatgaacccatctccatcgcggtccgcgacagctaccatctcgtctgcctccacggctgtgcacccgcacaactcgcgcatctcgtccgccgagatgcggccgtcgccgtccgcgtcgaagtggcggaacacgcggacgagggccggctccggtattgtgtacgtgggcgggggagtgctagccgcggctgggggaggcggacttgaggagcggcgtcggctgaagaagatatcgctgcaggacgcggtggcggagacgacgagacccattgccggccgggtgcgacagctttgaatttgattgacggccttgacagggttttgaccctgtttttatataggagtaggacccgccagatagatgaaactcctacgcggttagtttcggtcccatctggtcttatcgtatactggtgcggacctagttgccctctccgcatccaaccagctagcgcgtccgtccccatggcggccgccgccgcggggtttacgccggcgactgcaaggaaggccctcttcactactacagtcactctcctctcatcgtcactctcacgtagggccagcagcatccgcagccgcaacctctcctgctctgccgcgttcaccgccgccacgcgcctcgcgccgcagccgccggacctggtccggtgggtgcagcgcgagggcggattcgtccaccgtgccctccgcgtagcgaatcatccggaacacgggctcgggatctcagcctcttccgccgcggcctacggcgacatcccaattggggacgtcctcatcgcgctcccgagccagcttccattacgactacgccggcccaccagtgccgcggacgacgtgcttgtgcagctcgcccaacaagtcccggaagcttgcagcttcgactttcttccttgccgtccatatgtgctagacgaagcttctctccgcatttcttcggctattctgggcagcttcagctgaaggctagcttcgttcgccgttatctgtatacctgaaacacatttgttcacaccgaagtaaaagctttatgaggacctttggcagagtatgcccccaacagatagtatattgatttgaacaagattgtgttaaggttttcttattattgtattcctcgataatctgtgtgtaactgatgctacaatgttgttgagtttacggatgctgaaatgtgccatttttaccacaacccctcttttggatatataaggggatttctttctatttgtaaattcaaacaaggaataagttcaatcattttcacagatgaactatgggctatgaagctgggcttgaggttgcttcaagaaagggccaaatctgattcattttggtggccatatattgccaatttgccagagacatttactgttccaatcttctttcctggggaagacataaaaaatttgcagtcaataaaagatgtcgttttctcctcgagtttgagaaagaggtacagcagaagcttcatactgtgcccttggtagatcatcctttttatggacaagatgtaaattcatcttcccttggatgggctatgtcagctgcctcttctcgtgcattccgtttgcatggtgaagtcccaatgttgttgcctcttattgatatgtgcaatcatagtttcaacccaaatgctaggattgtccaggaaagaagtgtaaacagcttagacatgtcagtaaaggttcttgctgagaagaagattaagcaaaatgaagcaataacactgaactatggctgctacccaaatgatttctttcttcttgattatggatttgtgataacacagaatccttacgatcaagtggaactaagttacgatggagcccttcttgatgctgcaagcatggcagctggagtctcttctcccaatttttcagcgccagccaagtggcaacaagatatattgtcacagctaaacctacatggagagggtgccgttttaaaggtgagcttaggaggccctgacgttgttgatggacgcctgttagctgctctaagggtgcttcttgccgatgatccagaggctgtgcacaagcatgacctgaatacattgatgtctcttgacgtgcaagttcctttaggtcccactgttgaagcatcagcactccggacagttcttgcgctttgcgcgattgctctccaacactttcacacaaaaataatggacgaccaggccattctaggcggtgggccgcctcttatcacgcaactggccgtccagtttagattgcagaagaagttcacgatcgttgacgtgatgcagaatatcagcaggagaatcaagatgttatcgccgcagaaatccactgggtagttctttaatctgtcgtcagacagtcagttaccattctgtactggctactgcagatagcacaaatcccagttgtgattctgtaccatgttcttgttatgatacttccagtgcctgtcattgaaaagttacatctgcgtcgaacagttaattacttccctgtactgattattgcgtataataataagtcccgattttgagtcttgtaccatttcgttgtcttcc

SEQ ID NO: 40745 - DNA, 1170 bp, Zea Mays
gttgttgtaatataagagtgtcaattttgaatatcagattatgtcaataaaagatgtcgttttctcctcgagtttgagaaagaggtacagcagaagcttcatactgtgcccttggtagatcatcctttttatggacaagatgtaaattcatcttcccttggatgggctatgtcagctgcctcttctcgtgcattccgtttgcatggtgaagtcccaatgttgttgcctcttattgatatgtgcaatcatagtttcaacccaaatgctaggattgtccaggaaagaagtgtaaacagcttagacatgtcagtaaaggttcttgctgagaagaagattaagcaaaatgaagcaataacactgaactatggctgctacccaaatgatttctttcttcttgattatggatttgtgataacacagaatccttacgatcaagtggaactaagttacgatggagcccttcttgatgctgcaagcatggcagctggagtctcttctcccaatttttcagcgccagccaagtggcaacaagatatattgtcacagctaaacctacatggagagggtgccgttttaaaggtgagcttaggaggccctgacgttgttgatggacgcctgttagctgctctaagggtgcttcttgccgatgatccagaggctgtgcacaagcatgacctgaatacattgatgtctcttgacgtgcaagttcctttaggtcccactgttgaagcatcagcactccggacagttcttgcgctttgcgcgattgctctccaacactttcacacaaaaataatggacgaccaggccattctaggcggtgggccgcctcttatcacgcaactggccgtccagtttagattgcagaagaagttcacgatcgttgacgtgatgcagaatatcagcaggagaatcaagatgttatcgccgcagaaatccactgggtagttctttaatctgtcgtcagacagtcagttaccattctgtactggctactgcagatagcacaaatcccagttgtgattctgtaccatgttcttgttatgatacttccagtgcctgtcattgaaaagttacatctgcgtcgaacagttaattacttccctgtactgattattgcgtataataataagtcccgattttgagtcttgtaccatttcgttgtcttcc

SEQ ID NO: 40746 - DNA, 2289 bp, Zea Mays
gataaacgtcatactccctccgtcccaaaatattaatcgttgtagaccttgaattttatgtctatattcaaatggatgtcaatgaatctagacatatatataagacacatacattaagtattgtatgaatctattaaaatgctaaaacagctaatattttgtgatggagggagtattttcattgatcagaatggaattacaggcatttcttagtttgatgcttctttacccatatatttttcagagatagtgttgaatacttgttttcgattggtacatgacataaaaaacaaggcaacacaagttaagaagcctggaccttcgtcctcaagtaatccttcttcgaagtgttaattcgaggacgaatgtccttaaaaatatgtgaatgaaataacatcaattgagataataatgagtaatgaaatgtggaactcatctcatacgtcttagcataatccattttatcctctatcatattacaagaatttacaaacataccttcggcttcttgacacaagatagctcgaaagtacttcgaaggctaagcaagattaagcttgggcccttcaaaaggtgaatttatgcagggcactgtttacctatttataggggagaagtacaagtttgtataaaattacaagcatgccctcaaagtttacacacatgatttacaatgatataaggaagcttgcagcttcgactttcttccttgccgtccatatgtgctagacgaagcttctctccgcatttcttcggctattctgggcagcttcagctgaaggctagcttcgttcgccgttatctgtatacctgaaacacatttgttcacaccgaagtaaaagctttatgaggacctttggcagagtatgcccccaacagatagtatattgatttgaacaagattgtgttaaggttttcttattattgtattcctcgataatctgtgtgtaactgatgctacaatgttgttgagtttacggatgctgaaatgtgccatttttaccacaacccctcttttggatatataaggggatttctttctatttgtaaattcaaacaaggaataagttcaatcattttcacagatgaactatgggctatgaagctgggcttgaggttgcttcaagaaagggccaaatctgattcattttggtggccatatattgccaatttgccagagacatttactgttccaatcttctttcctggggaagacataaaaaatttgcagtatgcccctatcctccaccaggtcaataaaagatgtcgttttctcctcgagtttgagaaagagctgcctcttctcgtgcattccgtttgcatggtgaagtcccaatgttgttgcctcttattgatatgtgcaatcatagtttcaacccaaatgctaggattgtccaggaaagaagtgtaaacagcttagacatgtcagtaaaggttcttgctgagaagaagattaagcaaaatgaagcaataacactgaactatggctgctacccaaatgatttctttcttcttgattatggatttgtgataacacagaatccttacgatcaagtggaactaagttacgatggagcccttcttgatgctgcaagcatggcagctggagtctcttctcccaatttttcagcgccagccaagtggcaacaagatatattgtcacagctaaacctacatggagagggtgccgttttaaaggtgagcttaggaggccctgacgttgttgatggacgcctgttagctgctctaagggtgcttcttgccgatgatccagaggctgtgcacaagcatgacctgaatacattgatgtctcttgacgtgcaagttcctttaggtcccactgttgaagcatcagcactccggacagttcttgcgctttgcgcgattgctctccaacactttcacacaaaaataatggacgaccaggccattctaggcggtgggccgcctcttatcacgcaactggccgtccagtttagattgcagaagaagttcacgatcgttgacgtgatgcagaatatcagcaggagaatcaagatgttatcgccgcagaaatccactgggtagttctttaatctgtcgtcagacagtcagttaccattctgtactggctactgcagatagcacaaatcccagttgtgattctgtaccatgttcttgttatgatacttccagtgcctgtcattgaaaagttacatctgcgtcgaacagttaattacttccctgtactgattattgcgtataataataagtcccgattttgagtcttgtaccatttcgttgtcttcc

SEQ ID NO: 40747 - DNA, 2023 bp, Zea Mays
atttcttagtttgatgcttctttacccatatatttttcagagatagtgttgaatacttgttttcgattggtacatgacataaaaaacaaggcaacacaagttaagaagcctggaccttcgtcctcaagtaatccttcttcgaagtgttaattcgaggacgaatgtccttaaaaatatgtgaatgaaataacatcaattgagataataatgagtaatgaaatgtggaactcatctcatacgtcttagcataatccattttatcctctatcatattacaagaatttacaaacataccttcggcttcttgacacaagatagctcgaaagtacttcgaaggctaagcaagattaagcttgggcccttcaaaaggtgaatttatgcagggcactgtttacctatttataggggagaagtacaagtttgtataaaattacaagcatgccctcaaagtttacacacatgatttacaatgatataagggtattgttgtcctttctttttcttccttattgcgtaagtctcagacctcatttgcttcgtcacttctcacccgaaagcttgttcgtgcagaagcttgcagcttcgactttcttccttgccgtccatatgtgctagacgaagcttctctccgcatttcttcggctattctgggcagcttcagctgaaggctagcttcgttcgccgttatctgtatacctgaaacacatttgttcacaccgaagtaaaagctttatgaggacctttggcagaatgaactatgggctatgaagctgggcttgaggttgcttcaagaaagggccaaatctgattcattttggtggccatatattgccaatttgccagagacatttactgttccaatcttctttcctggggaagacataaaaaatttgcagtcaataaaagatgtcgttttctcctcgagtttgagaaagaggtacagcagaagcttcatactgtgcccttggtagatcatcctttttatggacaagatgtaaattcatcttcccttggatgggctatgtcagctgcctcttctcgtgcattccgtttgcatggtgaagtcccaatgttgttgcctcttattgatatgtgcaatcatagtttcaacccaaatgctaggattgtccaggaaagaagtgtaaacagcttagacatgtcagtaaaggttcttgctgagaagaagattaagcaaaatgaagcaataacactgaactatggctgctacccaaatgatttctttcttcttgattatggatttgtgataacacagaatccttacgatcaagtggaactaagttacgatggagcccttcttgatgctgcaagcatggcagctggagtctcttctcccaatttttcagcgccagccaagtggcaacaagatatattgtcacagctaaacctacatggagagggtgccgttttaaaggtgagcttaggaggccctgacgttgttgatggacgcctgttagctgctctaagggtgcttcttgccgatgatccagaggctgtgcacaagcatgacctgaatacattgatgtctcttgacgtgcaagttcctttaggtcccactgttgaagcatcagcactccggacagttcttgcgctttgcgcgattgctctccaacactttcacacaaaaataatggacgaccaggccattctaggcggtgggccgcctcttatcacgcaactggccgtccagtttagattgcagaagaagttcacgatcgttgacgtgatgcagaatatcagcaggagaatcaagatgttatcgccgcagaaatccactgggtagttctttaatctgtcgtcagacagtcagttaccattctgtactggctactgcagatagcacaaatcccagttgtgattctgtaccatgttcttgttatgatacttccagtgcctgtcattgaaaagttacatctgcgtcgaacagttaattacttccctgtactgattattgcgtataataataagtcccgattttgagtcttgtaccatttcgttgtcttcc

SEQ ID NO: 40748 - DNA, 2041 bp, Zea Mays
cttagtttgatgcttctttacccatatatttttcagagatagtgttgaatacttgttttcgattggtacatgacataaaaaacaaggcaacacaagttaagaagcctggaccttcgtcctcaagtaatccttcttcgaagtgttaattcgaggacgaatgtccttaaaaatatgtgaatgaaataacatcaattgagataataatgagtaatgaaatgtggaactcatctcatacgtcttagcataatccattttatcctctatcatattacaagaatttacaaacataccttcggcttcttgacacaagatagctcgaaagtacttcgaaggctaagcaagattaagcttgggcccttcaaaaggtgaatttatgcagggcactgtttacctatttataggggagaagtacaagtttgtataaaattacaagcatgccctcaaagtttacacacatgatttacaatgatataagggtattgttgtcctttctttttcttccttattgcgtaagtctcagacctcatttgcttcgtcacttctcacccgaaagcttgttcgtgcagaagcttgcagcttcgactttcttccttgccgtccatatgtgctagacgaagcttctctccgcatttcttcggctattctgggcagcttcagctgaaggctagcttcgttcgccgttatctgtatacctgaaacacatttgttcacaccgaagtaaaagctttatgaggacctttggcagaatgaactatgggctatgaagctgggcttgaggttgcttcaagaaagggccaaatctgattcattttggtggccatatattgccaatttgccagagacatttactgttccaatcttctttcctggggaagacataaaaaatttgcagtatgcccctatcctccaccaggtcaataaaagatgtcgttttctcctcgagtttgagaaagaggtacagcagaagcttcatactgtgcccttggtagatcatcctttttatggacaagatgtaaattcatcttcccttggatgggctatgtcagctgcctcttctcgtgcattccgtttgcatggtgaagtcccaatgttgttgcctcttattgatatgtgcaatcatagtttcaacccaaatgctaggattgtccaggaaagaagtgtaaacagcttagacatgtcagtaaaggttcttgctgagaagaagattaagcaaaatgaagcaataacactgaactatggctgctacccaaatgatttctttcttcttgattatggatttgtgataacacagaatccttacgatcaagtggaactaagttacgatggagcccttcttgatgctgcaagcatggcagctggagtctcttctcccaatttttcagcgccagccaagtggcaacaagatatattgtcacagctaaacctacatggagagggtgccgttttaaaggtgagcttaggaggccctgacgttgttgatggacgcctgttagctgctctaagggtgcttcttgccgatgatccagaggctgtgcacaagcatgacctgaatacattgatgtctcttgacgtgcaagttcctttaggtcccactgttgaagcatcagcactccggacagttcttgcgctttgcgcgattgctctccaacactttcacacaaaaataatggacgaccaggccattctaggcggtgggccgcctcttatcacgcaactggccgtccagtttagattgcagaagaagttcacgatcgttgacgtgatgcagaatatcagcaggagaatcaagatgttatcgccgcagaaatccactgggtagttctttaatctgtcgtcagacagtcagttaccattctgtactggctactgcagatagcacaaatcccagttgtgattctgtaccatgttcttgttatgatacttccagtgcctgtcattgaaaagttacatctgcgtcgaacagttaattacttccctgtactgattattgcgtataataataagtcccgattttgagtcttgtaccatttcgttgtcttcc

SEQ ID NO: 40749 - DNA, 1981 bp, Zea Mays
aatatgtgaatgaaataacatcaattgagataataatgagtaatgaaatgtggaactcatctcatacgtcttagcataatccattttatcctctatcatattacaagaatttacaaacataccttcggcttcttgacacaagatagctcgaaagtacttcgaaggctaagcaagattaagcttgggcccttcaaaaggtgaatttatgcagggcactgtttacctatttataggggagaagtacaagtttgtataaaattacaagcatgccctcaaagtttacacacatgatttacaatgatataagggtattgttgtcctttctttttcttccttattgcgtaagtctcagacctcatttgcttcgtcacttctcacccgaaagcttgttcgtgcagaagcttgcagcttcgactttcttccttgccgtccatatgtgctagacgaagcttctctccgcatttcttcggctattctgggcagcttcagctgaaggctagcttcgttcgccgttatctgtatacctgaaacacatttgttcacaccgaagtaaaagctttatgaggacctttggcagagtatgcccccaacagatagtatattgatttgaacaagattgtgttaaggttttcttattattgtattcctcgataatctgtgtgtaactgatgctacaatgttgttgagtttacggatgctgaaatgtgccatttttaccacaacccctcttttggatatataaggggatttctttctatttgtaaattcaaacaaggaataagttcaatcattttcacagatgaactatgggctatgaagctgggcttgaggttgcttcaagaaagggccaaatctgattcattttggtggccatatattgccaatttgccagagacatttactgttccaatcttctttcctggggaagacataaaaaatttgcagtcaataaaagatgtcgttttctcctcgagtttgagaaagagctgcctcttctcgtgcattccgtttgcatggtgaagtcccaatgttgttgcctcttattgatatgtgcaatcatagtttcaacccaaatgctaggattgtccaggaaagaagtgtaaacagcttagacatgtcagtaaaggttcttgctgagaagaagattaagcaaaatgaagcaataacactgaactatggctgctacccaaatgatttctttcttcttgattatggatttgtgataacacagaatccttacgatcaagtggaactaagttacgatggagcccttcttgatgctgcaagcatggcagctggagtctcttctcccaatttttcagcgccagccaagtggcaacaagatatattgtcacagctaaacctacatggagagggtgccgttttaaaggtgagcttaggaggccctgacgttgttgatggacgcctgttagctgctctaagggtgcttcttgccgatgatccagaggctgtgcacaagcatgacctgaatacattgatgtctcttgacgtgcaagttcctttaggtcccactgttgaagcatcagcactccggacagttcttgcgctttgcgcgattgctctccaacactttcacacaaaaataatggacgaccaggccattctaggcggtgggccgcctcttatcacgcaactggccgtccagtttagattgcagaagaagttcacgatcgttgacgtgatgcagaatatcagcaggagaatcaagatgttatcgccgcagaaatccactgggtagttctttaatctgtcgtcagacagtcagttaccattctgtactggctactgcagatagcacaaatcccagttgtgattctgtaccatgttcttgttatgatacttccagtgcctgtcattgaaaagttacatctgcgtcgaacagttaattacttccctgtactgattattgcgtataataataagtcccgattttgagtcttgtaccatttcgttgtcttcc

SEQ ID NO: 40750 - DNA, 1864 bp, Zea Mays
caagaatttacaaacataccttcggcttcttgacacaagatagctcgaaagtacttcgaaggctaagcaagattaagcttgggcccttcaaaaggtgaatttatgcagggcactgtttacctatttataggggagaagtacaagtttgtataaaattacaagcatgccctcaaagtttacacacatgatttacaatgatataagggtattgttgtcctttctttttcttccttattgcgtaagtctcagacctcatttgcttcgtcacttctcacccgaaagcttgttcgtgcagaagcttgcagcttcgactttcttccttgccgtccatatgtgctagacgaagcttctctccgcatttcttcggctattctgggcagcttcagctgaaggctagcttcgttcgccgttatctgtatacctgaaacacatttgttcacaccgaagtaaaagctttatgaggacctttggcagagtatgcccccaacagatagtatattgatttgaacaagattgtgttaaggttttcttattattgtattcctcgataatctgtgtgtaactgatgctacaatgttgttgagtttacggatgctgaaatgtgccatttttaccacaacccctcttttggatatataaggggatttctttctatttgtaaattcaaacaaggaataagttcaatcattttcacagatgaactatgggctatgaagctgggcttgaggttgcttcaagaaagggccaaatctgattcattttggtggccatatattgccaatttgccagagacatttactgttccaatcttctttcctggggaagacataaaaaatttgcagtcaataaaagatgtcgttttctcctcgagtttgagaaagaggtacagcagaagcttcatactgtgcccttggtagatcatcctttttatggacaagatgtaaattcatcttcccttggatgggctatgtcagctgcctcttctcgtgcattccgtttgcatggtgaagtcccaatgttgttgcctcttattgatatgtgcaatcatagtttcaacccaaatgctaggattgtccaggaaagaagtgtaaacagcttagacatgtcagtaaagaatccttacgatcaagtggaactaagttacgatggagcccttcttgatgctgcaagcatggcagctggagtctcttctcccaatttttcagcgccagccaagtggcaacaagatatattgtcacagctaaacctacatggagagggtgccgttttaaaggtgagcttaggaggccctgacgttgttgatggacgcctgttagctgctctaagggtgcttcttgccgatgatccagaggctgtgcacaagcatgacctgaatacattgatgtctcttgacgtgcaagttcctttaggtcccactgttgaagcatcagcactccggacagttcttgcgctttgcgcgattgctctccaacactttcacacaaaaataatggacgaccaggccattctaggcggtgggccgcctcttatcacgcaactggccgtccagtttagattgcagaagaagttcacgatcgttgacgtgatgcagaatatcagcaggagaatcaagatgttatcgccgcagaaatccactgggtagttctttaatctgtcgtcagacagtcagttaccattctgtactggctactgcagatagcacaaatcccagttgtgattctgtaccatgttcttgttatgatacttccagtgcctgtcattgaaaagttacatctgcgtcgaacagttaattacttccctgtactgattattgcgtataataataagtcccgattttgagtcttgtaccatttcgttgtcttcc

SEQ ID NO: 40751 - DNA, 807 bp, Zea Mays
atcctattcctgcggcctcggcctgtccgcctgtattttagggggcccgtggggcgtgggggcacgggcacccgcacaagctgcgctgccagtgccagcgctcactcgaacgccgagacccgagaggagcaaacagccaaaaagaacggaaaggggagagcaaacagccaaaaaaggacggacttgcgcgacagggtcgaagactcagaaggggaatctccggaggatggaggtgggcaggactccgcggcgacgggcgtccccagcggcagcggcggcggcggcggcggcggctgtgccttcgctgcttctgttcgccgtgctattcggttcgttccggagaagttcgaggagatattcgccaggcacgcgaggacggtccccgacgccctgacctcggacgagatcgaccagctgctccaagcgaacagagagcccggggactacagcggctgggctggcgcggaagcggagtggaagatcctgtacagtctcggcaaggacggggacggcctcctccgcaaggacgtcgcgaggagcgtctacgacgggacactgttccaccggctcgcgcccagatggaaatctcccgacagcgacatggagagaagctgataagcgtggtccgggagaactgaaccgagaggaccgtcctattgatgtcgtcttgcgctgggctgctctgaactgaacaagtctggacatgccgtcaagcgacatgtgggtgtgaacactctttcgggtcagattattaacaagaagggtgtgaccgtgtgagtgtgaacagaatcggccgtatagatgtac

SEQ ID NO: 40752 - DNA, 902 bp, Zea Mays
atcctattcctgcggcctcggcctgtccgcctgtattttagggggcccgtggggcgtgggggcacgggcacccgcacaagctgcgctgccagtgccagcgctcactcgaacgccgagacccgagaggagcaaacagccaaaaagaacggaaaggggagagcaaacagccaaaaaaggacggacttgcgcgacagggtcgaagactcagaaggggaatctccggaggatggaggtgggcaggactccgcggcgacgggcgtccccagcggcagcggcggcggcggcggcggcggctgtgccttcgctgcttctgttcgccgtgctattcgcaaaacgcgacgtcgtcgaaactggacatctacatagaggacatccggagagggaagcacgggagcgactccggctcgtacgacgcccaaggaaggttcgttccggagaagttcgaggagatattcgccaggcacgcgaggacggtccccgacgccctgacctcggacgagatcgaccagctgctccaagcgaacagagagcccggggactacagcggctgggctggcgcggaagcggagtggaagatcctgtacagtctcggcaaggacggggacggcctcctccgcaaggacgtcgcgaggagcgtctacgacgggacactgttccaccggctcgcgcccagatggaaatctcccgacagcgacatggagagaagctgataagcgtggtccgggagaactgaaccgagaggaccgtcctattgatgtcgtcttgcgctgggctgctctgaactgaacaagtctggacatgccgtcaagcgacatgtgggtgtgaacactctttcgggtcagattattaacaagaagggtgtgaccgtgtgagtgtgaacagaatcggccgtatagatgtac

SEQ ID NO: 40753 - DNA, 988 bp, Zea Mays
atcctattcctgcggcctcggcctgtccgcctgtattttagggggcccgtggggcgtgggggcacgggcacccgcacaagctgcgctgccagtgccagcgctcactcgaacgccgagacccgagaggagcaaacagccaaaaagaacggaaaggggagagcaaacagccaaaaaaggacggacttgcgcgacagggtcgaagactcagaaggggaatctccggaggatggaggtgggcaggactccgcggcgacgggcgtccccagcggcagcggcggcggcggcggcggcggctgtgccttcgctgcttctgttcgccgtgctattcgcgtttcgggccctcgggtttggactcggcctgtccagcgccagcgccgccttcatcaatggcgcccttggcagcaagtgcagacctcaaaacgcgacgtcgtcgaaactggacatctacatagaggacatccggagagggaagcacgggagcgactccggctcgtacgacgcccaaggaaggttcgttccggagaagttcgaggagatattcgccaggcacgcgaggacggtccccgacgccctgacctcggacgagatcgaccagctgctccaagcgaacagagagcccggggactacagcggctgggctggcgcggaagcggagtggaagatcctgtacagtctcggcaaggacggggacggcctcctccgcaaggacgtcgcgaggagcgtctacgacgggacactgttccaccggctcgcgcccagatggaaatctcccgacagcgacatggagagaagctgataagcgtggtccgggagaactgaaccgagaggaccgtcctattgatgtcgtcttgcgctgggctgctctgaactgaacaagtctggacatgccgtcaagcgacatgtgggtgtgaacactctttcgggtcagattattaacaagaagggtgtgaccgtgtgagtgtgaacagaatcggccgtatagatgtac

SEQ ID NO: 40754 - DNA, 1034 bp, Zea Mays
aaaaaacatatctaccagcccgttctcaccaccgatggcgcgccctcacagtcacagccgccaacgttcccgccgctgacagcgttctcgctgctatcccttaaccctagccgccgccgccgctgccgcttaaaccctcgctgcgccgactgcagcagcccccgcctgcgatggggaaggggacgaagaggaagcagcatcccgccgactcggcgccgcccccgggcgacgagggcgaggggaggagcgggcggaagggcaggaaggagaaggcggaggcgacactgccgtcgcagattaagaacaaggacaagcgccgcgaggtgcatgccaagcttaagcgagagaagaaggcccagaagcgcgcgctggcccgcgagcgcggccaggccgcttgctgcgccgaggagcagccgccggagaggctggtgccccggacgatcgagaacacaagggagcccgatgaggctgtgtgccggcccgacgaccaggagaactaacgaataggtaactacgaactatgtatgaatgccaaatagtgtcatcgattagaatttagaaagagccttttcgccttgccatggatggagccagaattttttttaggaggggttgaactaaaccctataaacaatataataatcttactaaatcactcgcaatagacatattgttgggtctatgcttcgtcgccgaaggtcttcaagggagaagcagctttcggctgaagctgtttgtatgagatggccgaaggttcctttccatgaagcttcgacagtataaaccgacttaaagatagaatgactttttagtccatgaaggtctgagtcaatgttgtaagcttttataaggggcatacttgtaattcctcacaggctgcgtcctgtgcctataaatagtgaacagtattccgttgctgttcacacattctggtaactgcaatcgcatattctggaattcaaccttttgccaaggcagaggtattattgtattcaatgattaaacataagaagtaaatataatataattcgtat

SEQ ID NO: 40755 - DNA, 1265 bp, Zea Mays
gttcaggatttcagattgttcaacggagaacctccacgcgtcgtgagagcgcgagctctgaccgaagatctcagtggtcggcaccaaatttcgcgtgcacacctgcgcatccggcccttcccgtacgcccatgactcagccaccgcgttcctcgaacgtgtcgtccgtgtagcatccatagagacccgtcccacgcaaacacctcagcgatccaccgccctccctcttcgctaaagccgtaatccgaaatcccgcccccagacccagattgcacgacgcaaccgatccccaaatccccaaatcttcccagttccctcctcccgctcgacccagatcgaggcggtcatgctgctgctgctgacgctgccggggctggacggcctgcgccggggcatggtctccgtggtgcggagcgcgctcaagcccatgatgtccgtggtgcccttctgcctcttcctgctcatggacatctactggaagtacgagacgcggcccacctgcgacgacgagcacgcctgcaccccctccgagcacctccgccaccacaagtccgtcatgaagtcgcagcgcaacgcgctcctcatcgccgccgcgctcctcctctactggatcctcttctccgtcacccagctcgtcgtcaggctcgaccagatgcagcagcgcgtcgacaagctcaagaagcgcgacgactgatggggctcgcgttcgcgccttccccgcgtccacccggtggtctcgttcttccctcttcctcgtatttctgtttttttttaatgttggagtgcggatgtcttagatctcgatcgtaatttgaggcatggtgcttcctttgcccttaccgtcttcagataaaaagaacaacgctctttgaaatgatgatatatttaggatgtttggacaaatggtatcgtaattgatgtgttcaccaatgagttgattggtttcactcgagatacaccgagatatgggtctagttgccatccttgagatattggttattagctactagtgctgttttgatgatgtgactgagcttatgttgtaatgagctagttcttgttcagaataagctgacattaggggccggattttatatcttttgtataaaaaatgagctccaacttggaagctagtcgtgtagctgttctagttctagactgagatgctcatctagtgatcaggtgacatgaatgaatggatagtcacgtttgctgtaatactgttctatcttctagactggaatgcttatataggtgattcaagtc

SEQ ID NO: 40756 - DNA, 2376 bp, Zea Mays
caagcaaaccgagtcgagtccacagtccacaccaccaccgcgaggtccactaaaaaaacaagagcattaccggcaccaatcaatcaggctggcagtggagtgacagcggcggcaacaccacgcccacgcggcgccggagccgatcccccgatggatctcccgccgctctcccaccaggccctcttcgccgccgtccgatccgccgacgcgcccgccgtccgcgcggtcctggccgacgccgaggcgtcggccacctccttggccgcgctcgccgccgctcagacggacgccggggaaaccgcgctgtacgttgccgcggaggccggcagcgaggaggtcgtgcgcctcctcctccctctctacgacttcgaggcagccaccgtccgctcacgccttgacctcgacgccttccatgtcgccgccaagcagggccacaccggggttgtgaaagagttcttggggcggtggccagggctttgctcagtctgtgactcttccaacactagtcccctctactcggctgctgtcaaggatcacttggatgtggtaaatgctatactggacactgatgatagctgcataaagattgtgcggaagaatgggaaaacatccctacatactgctgcaagaattggataccatcgtattgtcaaagcactcatagagagagatccaggaatcgttccgatcaatgataggaagggacaaactgcacttcacatggctgtgaagggcaaaaatacagatgtagtggaagagttattgatggctgatgtttccattctcaatgtgagggacaagaaaggaaatactgctttgcacatagctacacggaaatggaggccccagaatatctcaatgtgaaaaacatgtcgtatgtaagccatggtggtttcttagtggagcagagcatctattggaagagcaaccatatatctaagaacacacgaccatcttataaagcactataaagacattagttgctgctgctattaactgtctgccactagtcttactaagtcattgcaacggcgcaggaatgtatctggatgctaatatctcggtatcactattgtggaagtgtggctgacttctcaacacactattctagcagtccagcccaccccacataggccttaaagtattatataaatgatgcttgtgtgttaaaggaagatcaaaaatagccatccagaaactcacagaacgatgggatggtacagcttcttcttagctatgaatcacttgaagttaatgctatcaacagtcaaaatgaaacagctatggatttggctgacaaagttccttatggtgagtctaaaacggaaataatagagtggctgacagaagctggtgcaaagaatgccagaaatgttgggaaaattgatgaggcatcagaactgaggagaactgtgagcgatatcaagcacaatgttcaggcacagcttagcgagaatgctaaaaccaacaaacgagtgactgggattcgcaaagagttgcagaaactgcatagagaagctatccaaaacaccatcaattcagtcaccttggtagcgaccctgattgcctccattgccttcgtcgccatattcaatctgccaggtcaatacttccaggatgtgaatagtgggggagacattggtgaggctgaaatagccaagcttaccggtttccgtgtcttctgccttctgaacgctactgctctcttcatctccctcgcggtggtcgtggtgcagatcaccttggttgcctgggaaactggtgcccagaagcaagttatcaagatcgtgaataagctcatgtggacggcatgccttagcacgggtgtggcttttatctcgctggcctatgttgtagttggcccgcagcatgcctggatggccttcacggcatcagccatcggagggccgatcatgattggaactttcctgttcctagcctatcttctgttgcgcccacggttcaagttcggcgaagacagacagcgccgcatcaagagggcaagcggcagcaaatccttctcctggtcaatccatgatgggttttcagatctggaagccttctctgatcatgagaagaggatctatgccctgtaggagggtgtaacagtaactactcccacaagaggcaactgggagagtacaaatggttcatgtatatatttggtttagccgttttagcctagccgctgttagacctttctccccatgtacaatatctaataatgaagagctgcagctattgtaaagtgcaagtattgagcatgcttgaaagttgaaccggttgccctttgtgaattggctacacgttgtgtcgtattattattcccttttaaaacaaaaaagtggaataatagtagctgcagcattttttgtg

SEQ ID NO: 40757 - DNA, 3472 bp, Zea Mays
cttttgagaagctccgcaccacgacctcgtcccgcccgcagcccgctcttccccgctccacctccaggcttccagtctctcactctcccgcgcctcttgctgctgctgctggcgatagggatcccagcgccttcaagttcgggtgggcggctagcgcggcgcgtgtcggcgagcatatggtgggcattgggcgggggaaggaggaggaggagcggcaatagatttgtgggcgcagaggcggggatggggggcaacaagtactgcgcggcgatgacgaagaggagatggagggggctggcagcggccgcgtgggtgctagtcgcggtggcttgctccgcggtgatgcactggaccatgcgccgggagagcatggaccgcgccgaggagcgcctcgtcagcatgtgcgaggagagggccaggatgctgcaggagcagttcggggtcaccgtcaaccacgtccacgcgatcgccattctcatcgccaccttcaactacgataagtccccttccgctatcgaccaggacacttttgcaaaatacacggcaaggacatcatttgagcgaccgctactcaatggggtggcatatgcacagcgtgtattccatcatgagagggaaatgtttgaaagccagcagggatggattatgaatacaatgcagcgggagcctgcacccccgcaggttgaatatgctccagtgattttctctcaggatactgtttcctacctcgcacgcattgacatgatgtctggagaggaggaccgagaaaacattttgcgggccaggactactggcaaagctgtgttaacaaacccatttcggttgcttggatcaaaccacttgggagtagttctcacttttgctgtgtaccgccctgatctccccgctgatgcatcagttgagcaacgtgtggaagcaactattggatatcttggtggagcgtttgatgtggagtcacttgtggagaatttgctgagcaaacttgctggcaatcaggatattgtggtgaatgtctatgatgtcacaaatgcttcagaggctatggttttgtatggaccttctagttcggatgagcgcgtgcctttcttgcatgttagcatgttggattttggagatccgtttaggaggcatgaaatgaggtgcaggtatagacaaaagcttcctatgcagtggtctgccataaccaatcctttgggcacatttgtcatatggatgcttctggggtatagcattgccgctgcatattctcgatatgacaaagttacagaagattgtagaaagatggaagagctaaaaacgcaggcagaagctgctgatgttgcaaagtctcagttcctggcaactgtgtcacatgagatcagaacacctatgaatggcgtccttggaatgctggatatgcttttaggaacagatctaactatgacacagaaggattatgctcaaactgctcaaatgtgtggcagagcattgataacgttgataaatgatgtccttgatcgagcaaagattgaagctggaaagttagagcttgaagcggtgccttttgacctgcgttctctcatggatgatgttatttccttattttcttcaaagtcacgggagaagtgcattgagcttgcagtatttgtatgtgacaatgttccgaaggatgttcttggagatccttggaggtttcggcagatactaacaaatttggtcggcaatgcagtcaaattcacagaacggggtcatgtatttgtgcgggtctgtttggctgataactcaaatatggaagccggtcaggtcctaaatggagccatgaatgggaaagatggtagagttgattcaacaactaatggtgccttcaatactctgagtgggtttgaagcagcagacagacgaaatagttggcaatattttaagatgctcctctctgataaggagtcccttttggatgatcttgagggaacaaattctgatcaaagtgattcagaccatgtcacactagcgataagtattgaggacacaggtgttgggataccattgcaagcacaagatcgtgtttttacaccgtttatgcaggctgatagttcaacttcaaggaattatggtggtactggcatcggtttaagcattagcaagtgcctagctgaacttatggttgattcaagtaggagcttgttagaggcactaccaactgcttttaagggaatgaaggccatcttgatagatgggagacctgtacgtagtgctgttacaagatatcacctcaagaggttgggaataattgttcaagttgtgaacaatatgagtgcagtagtaaaagctttccctggacaaaatggagcaactgtttctagggaaaaggcaaccattctttttattgagagtgacttttggaggcccgagacagatgttcagttattgaaccatctacgcgagcacaagaatcgtcagttgtctgatgggcataaggtagttcttttggtcacctccgaagctgataaggacaagtatggatccatatttgatattgtgatgtgcaagcctataagggcaagcatgattgcttcatctattcaacaactgctcaaagtagagatgcctgaaagaagaaataatcataatcggccatcatttcttcgcagcctgctggttgggaagaatatattggtagtagatgataataaagtcaatcttagagtcgctgcagctgcactcaaaaagtacggtgctaatgttagctgtgttgagagtggcaaagatgctatcagtctacttcaacccccacattgctttgacgcatgttttatggatgttcagatgccagagatggatgggtttgaggcaacaagacaaataaggcaaacagagatgagagttaacgaggaaaggaagaataagttggtgttgattgaaggctcaacatttgttgagtaccatttgcctgttttggcgatgacagccgatgttatccaggcaacttacgagaagtgtataaaatcgggaatggatggatacgtgtctaaacccttcgacgaggagcagctataccaagcagtctccagattaatagtgggaacgacagattcgactgtttaatatttagatggctatgaatctgatttctcattcatcgaattgaagcacaccaccatgttgcttctgtccaagtttgactctaacccttaacaattgtctgacctggcctctcgcagcactagatgaaaaggatgaaagtgccacgagttggctatgtatcagcaccacagatgaagttgcctcaccccggagtgtaggttggtagatcactctcttctttgatgtttataggttgttgtatatcttctgacaattcattggaaaccacatctcgttgcgacattggaggacatcttcaatgctggtaaatttgttataggaatatcctttaatgctggtatttggtactccctccgtcccaccaaaaatataaaattcgttttggactaag

SEQ ID NO: 40758 - DNA, 3186 bp, Zea Mays
ctccgcaccacgacctcgtcccgcccgcagcccgctcttccccgctccacctccaggcttccagtctctcactctcccgcgcctcttgctgctgctgctggcgatagggatcccagcgccttcaagttcgggtgggcggctagcgcggcgcgtgtcggcgagcatatggtgggcattgggcgggggaaggaggaggaggagcggcaatagatttgtgggcgcagaggcggggatggggggcaacaagtactgcgcggcgatgacgaagaggagatggagggggctggcagcggccgcgtgggtgctagtcgcggtggcttgctccgcggtgatgcactggaccatgcgccgggagagcatggaccgcgccgaggagcgcctcgtcagcatgtgcgaggagagggccaggatgctgcaggagcagttcggggtcaccgtcaaccacgtccacgcgatcgccattctcatcgccaccttcaactacgataagtccccttccgctatcgaccaggacacttttgcaaaatacacggcaaggacatcatttgagcgaccgctactcaatggggtggcatatgcacagcgtgtattccatcatgagagggaaatgtttgaaagccagcagggatggattatgaatacaatgcagcgggagcctgcacccccgcaggttgaatatgctccagtgattttctctcaggatactgtttcctacctcgcacgcattgacatgatgtctggagaggaggaccgagaaaacattttgcgggccaggactactggcaaagctgtgttaacaaacccatttcggttgcttggatcaaaccacttgggagtagttctcacttttgctgtgtaccgccctgatctccccgctgatgcatcagttgagcaacgtgtggaagcaactattggatatcttggtggagcgtttgatgtggagtcacttgtggagaatttgctgagcaaacttgctggcaatcaggatattgtggtgaatgtctatgatgtcacaaatgcttcagaggctatggttttgtatggaccttctagttcggatgagcgcgtgcctttcttgcatgttagcatgttggattttggagatccgtttaggaggcatgaaatgaggtgcaggtatagacaaaagcttcctatgcagtggtctgccataaccaatcctttgggcacatttgtcatatggatgcttctggggtatagcattgccgctgcatattctcgatatgacaaagttacagaagattgtagaaagatggaagagctaaaaacgcaggcagaagctgctgatgttgcaaagtctcagttcctggcaactgtgtcacatgagatcagaacacctatgaatggcgtccttggaatgctggatatgcttttaggaacagatctaactatgacacagaaggattatgctcaaactgctcaaatgtgtggcagagcattgataacgttgataaatgatgtccttgatcgagcaaagattgaagctggaaagttagagcttgaagcggtgccttttgacctgcgttctctcatggatgatgttatttccttattttcttcaaagtcacgggagaagtgcattgagcttgcagtatttgtatgtgacaatgttccgaaggatgttcttggagatccttggaggtttcggcagatactaacaaatttggtcggcaatgcagtcaaattcacagaacggggtcatgtatttgtgcgggtctgtttggctgataactcaaatatggaagccggtcaggtcctaaatggagccatgaatgggaaagatggtagagttgattcaacaactaatggtgccttcaatactctgagtgggtttgaagcagcagacagacgaaatagttggcaatattttaagatgctcctctctgataaggagtcccttttggatgatcttgagggaacaaattctgatcaaagtgattcagaccatgtcacactagcgataagtattgaggacacaggtgttgggataccattgcaagcacaagatcgtgtttttacaccgtttatgcaggctgatagttcaacttcaaggaattatggtggtactggcatcggtttaagcattagcaagtgcctagctgaacttatgggtgggcagataagttttgtcagccgtccttttgttggaagtacattcactttctccaccacactgaagcgctcatacaaagatatttcagttgattcaagtaggagcttgttagaggcactaccaactgcttttaagggaatgaaggccatcttgatagatgggagacctgtacgtagtgctgttacaagatatcacctcaagaggttgggaataattgttcaagttgtgaacaatatgagtgcagtagtaaaagctttccctggacaaaatggagcaactgtttctagggaaaaggcaaccattctttttattgagagtgacttttggaggcccgagacagatgttcagttattgaaccatctacgcgagcacaagaatcgtcagttgtctgatgggcataaggtttgaggcaacaagacaaataaggcaaacagagatgagagttaacgaggaaaggaagaataagttggtgttgattgaaggctcaacatttgttgagtaccatttgcctgttttggcgatgacagccgatgttatccaggcaacttacgagaagtgtataaaatcgggaatggatggatacgtgtctaaacccttcgacgaggagcagctataccaagcagtctccagattaatagtgggaacgacagattcgactgtttaatatttagatggctatgaatctgatttctcattcatcgaattgaagcacaccaccatgttgcttctgtccaagtttgactctaacccttaacaattgtctgacctggcctctcgcagcactagatgaaaaggatgaaagtgccacgagttggctatgtatcagcaccacagatgaagttgcctcaccccggagtgtaggttggtagatcactctcttctttgatgtttataggttgttgtatatcttctgacaattcattggaaaccacatctcgttgcgacattggaggacatcttcaatgctggtaaatttgttataggaatatcctttaatgctggtatttggtactccctccgtcccaccaaaaatataaaattcgttttggactaag

SEQ ID NO: 40759 - DNA, 3090 bp, Zea Mays
ctcgtttttgcatacaatgaccaatcttattcgttgcatcattacttttggacacttttgcaaaatacacggcaaggacatcatttgagcgaccgctactcaatggggtggcatatgcacagcgtgtattccatcatgagagggaaatgtttgaaagccagcagggatggattatgaatacaatgcagcgggagcctgcacccccgcaggttgaatatgctccagtgattttctctcaggatactgtttcctacctcgcacgcattgacatgatgtctggagaggaggaccgagaaaacattttgcgggccaggactactggcaaagctgtgttaacaaacccatttcggttgcttggatcaaaccacttgggagtagttctcacttttgctgtgtaccgccctgatctccccgctgatgcatcagttgagcaacgtgtggaagcaactattggatatcttggtggagcgtttgatgtggagtcacttgtggagaatttgctgagcaaacttgctggcaatcaggatattgtggtgaatgtctatgatgtcacaaatgcttcagaggctatggttttgtatggaccttctagttcggatgagcgcgtgcctttcttgcatgttagcatgttggattttggagatccgtttaggaggcatgaaatgaggtgcaggtatagacaaaagcttcctatgcagtggtctgccataaccaatcctttgggcacatttgtcatatggatgcttctggggtatagcattgccgctgcatattctcgatatgacaaagttacagaagattgtagaaagatggaagagctaaaaacgcaggcagaagctgctgatgttgcaaagtctcagttcctggcaactgtgtcacatgagatcagaacacctatgaatggcgtccttggaatgctggatatgcttttaggaacagatctaactatgacacagaaggattatgctcaaactgctcaaatgtgtggcagagcattgataacgttgataaatgatgtccttgatcgagcaaagattgaagctggaaagttagagcttgaagcggtgccttttgacctgcgttctctcatggatgatgttatttccttattttcttcaaagtcacgggagaagtgcattgagcttgcagtatttgtatgtgacaatgttccgaaggatgttcttggagatccttggaggtttcggcagatactaacaaatttggtcggcaatgcagtcaaattcacagaacggggtcatgtatttgtgcgggtctgtttggctgataactcaaatatggaagccggtcaggtcctaaatggagccatgaatgggaaagatggtagagttgattcaacaactaatggtgccttcaatactctgagtgggtttgaagcagcagacagacgaaatagttggcaatattttaagatgctcctctctgataaggagtcccttttggatgatcttgagggaacaaattctgatcaaagtgattcagaccatgtcacactagcgataagtattgaggacacaggtgttgggataccattgcaagcacaagatcgtgtttttacaccgtttatgcaggctgatagttcaacttcaaggaattatggtggtactggcatcggtttaagcattagcaagtgcctagctgaacttatgggtgggcagataagttttgtcagccgtccttttgttggaagtacattcactttctccaccacactgaagcgctcatacaaagatatttcagttgattcaagtaggagcttgttagaggcactaccaactgcttttaagggaatgaaggccatcttgatagatgggagacctgtacgtagtgctgttacaagatatcacctcaagaggttgggaataattgttcaagttgtgaacaatatgagtgcagtagtaaaagctttccctggacaaaatggagcaactgtttctagggaaaaggcaaccattctttttattgagagtgacttttggaggcccgagacagatgttcagttattgaaccatctacgcgagcacaagaatcgtcagttgtctgatgggcataaggtagttcttttggtcacctccgaagctgataaggacaagtatggatccatatttgatattgtgatgtgcaagcctataagggcaagcatgattgcttcatctattcaacaactgctcaaagtagagatgcctgaaagaagaaataatcataatcggccatcatttcttcgcagcctgctggttgggaagaatatattggtagtagatgataataaagtcaatcttagagtcgctgcagctgcactcaaaaagtacggtgctaatgttagctgtgttgagagtggcaaagatgctatcagtctacttcaacccccacattgctttgacgcatgttttatggatgttcagatgccagagatggatgggtttgaggcaacaagacaaataaggcaaacagagatgagagttaacgaggaaaggaagaataagttggtgttgattgaaggctcaacatttgttgagtaccatttgcctgttttggcgatgacagccgatgttatccaggcaacttacgagaagtgtataaaatcgggaatggatggatacgtgtctaaacccttcgacgaggagcagctataccaagcagtctccagattaatagtgggaacgacagattcgactgtttaatatttagatggctatgaatctgatttctcattcatcgaattgaagcacaccaccatgttgcttctgtccaagtttgactctaacccttaacaattgtctgacctggcctctcgcagcactagatgaaaaggatgaaagtgccacgagttggctatgtatcagcaccacagatgaagttgcctcaccccggagtgtaggttggtagatcactctcttctttgatgtttataggttgttgtatatcttctgacaattcattggaaaccacatctcgttgcgacattggaggacatcttcaatgctggtaaatttgttataggaatatcctttaatgctggtatttggtactccctccgtcccaccaaaaatataaaattcgttttggactaag

SEQ ID NO: 40760 - DNA, 393 bp, Zea Mays
aagacgcgcgcgcgcgcgcgccgctcggaacagaggaggactggatcaggagtcgagagggaagaagacagcccacaaagcagccggcgccgcgcggggactctccccgcccaatgagtagcgccgcttcgtccccgtgccaccggctccgccgcgtcgcgctgctgctgctcgttgccgcggtcctcgccggtggaaccgaggggaaggcgcacgactacggggacgcgctgcgcaagagcctgctctacttcgaggcgcagcgctcgggccgcctcccgcacagccagcgcgtcgcatggcgccaccactccggcctcaccgacgggctcgagcaaggggtggacttggtgggaggatactacgacgccggggaccacgtcaagttcggcc

SEQ ID NO: 40761 - DNA, 2251 bp, Zea Mays
cctgttgaccatgcctagcgttgagcacaactgcacaagcaggagaaatcagaatcaagggtctcgtcttcgttcccttcgcctccccattccgtaccgcgtcagatcgcacccctcctccatggcggcgctcagcctccgccagaggcagcttgatctgattgtgcggatgctgcacctcaacaagccaccgccgccgcccggcacggctgcggagcaagaagaggaggtgtacaagatcctggtactggacagcttctgcctctcgctgctctcgccgctgctccgcgtcgccgacctccgcaagcacggggtcaccctctactttcccatcgacaagccccgccagcaggtcgccgacgcccccgccgtgtacttcctccgccccacgcaagccaatgccgaccgcgtcgctgcagatgccgccgcctcgctctacgcatccttccacctcaacttctcctccgccctcccgcagcctccggctctgcccaccgcgtcgcccgcctcgccgaccagtacctcgacttcgtctctctcgaggacaacctcttctccctcgcccacccgcgctcctacgtcgcgctcaacgaccccaaagcggccgacgccgacattgaggccctcgtcgacgcgatcgcgctcggcctcttctgcgcggcggccacgctcggcaccgtgcccgtcatcaggtgcccccgcggtggccccgccgagatggtcgccgccgcccttgacgcccgcctccggcatcacctcctcgccaagcctaacctcttcaccgaggcctcagcctcagcctccgttgcctccttccagcgccccgtgctctgcctcttcgacaggaatttggacctctctgtgggaatacagcacgattggagctaccgccccttggtccatgacgtcctcggcctcaagctcaacaagctcaagatgcccgcggacaagtctggcccggccaaggcctacgatctcgatgattccgatgccttctgggtagcaaacagctggtcgccgttccccagggtggctgaggagatcgagtcgcagctcgccaagtacaagcaggatgtggacgaggtgaaccagcgcaccggtggcaacaaggatggcatcgagttcgatggcacagacctcattggcaacacccagcacctgatgaatgccgttaactcgctcccggagctcacagaacgcaagaagatgatcgacaagcacacgaatatcgcgacagcgttgcttgggcacatcaaggagagatcgctggatggatactgtgactgcgggaacgacatgctcacgaagggcaccgtggacaggagcacgctactgggccttctccgagggaagggcaccaaggcggacaagcttcgtctggctgtgacctacctcctctgtttcgagacgccagagctagagcaggtcgaggcggcgctgcgtgagtcagaagtggacatgtcagcgtttcagtatgtgaagaggatcaaatcgctgaacacgcagtttagtgcctcgtcgtcaagcagtgcaacgaggagcaacattgttgattgggcagagaagctgtatgggcagtccattagcgcagtgacagcaggggtgaagaatctcttgtccagtgggaggcagcttgcattgacgaggacggtcgaagctctcatggaagggaagccgaatccggaggtggacaactatctgctgtttgacccacgtgcccctagatcaggaagcggtgggcagttcaaagggccattcagagaagcaattgtgttcatgattggtggtgggaattacattgagtacaggagcttgatggagctggcagaatgctcgcagccgccttcttccaagcatgtcatatacggagcaactgagattgtcaacggggtggagttcatcgagcaacttgcagaactggggcagaaagcggggctgggtctgggtggtggaaacaaccctccactacagtaattactaataaataagggggggttctttcacatcgtttgaacattgtcagatatgatatgatcatttgcttccttttgtatggtttatattcgttgagaatatgttagtgcaatctgatccgcagtcttttttatactggttactggaggcaataataattataaacagatagaagaacaagacattcaaaggtttctagagatggagctgctattgtcaagtaattttaatagatagaaatgaagtatgcatcaattcaagcgggcccaagttcttt

SEQ ID NO: 40762 - DNA, 2237 bp, Zea Mays
ctagcgttgagcacaactgcacaagcaggagaaatcagaatcaagggtctcgtcttcgttcccttcgcctccccattccgtaccgcgtcagatcgcacccctcctccatggcggcgctcagcctccgccagaggcagcttgatctgattgtgcggatgctgcacctcaacaagccaccgccgccgcccggcacggctgcggagcaagaagaggaggtgtacaagatcctggtactggacagcttctgcctctcgctgctctcgccgctgctccgcgtcgccgacctccgcaagcacggggtcaccctctactttcccatcgacaagccccgccagcaggtcgccgacgcccccgccgtgtacttcctccgccccacgcaagccaatgccgaccgcgtcgctgcagatgccgccgcctcgctctacgcatccttccacctcaacttctcctccgccctcccgcagcctccggctctgcccaccgcgtcgcccgcctcgccgaccagtacctcgacttcgtctctctcgaggacaacctcttctccctcgcccacccgcgctcctacgtcgcgctcaacgaccccaaagcggccgacgccgacattgaggccctcgtcgacgcgatcgcgctcggcctcttctgcgcggcggccacgctcggcaccgtgcccgtcatcaggtgcccccgcggtggccccgccgagatggtcgccgccgcccttgacgcccgcctccggcatcacctcctcgccaagcctaacctcttcaccgaggcctcagcctcagcctccgttgcctccttccagcgccccgtgctctgcctcttcgacaggaatttggacctctctgtgggaatacagcacgattggagctaccgccccttggtccatgacgtcctcggcctcaagctcaacaagctcaagatgcccgcggacaagtctggcccggccaaggcctacgatctcgatgattccgatgccttctgggtagcaaacagctggtcgccgttccccagggtggctgaggagatcgagtcgcagctcgccaagtacaagcaggatgtggacgaggtgaaccagcgcaccggtggcaacaaggatggcatcgagttcgatggcacagacctcattggcaacacccagcacctgatgaatgccgttaactcgctcccggagctcacagaacgcaagaagatgatcgacaagcacacgaatatcgcgacagcgttgcttgggcacatcaaggagagatcgctggatggatactgtgactgcgggaacgacatgctcacgaagggcaccgtggacaggagcacgctactgggccttctccgagggaagggcaccaaggcggacaagcttcgtctggctgtgacctacctcctctgtttcgagacgccagagctagagcaggtcgaggcggcgctgcgtgagtcagaagtggacatgtcagcgtttcagtatgtgaagaggatcaaatcgctgaacacgcagtttagtgcctcgtcgtcaagcagtgcaacgaggagcaacattgttgattgggcagagaagctgtatgggcagtccattagcgcagtgacagcaggggtgaagaatctcttgtccagtgggaggcagcttgcattgacgaggacggtcgaagctctcatggaagggaagccgaatccggaggtggacaactatctgctgtttgacccacgtgcccctagatcaggaagcggtgggcagttcaaagggccattcagagaagcaattgtgttcatgattggtggtgggaattacattgagtacaggagcttgatggagctggcagaatgctcgcagccgccttcttccaagcatgtcatatacggagcaactgagattgtcaacggggtggagttcatcgagcaacttgcagaactggggcagaaagcggggctgggtctgggtggtggaaacaaccctccactacagtaattactaataaataagggggggttctttcacatcgtttgaacattgtcagatatgatatgatcatttgcttccttttgtatggtttatattcgttgagaatatgttagtgcaatctgatccgcagtcttttttatactggttactggaggcaataataattataaacagatagaagaacaagacattcaaaggtttctagagatggagctgctattgtcaagtaattttaatagatagaaatgaagtatgcatcaattcaagcgggcccaagttcttt

SEQ ID NO: 40763 - DNA, 1126 bp, Zea Mays
catcctggccatccaaccaatccggtcaacgggagaacatgtacgaggcgatgtcgccgcgccgggcgctcctcgccatcctcctcgccgtcgccctcgcctccgcttcctcggcaccccagcccccgccgtgcagccgctcgtgcgcggccctcaactgcgactccctcgggatccgctacggcaagtactgcggcgtgggctggagcggctgcgacggcgaggagccctgcgacgacctcgacgcctgctgccgcgaccacgaccgctgcgtcgagaggaaaggttacgtttccttcatccccggcctgcgtttgttgtgctcgttaattagggtctgagtgagatgggtggatggatcatgatcaagttcctagcttgcaactcatcggtagcaaaggaatttttcattggatttgatttcgcgttgcaatctgatcactacacttgctcactccgttttttttatttgtcgcgttttagttaaaaaaaataaactagccggtaacaaatattgaagaatagagtcagttttctttatttattttctgcttgtggtgtggttggaatgcagtgccttcaagcaccattaccacaaaattttgcatttaccatccacgaaaaggatgaccacagttattctcccaacctgaacattacatgtaatcagtcagtcactcagcctcagcctgatgggaatagaaatgaaaatagtgatcaacagcggattagcatgaggatatggtatgatgagcgtgaaatgccatgagaaattcaaaaactgcatgaggaaagtgaaaaaggcaggcaaggttggcttctccaagaaatgcccgtacgagatggctatggctacaatgactcaggggatggatatggccatcatccttagccagttgggcacccagaaggtggaactctagcgttagctagctccgcctcagctgcatgttgatttattctcacggaaatatttatatactccactgaagaatagaatttgcttccatatgattactgttgtttcatcgaagtcagagggatgcatagcttatctttcttctgccaaattgaaaaagaaaggaaaagacttcagtttattttctgtagcttgaatagtttttag

SEQ ID NO: 40764 - DNA, 2073 bp, Zea Mays
aaaacaccgaggagaagtcggaaccaaacgataatcacgaaacaagctatccgacgcagttttgaccacagccgacggcaatagaagtagagaactccgacttcttcactcacacacacatggcgctgatgagccttggcgccgccgggtacaccacggccaccgcgccgcctcgtccccgaagatgtaccctgccgtttcgcgccgccgcctcccctgcggcactggaccgccggcgacggccgcataatgtggctggcgacttcttcgtcgaccaccgctgcatcgactgccagacctgccgatggatggcgccggtacgcaggcagctttctcccatcctccaccttcaatcgctcgcttggctaaccatcattcatggcgtgaggcgtgccggcatctatgcaggaggtgttcaagagggtggatggcaaggccgccgtagcggcgcagcccagctccgaggaggagaggaccaaggccctgcaggcgctgctatcctgtccaacatcctcaattcacactgagaaacctccaaaagacattcttaaagtgcaaaacatgtttcctctaccaatcgacgacaagctactcccaggtgtttatctctgtgggtataattctgaagactcatatggggcaacatcgtacctggtaattcatccacaaggaaacatactgattgacagcccaaggtatactccaaagctggccaacaatattgaaaagcttggtggagcgcgctacatgtttttgacccacattgatgacgtagcagatcacaggaagtgggctgagcagctaaaatgtgaaagaataatacattcaggagatgtggaggaggctaccgcagatgttgagtggaaacttgaaggaaatggtccatggaacttaggaacagattttgaacttattacttaaaaataaatatctaggcgagaattctctttctcaagtttctagaagacagggggattctcaattctggtcgggcctaatgaatattaaggaccagctccttagaggggggcacttcaaagtgggaaatggtcaagctaccagattctggaaggacaaatgggtaaccagtcgacctcttagttattttcagatgtactcactggttaagattctggagactgctacaaaaggaggaatcgcaacaacaaatcctcattgcttcgcaagttttggaagtggtggcgatggaagtcttcgcaaaccatggatggcgctcaaattcaagaattgagtatggctagtgttagtcatagtattgtaatttagttcctttgagttagtatcactattcatgcaacagttcttaattgtaataatcgacttgtattggctgtacgcattatcatgctaaagccggaactcttgtttccattatcaaaaaaaaaatacgccaggccataccccagtaagaaattcaacttgattgacttggatctagtaacaatcaatttttagcaacacgggtttagcaccttgctcattacattcattgcatctagtttgagaatcgagtcaaacatttttctagggctcagtgtgcttgtacttcaaaccgctaaaggtgctgttcactggagaccatgttgcaaagtcagaagaatcagacgatctgaacctctttctgatgtacagcaagcagtcagtgagccttcagctggaaagcatcaggaagctactggagctagagttcgagtggcttttacctggacatggctatcgaatcaagtacaaagatgtgcgtgccaagaatgtagccatggagtccctcctagctaattacacaagctaggagcctatgagcatcttacttgagttagtgctcgcaaataagcattccaggaggctgaatgttgatgctatgtttccagagaatagtgtgcatgatgctcatcagctcttgaatgtgcatttgttaccagagactgtaccttgtgctgcacaccaagcaagtgaatgaatcaagcatacatgactcggcccaatgaatgctttttccagaaatcttgcaagaccatatgattgatttgttatatgcatgatgatatattcgac

SEQ ID NO: 40765 - DNA, 1365 bp, Zea Mays
cgcagttttgaccacagccgacggcaatagaagtagagaactccgacttcttcactcacacacacatggcgctgatgagccttggcgccgccgggtacaccacggccaccgcgccgcctcgtccccgaagatgtaccctgccgtttcgcgccgccgcctcccctgcggcactggaccgccggcgacggccgcataatgtggctggcgacttcttcgtcgaccaccgctgcatcgactgccagacctgccgatggatggcgccggaggtgttcaagagggtggatggcaaggccgccgtagcggcgcagcccagctccgaggaggagaggaccaaggccctgcaggcgctgctatcctgtccaacatcctcaattcacactgagaaacctccaaaagacattcttaaagtgcaaaacatgtttcctctaccaatcgacgacaagctactcccaggtgtttatctctgtgggtataattctgaagactcatatggggcaacatcgtacctggtaattcatccacaaggaaacatactgattgacagcccaaggtatactccaaagctggccaacaatattgaaaagcttggtggagcgcgctacatgtttttgacccacattgatgacgtagcagatcacaggaagtgggctgagcagctaaaatgtgaaagaataatacattcaggagatgttattttcagatgtactcactggttaagattctggagactgctacaaaaggaggaatcgcaacaacaaatcctcattgcttcgcaagttttggaagtggtggcgatggaagtcttcgcaaaccatggatggcgctcaaattcaagaattgaggctcagtgtgcttgtacttcaaaccgctaaaggtgctgttcactggagaccatgttgcaaagtcagaagaatcagacgatctgaacctctttctgatgtacagcaagcagtcagtgagccttcagctggaaagcatcaggaagctactggagctagagttcgagtggcttttacctggacatggctatcgaatcaagtacaaagatgtgcgtgccaagaatgtagccatggagtccctcctagctaattacacaagctaggagcctatgagcatcttacttgagttagtgctcgcaaataagcattccaggaggctgaatgttgatgctatgtttccagagaatagtgtgcatgatgctcatcagctcttgaatgtgcatttgttaccagagactgtaccttgtgctgcacaccaagcaagtgaatgaatcaagcatacatgactcggcccaatgaatgctttttccagaaatcttgcaagaccatatgattgatttgttatatgcatgatgatatattcgac

SEQ ID NO: 40766 - DNA, 1332 bp, Zea Mays
cgcagttttgaccacagccgacggcaatagaagtagagaactccgacttcttcactcacacacacatggcgctgatgagccttggcgccgccgggtacaccacggccaccgcgccgcctcgtccccgaagatgtaccctgccgtttcgcgccgccgcctcccctgcggcactggaccgccggcgacggccgcataatgtggctggcgacttcttcgtcgaccaccgctgcatcgactgccagacctgccgatggatggcgccggaggtgttcaagagggtggatggcaaggccgccgtagcggcgcagcccagctccgaggaggagaggaccaaggccctgcaggcgctgctatcctgtccaacatcctcaattcacactgagaaacctccaaaagacattcttaaagtgcaaaacatgtttcctctaccaatcgacgacaagctactcccaggtgtttatctctgtgggtataattctgaagactcatatggggcaacatcgtacctggtaattcatccacaaggaaacatactgattgacagcccaaggtatactccaaagctggccaacaatattgaaaagcttggtggagcgcgctacatgtttttgacccacattgatgacgtagcagatcacaggaagtgggctgagcagctaaaatgtgaaagaataatacattcaggagatgttattttcagatgtactcactggttaagattctggagactgctacaaaaggaggaatcgcaacaacaaatcctcattgcttcgcaagttttggaagtggtggcgatggaagtcttcgcaaaccatggatggcgctcaaattcaagaattgagtgctgttcactggagaccatgttgcaaagtcagaagaatcagacgatctgaacctctttctgatgtacagcaagcagtcagtgagccttcagctggaaagcatcaggaagctactggagctagagttcgagtggcttttacctggacatggctatcgaatcaagtacaaagatgtgcgtgccaagaatgtagccatggagtccctcctagctaattacacaagctaggagcctatgagcatcttacttgagttagtgctcgcaaataagcattccaggaggctgaatgttgatgctatgtttccagagaatagtgtgcatgatgctcatcagctcttgaatgtgcatttgttaccagagactgtaccttgtgctgcacaccaagcaagtgaatgaatcaagcatacatgactcggcccaatgaatgctttttccagaaatcttgcaagaccatatgattgatttgttatatgcatgatgatatattcgac

SEQ ID NO: 40767 - DNA, 1917 bp, Zea Mays
agagaactccgacttcttcactcacacacacatggcgctgatgagccttggcgccgccgggtacaccacggccaccgcgccgcctcgtccccgaagatgtaccctgccgtttcgcgccgccgcctcccctgcggcactggaccgccggcgacggccgcataatgtggctggcgacttcttcgtcgaccaccgctgcatcgactgccagacctgccgatggatggcgccggtacgcaggcagctttctcccatcctccaccttcaatcgctcgcttggctaaccatcattcatggcgtgaggcgtgccggcatctatgcaggaggtgttcaagagggtggatggcaaggccgccgtagcggcgcagcccagctccgaggaggagaggaccaaggccctgcaggcgctgctatcctgtccaacatcctcaattcacactgagaaacctccaaaagacattcttaaagtgcaaaacatgtttcctctaccaatcgacgacaagctactcccaggtgtttatctctgtgggtataattctgaagactcatatggggcaacatcgtacctggtaattcatccacaaggaaacatactgattgacagcccaaggtatactccaaagctggccaacaatattgaaaagcttggtggagcgcgctacatgtttttgacccacattgatgacgtagcagatcacaggaagtgggctgagcagctaaaatgtgaaagaataatacattcaggagatgtaaggattgcatctctcgctatattcttctattttacatgatagaatggcaaaatttctgataaatcttaatcgcaaaccggccccatgtacaatcctttttggaactctgctctcatattgattagcaaggcctcatcctgaagagtgacaatcacacactgcccatgcatgatgcttctactttaatgcatgtacttctgctttaattaatacatcattgcagtatgggcactaataaagcatctgatattcatatatcggttttcaagctcggtttccctcataagccaggtcaatcctattctgtttaattgaaaggcagagctcctgccggtgtgttaaaaaaagcatctgacaatccatatttcttcaaatggaggaaatttccataagaaataaacttacaacattggaatagttagcaagcattcatcgcattcatgatgtaggttctattatccctgcgtgtctcccagtgaactctgctctttgaaacatgtcctgatggtatttactgcagtaagtaaccattctgacgcaggtggaggaggctaccgcagatgttgagtggaaacttgaaggaaatggtccatggaacttaggaacagattttgaacttattacatacgccaggccataccccaggctcagtgtgcttgtacttcaaaccgctaaaggtgctgttcactggagaccatgttgcaaagtcagaagaatcagacgatctgaacctctttctgatgtacagcaagcagtcagtgagccttcagctggaaagcatcaggaagctactggagctagagttcgagtggcttttacctggacatggctatcgaatcaagtacaaagatgtgcgtgccaagaatgtagccatggagtccctcctagctaattacacaagctaggagcctatgagcatcttacttgagttagtgctcgcaaataagcattccaggaggctgaatgttgatgctatgtttccagagaatagtgtgcatgatgctcatcagctcttgaatgtgcatttgttaccagagactgtaccttgtgctgcacaccaagcaagtgaatgaatcaagcatacatgactcggcccaatgaatgctttttccagaaatcttgcaagaccatatgattgatttgttatatgcatgatgatatattcgac

SEQ ID NO: 40768 - DNA, 2232 bp, Zea Mays
agagaactccgacttcttcactcacacacacatggcgctgatgagccttggcgccgccgggtacaccacggccaccgcgccgcctcgtccccgaagatgtaccctgccgtttcgcgccgccgcctcccctgcggcactggaccgccggcgacggccgcataatgtggctggcgacttcttcgtcgaccaccgctgcatcgactgccagacctgccgatggatggcgccggtacgcaggcagctttctcccatcctccaccttcaatcgctcgcttggctaaccatcattcatggcgtgaggcgtgccggcatctatgcaggaggtgttcaagagggtggatggcaaggccgccgtagcggcgcagcccagctccgaggaggagaggaccaaggccctgcaggcgctgctatcctgtccaacatcctcaattcacactgagaaacctccaaaagacattcttaaagtgcaaaacatgtttcctctaccaatcgacgacaagctactcccaggtgtttatctctgtgggtataattctgaagactcatatggggcaacatcgtacctggtaattcatccacaaggaaacatactgattgacagcccaaggtatactccaaagctggccaacaatattgaaaagcttggtggagcgcgctacatgtttttgacccacattgatgacgtagcagatcacaggaagtgggctgagcagctaaaatgtgaaagaataatacattcaggagatgtaaggattgcatctctcgctatattcttctattttacatgatagaatggcaaaatttctgataaatcttaatcgcaaaccggccccatgtacaatcctttttggaactctgctctcatattgattagcaaggcctcatcctgaagagtgacaatcacacactgcccatgcatgatgcttctactttaatgcatgtacttctgctttaattaatacatcattgcagtatgggcactaataaagcatctgatattcatatatcggttttcaagctcggtttccctcataagccaggtcaatcctattctgtttaattgaaaggcagagctcctgccggtgtgttaaaaaaagcatctgacaatccatatttcttcaaatggaggaaatttccataagaaataaacttacaacattggaatagttagcaagcattcatcgcattcatgatgtaggttctattatccctgcgtgtctcccagtgaactctgctctttgaaacatgtcctgatggtatttactgcagtaagtaaccattctgacgcaggtggaggaggctaccgcagatgttgagtggaaacttgaaggaaatggtccatggaacttaggaacagattttgaacttattacttaaaaataaatatctaggcgagaattctctttctcaagtttctagaagacagggggattctcaattctggtcgggcctaatgaatattaaggaccagctccttagaggggggcacttcaaagtgggaaatggtcaagctaccagattctggaaggacaaatgggtaaccagtcgacctcttagttattttcagatgtactcactggttaagattctggagactgctacaaaaggaggaatcgcaacaacaaatcctcattgcttcgcaagttttggaagtggtggcgatggaagtcttcgcaaaccatggatggcgctcaaattcaagaattgaggctcagtgtgcttgtacttcaaaccgctaaaggtgctgttcactggagaccatgttgcaaagtcagaagaatcagacgatctgaacctctttctgatgtacagcaagcagtcagtgagccttcagctggaaagcatcaggaagctactggagctagagttcgagtggcttttacctggacatggctatcgaatcaagtacaaagatgtgcgtgccaagaatgtagccatggagtccctcctagctaattacacaagctaggagcctatgagcatcttacttgagttagtgctcgcaaataagcattccaggaggctgaatgttgatgctatgtttccagagaatagtgtgcatgatgctcatcagctcttgaatgtgcatttgttaccagagactgtaccttgtgctgcacaccaagcaagtgaatgaatcaagcatacatgactcggcccaatgaatgctttttccagaaatcttgcaagaccatatgattgatttgttatatgcatgatgatatattcgac

SEQ ID NO: 40769 - DNA, 3379 bp, Zea Mays
gttactggtgggaagcgccgcagctccacctcgtccggtccggtgtggtgtggtggactgggtgggtgtctctggcggtggtcgccgatgctgaccccctcggccggcataccgccgccctccctctccgcagctagcagcccctccacgtcctactctctcctctaccttccccgacgatgccgacgccttcccgtcccccgagcctcctccagctttgcccccaagcgctcggcgccggtccccaccaccaccctcccgcccgaggccccctccacctccgccgctgtcgaggcgccggcgcccttctcggtcacggccccggggacctaccggggaggggaggacccgctcgtctccaagctccgcacccagctcggcgtcatccacccgctcccggcgccccccatcagccgctccgtcgtcggcctcttcgccctcttcttcttcgtcggcgccgccttcgacaagctctggacgctgcggaagcgccgtcgcgccgagcgcgagctcaaggtcaacggctcctggccgcaggtgcccaccccgagcttctccctcttcctcgagaaggacctgcagcgcaaggagtccgtcgagtgggtcaacatggtgctcggcaagctctggaaggtctaccgcaccggcatcgagaactggatcgtcggcctgctccagcccgtcatcgacaacctccacaagcccgattacgtcaacagggtcgaaatcaggcagttctacctcggcgaggagcccctctccgtcaggaacgtcgagcgccgcacctcaaggcgggccaacgacctgcagtaccagattggcatccgctatgccggtggagcacgcatggcattggcactctacttgaagttcaccaaagtaccggtcgtcgtgccggtctgggttcgagattttgatatcgatggggagttgtgggttaaactaaggctcataccaacagaaccgtgggtgggagccgtatcttgggcttttgtgtcccttcccaaggttaagtttgagctttcgctgttccggctattcaatcttatggcgattcctgttctgtctatgtaagcatgtttgtctttaaacgttatcactgttcaatgctgtgcattgtgctggtccaacatttattcttagtaatcaaatgttccctacaactcgcagttactgttggtgcatttattcttatcacagttgctatttaggcttttttttttgcaactacaagattattgttgttacacctgtccccatctttgatcctcctaacatggttattctaggtcatgcttggttgcttaattggatatcacctagttcctttaatgaatacgactcatggattccttgaaatatctctaaggatttatggttaaaacatatagctcatatgaaattgcatgcctgcctacaacttcaatgtagttaactgatatacatgtgatgtagataatattcagtattttgtttgtatcatgtatcaggaagtccgcggttgttcctaaatgcaatgttctttggaacaactcttgtttgaacaattttgtatgcttgtatttcacatagaaaggtcttgttcacatctagccatgacctgataaattacaatcaccaggtttctcacagaacttctgacagaagatttgccacgtctctttgtgcggcccaaaaagattgtccttgattttcaaaaggggagagctatgggacctgtttcaggaagtgttgcaagtgatataattcaaaatgttgcaactgacctgatccaagaggggaataaggactttgttggagagctatcagtgacactagttgatgctagaaagcttagctttgtcttgtttggcaagacagatccttatgttgtcatgattattgatgatcaagtaataaagagcaagaagaacagtcaaacaactgtgattggactaccgggagaaccaatttggaatcaagtaaagcttcaactctctgaacacgtgtgttttctgaagacatatttcatgcacgatatcatgcttatagatacaacatcaaacaggatttccatatgcttgtcgcaaatcctcgcaaacagaagttgaccattcaagtgaaggattcaattggtctaactgacatcactattggcaccggagaggtggagctagggtcacttaaagatacagtacctacggacaaaatcgtgactctatatggaggatggggtttgtttgggaagcgagaggctggggaagttctacttcggctgacatacaaggcatatgtcgaggatgaagaggaagaagacgaggcggtgagaagcgagattggtgcgggttacgcctcagacgaggatgtgctggactacgttagtggcatgagcaaggggactgatttcgtgggtaaagaaagggaaactttcatggatcttctcgccgcgctgctggtgagcgaggagttccaaggcatagtgtcatccgaaacaggaagctcgtcaagagaaggtgagcaggcaggcagtggaccagaaggcacagacagcgtcactgtccctactagcgctgcggcggctgatacggaggcatccaccgtgccaaacagctccacagatacggctctggtgtggctggcggccataacgagtgtgatggtgctggtgtcctccaacctcggtggctcaggctacttcaacccgtgaccgtgagtgaaggcaacactggctgtaacttgtaagggtgacaacaagagagttctcttcttgttcttttttttttcttttcttttggaaggctagtgaagagaggcaactgtgtatattcatttttgctgtcacctccttccgatttgctgaacatggaccaggatttctcctgctcgcgtcgcggcaggggtcattgccatcggttactgtttccaaggcaaatgcgattgtagttgtatcgttaaaaaatataccaagaaaatttaaggctgccttgttaggcatcagcttatgattatgacgagctgtttgaagtacttttttttttggctaaacaggcctttttgcgaatagctaatcattctctcacataggaataagaacgtgatgagatcaagtttaaaaaaacattttttgcagttttaactcacacttgtggatcctatataatatgttttaatgaactcatgagatttcgtgagaccataaattctacatgtagaactgttttgtcaaatactgtaacaaaagaggtttaatttcattggtaaagctgtttgtaggagtgaagctaacaaaacaactccataataaaattaaacagaacttcatattgttccagtaaaaaaatgtaatggaactttatatgttccaacaaaaaaattgcaattcgttttttttattgataat

SEQ ID NO: 40770 - DNA, 2512 bp, Zea Mays
gttactggtgggaagcgccgcagctccacctcgtccggtccggtgtggtgtggtggactgggtgggtgtctctggcggtggtcgccgatgctgaccccctcggccggcataccgccgccctccctctccgcagctagcagcccctccacgtcctactctctcctctaccttccccgacgatgccgacgccttcccgtcccccgagcctcctccagctttgcccccaagcgctcggcgccggtccccaccaccaccctcccgcccgaggccccctccacctccgccgctgtcgaggcgccggcgcccttctcggtcacggccccggggacctaccggggaggggaggacccgctcgtctccaagctccgcacccagctcggcgtcatccacccgctcccggcgccccccatcagccgctccgtcgtcggcctcttcgccctcttcttcttcgtcggcgccgccttcgacaagctctggacgctgcggaagcgccgtcgcgccgagcgcgagctcaaggtcaacggctcctggccgcaggtgcccaccccgagcttctccctcttcctcgagaaggacctgcagcgcaaggagtccgtcgagtgggtcaacatggtgctcggcaagctctggaaggtctaccgcaccggcatcgagaactggatcgtcggcctgctccagcccgtcatcgacaacctccacaagcccgattacgtcaacagggtcgaaatcaggcagttctacctcggcgaggagcccctctccgtcaggaacgtcgagcgccgcacctcaaggcgggccaacgacctgcagtaccagattggcatccgctatgccggtggagcacgcatggcattggcactctacttgaagttcaccaaagtaccggtcgtcgtgccggtctgggttcgagattttgatatcgatggggagttgtgggttaaactaaggctcataccaacagaaccgtgggtgggagccgtatcttgggcttttgtgtcccttcccaaggttaagtttgagctttcgctgttccggctattcaatcttatggcgattcctgttctgtctatgcaagacagatccttatgttgtcatgattattgatgatcaagtaataaagagcaagaagaacagtcaaacaactgtgattggactaccgggagaaccaatttggaatcaagatttccatatgcttgtcgcaaatcctcgcaaacagaagttgaccattcaagtgaaggattcaattggtctaactgacatcactattggcaccggagaggtggagctagggtcacttaaagatacagtacctacggacaaaatcgtgactctatatggaggatggggtttgtttgggaagcgagaggctggggaagttctacttcggctgacatacaaggcatatgtcgaggatgaagaggaagaagacgaggcggtgagaagcgagattggtgcgggttacgcctcagacgaggatgtgctggactacgttagtggcatgagcaaggggactgatttcgtgggtaaagaaagggaaactttcatggatcttctcgccgcgctgctggtgagcgaggagttccaaggcatagtgtcatccgaaacaggaagctcgtcaagagaaggtgagcaggcaggcagtggaccagaaggcacagacagcgtcactgtccctactagcgctgcggcggctgatacggaggcatccaccgtgccaaacagctccacagatacggctctggtgtggctggcggccataacgagtgtgatggtgctggtgtcctccaacctcggtggctcaggctacttcaacccgtgaccgtgagtgaaggcaacactggctgtaacttgtaagggtgacaacaagagagttctcttcttgttcttttttttttcttttcttttggaaggctagtgaagagaggcaactgtgtatattcatttttgctgtcacctccttccgatttgctgaacatggaccaggatttctcctgctcgcgtcgcggcaggggtcattgccatcggttactgtttccaaggcaaatgcgattgtagttgtatcgttaaaaaatataccaagaaaatttaaggctgccttgttaggcatcagcttatgattatgacgagctgtttgaagtacttttttttttggctaaacaggcctttttgcgaatagctaatcattctctcacataggaataagaacgtgatgagatcaagtttaaaaaaacattttttgcagttttaactcacacttgtggatcctatataatatgttttaatgaactcatgagatttcgtgagaccataaattctacatgtagaactgttttgtcaaatactgtaacaaaagaggtttaatttcattggtaaagctgtttgtaggagtgaagctaacaaaacaactccataataaaattaaacagaacttcatattgttccagtaaaaaaatgtaatggaactttatatgttccaacaaaaaaattgcaattcgttttttttattgataat

SEQ ID NO: 40771 - DNA, 1650 bp, Zea Mays
ctaggttcggcaaggtttgttttaatcctgtccaaagtagcatagcatctttttcagctggctatatttgctaaggaattggttgaaaggttaatatctcgactgaaagaagcacatatctgagtggtactacccttaagtatggtagctcttagttcagccaaaattatgcgataaaaaatacctgtacaagctggataaagcagaagcaagacagatccttatgttgtcatgattattgatgatcaagtaataaagagcaagaagaacagtcaaacaactgtgattggactaccgggagaaccaatttggaatcaagatttccatatgcttgtcgcaaatcctcgcaaacagaagttgaccattcaagtgaaggattcaattggtctaactgacatcactattggcaccggagaggtggagctagggtcacttaaagatacagtacctacggacaaaatcgtgactctatatggaggatggggtttgtttgggaagcgagaggctggggaagttctacttcggctgacatacaaggcatatgtcgaggatgaagaggaagaagacgaggcggtgagaagcgagattggtgcgggttacgcctcagacgaggatgtgctggactacgttagtggcatgagcaaggggactgatttcgtgggtaaagaaagggaaactttcatggatcttctcgccgcgctgctggtgagcgaggagttccaaggcatagtgtcatccgaaacaggaagctcgtcaagagaaggtgagcaggcaggcagtggaccagaaggcacagacagcgtcactgtccctactagcgctgcggcggctgatacggaggcatccaccgtgccaaacagctccacagatacggctctggtgtggctggcggccataacgagtgtgatggtgctggtgtcctccaacctcggtggctcaggctacttcaacccgtgaccgtgagtgaaggcaacactggctgtaacttgtaagggtgacaacaagagagttctcttcttgttcttttttttttcttttcttttggaaggctagtgaagagaggcaactgtgtatattcatttttgctgtcacctccttccgatttgctgaacatggaccaggatttctcctgctcgcgtcgcggcaggggtcattgccatcggttactgtttccaaggcaaatgcgattgtagttgtatcgttaaaaaatataccaagaaaatttaaggctgccttgttaggcatcagcttatgattatgacgagctgtttgaagtacttttttttttggctaaacaggcctttttgcgaatagctaatcattctctcacataggaataagaacgtgatgagatcaagtttaaaaaaacattttttgcagttttaactcacacttgtggatcctatataatatgttttaatgaactcatgagatttcgtgagaccataaattctacatgtagaactgttttgtcaaatactgtaacaaaagaggtttaatttcattggtaaagctgtttgtaggagtgaagctaacaaaacaactccataataaaattaaacagaacttcatattgttccagtaaaaaaatgtaatggaactttatatgttccaacaaaaaaattgcaattcgttttttttattgataat

SEQ ID NO: 40772 - DNA, 2220 bp, Zea Mays
ctgcacatcactgatctgagagttttgctcgcatcgcagtcgcaggggtcgtcttcttctccgatgatatttgctcacgtaccactgaacccagacggactcttgtaaccaaatgtttcattgatggtcaaaaagcccatcagaaacagacataaacatttgggccgggccctccctttgcctctccctccctccataggccctagcccatagccccgtcgtcgcaatcgcagtcgccacccgccgccgttccgccggcaagccgtccgtctccgccgcccgccccatccaggagaagcctgccaccagaacattcaactggccttcgttggaaatccgtccgttccccacaactgaactgacaggccacccatggcgctgctccgcgccgccgtatccgagctccgccgccggggccgcggggctcttacccctctcccggcgctgtcatctctcctctcctcgctgtctccccggagcccagcctccacccgccccgagcctaataacccccacgccgaccggcgtcacgtcatcgcgctccgccggtgcccgccgctcccggcgtcggccgtcctcgcccccgagctgctccacgccaggggtctcctcccgaggcactggtcgcacgcctcaccgctctccacctcctcctcctcttccagacccgcggacaaggcgcagctcacgtgggtggacaagtggatcccggaggcggcgcggccgtacgccatgctcgcccgcctcgacaaacccattgggacctggctcctcgcctggccctgcatgtgacctttgcttcacaggtcgatcacaatagcagcaatgccaggggatttgccagacttgaaaatgctggcactcttcggatgtggagctgtccttctcaggggggctggttgcacggtgaatgatcttctggatcgcgacattgataataaggttgagcgcaccagaagtaggccttttgcctcaggagtgcttactcctttacagggagtgggcttccttggaattcagcttctattgggactgggcattcttctacaattgaataactacagtcgtattctgggggcgtcttcacttgttctggtcttctcgtatcccctgatgaagaggttcacattttggagtgagggcttgtatttcttttggtgcattaataacagcctcaggcttatcttggcctgacattcaactggggagctttactagggtgggctgctattaaggaaagcatagaccctgcaatcatccttccattgtatacagctggtatttgttggacgctggtgtatgatactatatatgcgcatcaggacaaagaagatgacctgaaagtaggagtcaagtccacagcattaagatttggagatttgaccaaatactggatcagtggctttggcgcggcatgcgtcggcagcttagcactcagtggttacaatgctgaccttgggtggccctactatccattcatagcagctgcagctgcccagttagcgtggcaggtttcgaccgtggatctgtctagccgctcagattgcaacaagaagttcgtgtccaacaagtggtttggagctttggtatttagtgggattctatttgggcgtcttgtatcatgatggttagctgatgaagcgtcatgtgcttgcatggtgggtccagtggaacctaagcaatattatgatgagatgctacaaacttttgtgtctgggctagcaaatgcggcgtggtacaggagtggagtggactttgtaagctgcttgatctttcaccgtcatcaaaccttggctatttaacgagcatatcaatcaatcatggtggtggtctgatgtaggacatgtgttacgatttccctagcagcttgctccttctcatcttttatttcaaatcttactgtgagtgcagctacggtacgtgttttgcacgatctattgactatagccttagggcatatacttgttttttttattacttctgtcaccatgagtggaggcaaaacactgctgtgttgttacataaaaacagacacacgtagatatttaagtgttaaatatgacatacggcttcttgcagaagcactcgttgccgatacaccgacgtgttcttttatttggctgagaacatactgatgctttcgttttggactgaacgcattttggaatcagacagcagcaaccatagcgtggtttggctaccttcagttttgcatctgcc

SEQ ID NO: 40773 - DNA, 2099 bp, Zea Mays
cttcttctccgatgatatttgctcacgtaccactgaacccagacggactcttgtaaccaaatgtttcattgatggtcaaaaagcccatcagaaacagacataaacatttgggccgggccctccctttgcctctccctccctccataggccctagcccatagccccgtcgtcgcaatcgcagtcgccacccgccgccgttccgccggcaagccgtccgtctccgccgcccgccccatccaggagaagcctgccaccagaacattcaactggccttcgttggaaatccgtccgttccccacaactgaactgacaggccacccatggcgctgctccgcgccgccgtatccgagctccgccgccggggccgcggggctcttacccctctcccggcgctgtcatctctcctctcctcgctgtctccccggagcccagcctccacccgccccgagcctaataacccccacgccgaccggcgtcacgtcatcgcgctccgccggtgcccgccgctcccggcgtcggccgtcctcgcccccgagctgctccacgccaggggtctcctcccgaggcactggtcgcacgcctcaccgctctccacctcctcctcctcttccagacccgcggacaaggcgcagctcacgtgggtggacaagtggatcccggaggcggcgcggccgtacgccatgctcgcccgcctcgacaaacccattgggacctggctcctcgcctggccctgcatgtggtcgatcacaatagcagcaatgccaggggatttgccagacttgaaaatgctggcactcttcggatgtggagctgtccttctcaggggggctggttgcacggtgaatgatcttctggatcgcgacattgataataagggagtgggcttccttggaattcagcttctattgggactgggcattcttctacaattgaataactacagtcgtattctgggggcgtcttcacttgttctggtcttctcgtatcccctgatgaagaggttcacattttggagtgagggcttgtatttcttttggtgcattaataacagcctcaggcttatcttggcctgacattcaactggggagctttactagggtgggctgctattaaggaaagcatagaccctgcaatcatccttccattgtatacagctggtatttgttggacgctggtgtatgatactatatatgcgcatcaggacaaagaagatgacctgaaagtaggagtcaagtccacagcattaagatttggagatttgaccaaatactggatcagtggctttggcgcggcatgcgtcggcagcttagcactcagtggttacaatgctgaccttgggtggccctactatccattcatagcagctgcagctgcccagttagcgtggcaggtttcgaccgtggatctgtctagccgctcagattgcaacaagaagttcgtgtccaacaagtggtttggagctttggtatttagtgggattctatttgggcgtcttgtatcatgatggttagctgatgaagcgtcatgtgcttgcatggtgggtccagtggaacctaagcaatattatgatgagatgctacaaacttttgtgtctgggctagcaaatgcggcgtggtacaggagtggagtggactttgtaagctgcttgatctttcaccgtcatcaaaccttggctatttaacgagcatatcaatcaatcatggtggtggtctgatgtaggacatgtgttacgatttccctagcagcttgctccttctcatcttttatttcaaatcttactgtgagtgcagctacggtacgtgttttgcacgatctattgactatagccttagggcatatacttgttttttttattacttctgtcaccatgagtggaggcaaaacactgctgtgttgttacataaaaacagacacacgtagatatttaagtgttaaatatgacatacggcttcttgcagaagcactcgttgccgatacaccgacgtgttcttttatttggctgagaacatactgatgctttcgttttggactgaacgcattttggaatcagacagcagcaaccatagcgtggtttggctaccttcagttttgcatctgcc

SEQ ID NO: 40774 - DNA, 2098 bp, Zea Mays
atcagaaacagacataaacatttgggccgggccctccctttgcctctccctccctccataggccctagcccatagccccgtcgtcgcaatcgcagtcgccacccgccgccgttccgccggcaagccgtccgtctccgccgcccgccccatccaggagaagcctgccaccagaacattcaactggccttcgttggaaatccgtccgttccccacaactgaactgacaggccacccatggcgctgctccgcgccgccgtatccgagctccgccgccggggccgcggggctcttacccctctcccggcgctgtcatctctcctctcctcgctgtctccccggagcccagcctccacccgccccgagcctaataacccccacgccgaccggcgtcacgtcatcgcgctccgccggtgcccgccgctcccggcgtcggccgtcctcgcccccgagctgctccacgccaggggtctcctcccgaggcactggtcgcacgcctcaccgctctccacctcctcctcctcttccagacccgcggacaaggcgcagctcacgtgggtggacaagtggatcccggaggcggcgcggccgtacgccatgctcgcccgcctcgacaaacccattgggacctggctcctcgcctggccctgcatgtgacctttgcttcacaggtcgatcacaatagcagcaatgccaggggatttgccagacttgaaaatgctggcactcttcggatgtggagctgtccttctcaggggggctggttgcacggtgaatgatcttctggatcgcgacattgataataagtcgtattctgggggcgtcttcacttgttctggtcttctcgtatcccctgatgaagaggttcacattttgggtatgtgttatatttgtgtatatggaggcttatatagaatggtatattattacttacagagtgagggcttgtatttcttttggtgcattaataacagcctcaggcttatcttggcctgacattcaactggggagctttactagggtgggctgctattaaggaaagcatagaccctgcaatcatccttccattgtatacagctggtatttgttggacgctggtgtatgatactatatatgcgcatcaggtgtttcgctatccctactttcatattaatccttgatgaagtggccatttcatgttgtcgcggtggtcttatacttgcatatctccatgcatctcaggacaaagaagatgacctgaaagtaggagtcaagtccacagcattaagatttggagatttgaccaaatactggatcagtggctttggcgcggcatgcgtcggcagcttagcactcagtgggtggccctactatccattcatagcagctgcagctgcccagttagcgtggcaggtttcgaccgtggatctgtctagccgctcagattgcaacaagaagttcgtgtccaacaagtggtttggagctttggtatttagtgggattctatttgggcgtcttgtatcatgatggttagctgatgaagcgtcatgtgcttgcatggtgggtccagtggaacctaagcaatattatgatgagatgctacaaacttttgtgtctgggctagcaaatgcggcgtggtacaggagtggagtggactttgtaagctgcttgatctttcaccgtcatcaaaccttggctatttaacgagcatatcaatcaatcatggtggtggtctgatgtaggacatgtgttacgatttccctagcagcttgctccttctcatcttttatttcaaatcttactgtgagtgcagctacggtacgtgttttgcacgatctattgactatagccttagggcatatacttgttttttttattacttctgtcaccatgagtggaggcaaaacactgctgtgttgttacataaaaacagacacacgtagatatttaagtgttaaatatgacatacggcttcttgcagaagcactcgttgccgatacaccgacgtgttcttttatttggctgagaacatactgatgctttcgttttggactgaacgcattttggaatcagacagcagcaaccatagcgtggtttggctaccttcagttttgcatctgcc

SEQ ID NO: 40775 - DNA, 2654 bp, Zea Mays
atcagaaacagacataaacatttgggccgggccctccctttgcctctccctccctccataggccctagcccatagccccgtcgtcgcaatcgcagtcgccacccgccgccgttccgccggcaagccgtccgtctccgccgcccgccccatccaggagaagcctgccaccagaacattcaactggccttctatccgagctccgccgccggggccgcggggctcttacccctctcccggcgctgtcatctctcctctcctcgctgtctccccggagcccagcctccacccgccccgagcctaataacccccacgccgaccggcgtcacgtcatcgcgctccgccggtgcccgccgctcccggcgtcggccgtcctcgcccccgagctgctccacgccaggggtctcctcccgaggcactggtcgcacgcctcaccgctctccacctcctcctcctcttccagacccgcggacaaggcgcagctcacgtgggtggacaagtggatcccggaggcggcgcggccgtacgccatgctcgcccgcctcgacaaacccattgggacctggctcctcgcctggccctgcatgtgacctttgcttcacaggtcgatcacaatagcagcaatgccaggggatttgccagacttgaaaatgctggcactcttcggatgtggagctgtccttctcaggggggctggttgcacggtgaatgatcttctggatcgcgacattgataataaggttgagcgcaccagaagtaggccttttgcctcaggagtgcttactcctttacagggagtgggcttccttggaattcagcttctattgggactgggcattcttctacaattgaataactacaggtatttagactcaggtgcttctttggctgatgcggctgacgctattatatgactatccatgttccctcaaccacttatcagtgagtgtccacactccacagcaggacattacgatcaaaatatttatgtccagcaatttgatttgatgagagccgtactctacttcccgtgttctttatatcttgtttctgtgataaactcactgctacctccgatcacaagtataaggacaccaccagcatgctcttcagaatggcatttcgactagcaacatctataaaaatatattgagtgatatataaggaattttttccatcatcaatctagtcatgtcaatcttgtattttcagtctgtataaaactttagataatagacaaagtcataatatgtgcctgttaatactttcttatctttgcactacctgaaagtgaaaacaaatgtatattgattataagggcagtttatatgtaatttttggcattttcctgtgtgtagtcgtattctgggggcgtcttcacttgttctggtcttctcgtatcccctgatgaagaggttcacattttggcctcaggcttatcttggcctgacattcaactggggagctttactagggtgggctgctattaaggaaagcatagaccctgcaatcatccttccattgtatacagctggtatttgttggacgctggtgtatgatactatatatgcgcatcaggtgtttcgctatccctactttcatattaatccttgatgaagtggccatttcatgttgtcgcggtggtcttatacttgcatatctccatgcatctcaggacaaagaagatgacctgaaagtaggagtcaagtccacagcattaagatttggagatttgaccaaatactggatcagtggctttggcgcggcatgcgtcggcagcttagcactcagtggttacaatgctgaccttggttggtgtttagtgtgatgcttgagcgaagaatggtattgtttttacttgatattgactccagacctgaaatcatgttggacagggtggccctactatccattcatagcagctgcagctgcccagttagcgtggcaggtttcgaccgtggatctgtctagccgctcagattgcaacaagaagttcgtgtccaacaagtggtttggagctttggtatttagtgggattctatttgggcgtcttgtatcatgatggttagctgatgaagcgtcatgtgcttgcatggtgggtccagtggaacctaagcaatattatgatgagatgctacaaacttttgtgtctgggctagcaaatgcggcgtggtacaggagtggagtggactttgtaagctgcttgatctttcaccgtcatcaaaccttggctatttaacgagcatatcaatcaatcatggtggtggtctgatgtaggacatgtgttacgatttccctagcagcttgctccttctcatcttttatttcaaatcttactgtgagtgcagctacggtacgtgttttgcacgatctattgactatagccttagggcatatacttgttttttttattacttctgtcaccatgagtggaggcaaaacactgctgtgttgttacataaaaacagacacacgtagatatttaagtgttaaatatgacatacggcttcttgcagaagcactcgttgccgatacaccgacgtgttcttttatttggctgagaacatactgatgctttcgttttggactgaacgcattttggaatcagacagcagcaaccatagcgtggtttggctaccttcagttttgcatctgcc

SEQ ID NO: 40776 - DNA, 2757 bp, Zea Mays
ctgtgttctctgctgctgcgaaggtagaggctgcttggcgagtcaaaaatacatttggtcatcttccctgcttggagttggagttgagacgccgacgcggcgcccgagaagaatttgcggatggattcgctgcgcagcgtgttggagtcgattcaggcgatgcagatccgccccgtggtcgcccaaatcatcaccctagggatgatcctaacttcggcattgatcctatggaaaggattggtcgtcgtaacagggagtgagtcgccggttgtggtggttctatctggaagcatggagcctgggtttcgaaagggtgatgtcctgtttctgcacatgaataaggaccctgtccgcacaggagacatagttgttttcaatgtcgagggccgtgatattccaattgtccatcgtgtgatcaaggttcatgagcgccatgatacggtggactctgacattctcacgaaaggtgacaataatcccggggatgaccgagtcctgtacgcacatgggcagctttggctgcagcgacagcacatcattggacgggctgttggctatctgccttatgctgggtggcttacaatcgtcatgacggagaaaccagtcctcaaggaagggcatgaggtacgaggccatgtgtgcgcgggactgcatggcatgggcaaggaggggatacgagcggacactgtcacatggaaccccttgatccatggcctgttcaaggatgccagggtgaaggaggcggctcagctcttcacggagatggtagcgacacaggtgatgccggacaatgtgacctagaccacactgattgatgggcagcagttcaatcagttcacttacaaggctctcatccatggattctgcaagccaaggagctagatgaagccaaggaaaccttctttcacatggttgatgaaggtgctttgaatgcatcttatatcttatggttccagttagtaaaaaaagcgacctagtgctggagattcccatatgagtggagtggggtctgtctgatatggttccagttagtaccactagctaattgcaaggaccgcatttggcagttgaaatggcactaagatcattgtgtcgctatcgtaggcaaccagtttgcaatctcactgattatcttgcgagaatatcataaactatatcttctgatgacgtggttgcttttgctgtatgctgggttttcacccaattatatcatattttcatggcttgtcgatggtttctgcaagaagaacaatgcagatgcaatgctagccacccctgatgaacttacggaaagaggccttccaccagataaagcggtatatagatatctgattccaaggctttgcagaaaagggctggttgatcaggcacaataagtgtttgaccagatgcagggcaaaagccttagttggtggcagccttgtattcaccacacttgcatacacgtatctgacagaaggaaagcaagttattgcttccaatatcttggatgatatggcaaataatcaatacataacgcccaagttttacaaatgtctgtgtacctcttatgctgattgaaggaaacccttaatatgatgtgggtttgcggctttgcgctattttgagaggcttaatcacaaagagtgtacaaactgatgcaccaagcgaggctgggaccaatgaagcttgcagttgagaatggggtatgtgctcctgtttcaaggccaggctatctaggggcaggggctacacctgatacttgagtacaattggatcagtcttcgttggtgttatcgctgaataccttgatctttgagatgtattatctgggattgtgttgcagccaggtgtggaagatattcatcccttgcggctttcagctttgggtcagtattcagctccgaagaaagtattcaagccaaatgagaatatgaaaaacttctgtcaaggctctgtccaaagcgtataaggaagtctattggtgccaggcaaatatcgcttgattctttgggtggtgttggtggtacagaaactgtgctggactgcagaccgacttgctcaatgaaatttgccgcatcggggtgtgctgtcatcactgtgatcaggtcgatgagacagctgatcacctgctcactaattgtgcctatacggttctgttgaagatagatcctctgattactggtggagcacagacagttagtggactggtgcagaaaggcctcaattcttaagcatcagaatctcttatgttttcaaattcaatggtgctgcccagacatggcaggtgccttgctgcttgctgatgaggagctgcagctttggggaatggctgggggctctagggcttagactgtctccagcaacgttctctatatacattctctatatccgtcttttacagtgttctctaaaagatttcatctcctatatctactttctctccaacaacgtcctctaaatcacgtcctctatatgtaaatacctatattaaagacatttttaattttttaatttttgtacatacgtatttgtcatactctcaaatgtattgtacatattttagttttattaaagcggttgtttaaagtattcaaatagatagagaatcgtttagagaaactctacatatagaggatccagcagcgttctctaaatttagaggaccgtttagaggatgttgctggatggagtagaggacgtcctcgtcctctaaatttagggtacaggaccctttagagctccttgttggagctagtcttaccctagtacctaagg

SEQ ID NO: 40777 - DNA, 2191 bp, Zea Mays
ccagatgatggccactgcacgcagagtgttcgacaaaatggccagggaagggcatgaggtacgaggccatgtgtgcgcgggactgcatggcatgggcaaggaggggatacgagcggacactgtcacatggaaccccttgatccatggcctgttcaaggatgccagggtgaaggaggcggctcagctcttcacggagatggtagcgacacaggtgatgccggacaatgtgacctagaccacactgattgatgggcagcagttcaatcagttcacttacaaggctctcatccatggattctgcaagccaaggagctagatgaagccaaggaaaccttctttcacatggttgatgaaggtgctttgaatgcatcttatatcttatggttccagttagtaaaaaaagcgacctagtgctggagattcccatatgagtggagtggggtctgtctgatatggttccagttagtaccactagctaattgcaaggaccgcatttggcagttgaaatggcactaagatcattgtgtcgctatcgtaggcaaccagtttgcaatctcactgattatcttgcgagaatatcataaactatatcttctgatgacgtggttgcttttgctgtatgctgggttttcacccaattatatcatattttcatggcttgtcgatggtttctgcaagaagaacaatgcagatgcaatgctagccacccctgatgaacttacggaaagaggccttccaccagataaagcggtatatagatatctgattccaaggctttgcagaaaagggctggttgatcaggcacaataagtgtttgaccagatgcagggcaaaagccttagttggtggcagccttgtattcaccacacttgcatacacgtatctgacagaaggaaagcaagttattgcttccaatatcttggatgatatggcaaataatcaatacataacgcccaagttttacaaatgtctgtgtacctcttatgctgattgaaggaaacccttaatatgatgtgggtttgcggctttgcgctattttgagaggcttaatcacaaagagtgtacaaactgatgcaccaagcgaggctgggaccaatgaagcttgcagttgagaatggggtatgtgctcctgtttcaaggccaggctatctaggggcaggggctacacctgatacttgagtacaattggatcagtcttcgttggtgttatcgctgaataccttgatctttgagatgtattatctgggattgtgttgcagccaggtgtggaagatattcatcccttgcggctttcagctttgggtcagtattcagctccgaagaaagtattcaagccaaatgagaatatgaaaaacttctgtcaaggctctgtccaaagcgtataaggaagtctattggtgccaggcaaatatcgcttgattctttgggtggtgttggtggtacagaaactgtgctggactgcagaccgacttgctcaatgaaatttgccgcatcggggtgtgctgtcatcactgtgatcaggtcgatgagacagctgatcacctgctcactaattgtgcctatacggttctgttgaagatagatcctctgattactggtggagcacagacagttagtggactggtgcagaaaggcctcaattcttaagcatcagaatctcttatgttttcaaattcaatggtgctgcccagacatggcaggtgccttgctgcttgctgatgaggagctgcagctttggggaatggctgggggctctagggcttagactgtctccagcaacgttctctatatacattctctatatccgtcttttacagtgttctctaaaagatttcatctcctatatctactttctctccaacaacgtcctctaaatcacgtcctctatatgtaaatacctatattaaagacatttttaattttttaatttttgtacatacgtatttgtcatactctcaaatgtattgtacatattttagttttattaaagcggttgtttaaagtattcaaatagatagagaatcgtttagagaaactctacatatagaggatccagcagcgttctctaaatttagaggaccgtttagaggatgttgctggatggagtagaggacgtcctcgtcctctaaatttagggtacaggaccctttagagctccttgttggagctagtcttaccctagtacctaagg

SEQ ID NO: 40778 - DNA, 399 bp, Zea Mays
caaaaattaggaaaataacaaagcacggttgggatggggatgggacgattctgatatgaatgattgaattgccgctcatcttacctgacagatcgtctactagctattgctgaggagaccttggcagagtttctgtcgaaagcaacaggaactgctgtcgattgggtgcaaatggttgggatgaagcttggtccggattccattggaatcatcgctgtttcgtacaattgcagtggcgtagcagcccaagcagatcaaggtctggttccagaaccgcaggttgttgcccatttcggagcatcatggtgtgtgatgtccctgtccatgaactacaagtttgaggagctggcgcagacccaccccgaggtcttgttcctctacgtggacgtcgacgatgtc

SEQ ID NO: 40779 - DNA, 1150 bp, Zea Mays
aaaggcctaggaggaagaagataagggtgcccgtttctctcctcgacgacgacattctcaactctgaaacggcgatgtcacggctactcccgcccgtgctctctcctttaccggcgttctcgctgccgccgccgcttcttcctcgcatccacatccgcacgtcggcggtgagaggcggtgcggcggagaacgcgatggcgtccgggacgacggcgagggagcggcgcctggtcaaggtgcgggaggagcgccgccgccgcgagtacgaccgggagcacacctaccccggatgggccaaggtactggagaacgcctgcagggatgatgaagagctccgcgccattcttggtgatagcatcggcaacccggagctcatgaagcaacggatccaggaaagggtgcgcaagaaaggcagggcccaattcaataaatccaagacaggctccattgttgcttttaaagtcagctttcgagactttaacccattgaattctttcatttggtttgagctctttggagaaccaacagatcgagatgttgacctgcttggtggtgtaaagtggcattgtacaatttcattggattctccttattcagaaaacaacatactgtcttgacgtgaagtgttctttacaggtagtccaagcttggtatgtcatgggaaggctaggagcttacaattcttcaaatttgcagctggccaactcaatgatggactacgacccttcatatgattctgaagaagcttccacagtaatgccatcatctttccatgatatcagtgatgttgagttccaagacaattgggccagggtttgggtggaccttggaacctcggattaccttggcttggatgtattactaaactgcttaacacagttgagctcagagcacttgggtatcaaacaagtggtttttggaggcaagaaaatgggtgactgggaagagggcatgacgagctctgattatggatacaagcacttcaagatatgataaatttacaggtgacaagcaacggtggtgatgcaaggctggccgagaaatttgatcaagactgcatgcatctcgatgtgcccttcacctatcaggacaaaggtgacatgatgcagaaaattgcagcaaagcacatggagatagagggaggagcaaa

SEQ ID NO: 40780 - DNA, 1743 bp, Zea Mays
gaagataagggtgcccgtttctctcctcgacgacgacattctcaactctgaaacggcgatgtcacggctactcccgcccgtgctctctcctttaccggcgttctcgctgccgccgccgcttcttcctcgcatccacatccgcacgtcggcggtgagaggcggtgcggcggagaacgcgatggcgtccgggacgacggcgagggagcggcgcctggtcaaggtgcgggaggagcgccgccgccgcgagtacgaccgggagcacacctaccccggatgggccaaggtactggagaacgcctgcagggatgatgaagagctccgcgccattcttggtgatagcatcggcaacccggagctcatgaagcaacggatccaggaaagggtgcgcaagaaaggcagggcccaattcaataaatccaagacaggctccattgttgcttttaaagtcagctttcgagactttaacccattgaattctttcatttggtttgagctctttggagaaccaacagatcgagatgttgacctgcttggtagtccaagcttggtatgtcatgggaaggctaggagcttacaattcttcaaatttgcagctggccaactcaatgatggactacgacccttcatatgattctgaagaagcttccacagtaatgccatcatctttccatgatatcagtgatgttgagttccaagacaattgggccagggtttgggtggaccttggaacctcggattaccttggcttggatgtattactaaactgcttaacacagttgagctcagagcacttgggtatcaaacaagtggtttttggaggcaagaaaatgggtgactgggaagagggcatgacgagctctgattatggatacaagcacttcaagatatgataaatttacaggtgacaagcaacggtggtgatgcaaggctggccgagaaatttgatcaagactgcatgcatctcgatgtgcccttgtatgtaaataaataaattgtcatgggttttattttatcgtcgtgatagcagtgaattttaactaacagctcaaggcaggctagcagaatagaaaaatataatatggatgcatgtcttgtttcagacacgtctgtttcttgatgatgatgatgataatgatgatgattcttgcaacgtcaggaaaacttgacgagtcaatcaggtgttttttttacgtattgattaggagaaagacgaagtaaacaaggtgtcacagttgatcacattcttaaacttgggaacaagtagcagacaaactaactagtagcatggtgaaaggcattggcacctgcatttttcatagtattccacaagctgatactaacatgaggtcacaagtacaccgctcatcccatccatgcatatttgccgccgccacacccacataatagatcagctctcgtggaaccctaaatgttgcacaactctacaaagaaaacatacaagttcagcctatacaccacttcccaaatcaacgaaacaagatgccgatccttgcatcctcgctagctactggtcctctccatgctgttggtcctagcattctctcgcatcttctccacgatgtgcctccctttctcttcgatggtccgcctcttctcctccagcttgtcccccatcctcttcccgaaatccatcatccgagctcgcctcccgctttttcgcttcgcgtcctctccaatgggtgatgctgacacctgcggctgctcccctgctggtatcaccgc

SEQ ID NO: 40781 - DNA, 713 bp, Zea Mays
ctcttcgactgactgccaaaggaaggcttgtgttgtgtttggctagggtttgctcgcgtctcctccttcccttggctgctgtcgtgccggtcggcggcgacagcaagggagggaacatgtcgaagaagaacaatcttgccaagaggaagaagcagtacgagttcgacctccaacgggagaaggaggccaaggagaagcaggccaagaagctgcaagccaagaaatccaagatgaagtaacgtgcagggccagacgccagccggcaccacatgtcagtgaccggccgacagatagatggtgctgaaaagaaacgtaaaggtggccaatttaaggtcggcaagaaaaaggtgaagacgaaactttcagccttagcaaaagccaaagccgcgcaagccatggaggtcgacaagtgactgcggagcacaagcatcatcaccttaagcgtcgagccagagttggaactctgaattctgtgcccacatgaatagctcccgtcgggtgcagctgcagctgcagcttgttgaacctttctttctaaaaagaatgtcattcttgcttttttaagggtaatcaagctctagttataggttttggtgataacgactatgatgttagagaactaatgagatttatggagctaaatgaaaaagagaaaaatacatgtgatttttgatgcttcaattactaaagaaggacgcgacaactgattaaag

SEQ ID NO: 40782 - DNA, 259 bp, Zea Mays
gccaaaggaaggcttgtgttgtgtttggctagggtttgctcgcgtctcctccttcccttggctgctgtcgtgccggtcggcggcgacagcaagggagggaacatgtcgaagaagaacaatcttgccaagaggaagaagcagtacgagttcgacctccaacgggagaaggaggccaaggagaagcaggccaagaagctgcaagccaagaaatccaagatgaagaactgtaatcctttggtagcattctgtgtttggtcct

SEQ ID NO: 40783 - DNA, 2233 bp, Zea Mays
ctcccctctctctcctcgaacacagacacggatacaccattgtacatgctcgctcttcctcttggagtcttgggaccgccccctcccctcttccgaggtccgagcctgatccctccttccttccgtcagcgcacatctctagggttttagcgccccatttccgcaacgccattcccgatcggatcgcccccttcccacccgccgccgaccagatcccggcgcgagtgctacccaaccctccggcgccgccacccttagtctcagagggtcggtctccaccgaaagcttcgcacaaatcccctccgtttgtcggtgccatttgttgcaaagattgtgttttcctcctcatccgtgcctcgcgttccatttctgccgtccccgaaaatgccaccgctttgttgagatctctcgtttctcgatctgatctcgcctcggtatggcgtgagagttcctaggggagggcaaaatcgtcggagttgagattcttgcgtccatttgctagtctcaataccgagcatccgatctcgaacagtgagacaaagtagcgacctttgtgccgttccttgtaactgagcttgcccccgcctgcgtatcggtgggtgacggcgagctctacggcgctgcccattcctatgaatggacgggagggagtccacggtggcgtcggggcccaacttctcatcgttctacacgcagcaccggggcatcggggcgccgggtgtccccggccactcggcggtgctccatgacccgccgcccgccgggtaccggcagcatcttgatgctgtctctgctgggtacgcattccagaccccgcaggttgggggttcccacattggacaggggtaccaccatgtcgaggcctcaccccatgtggcgcaatacagctccggtggcggcaccagctccggcggtgatatggacattggcatgggttcggctgtgtgcaccaatgttaagggggagctggggagcgggcctgcccaagatgagcaggtgaagaagaagcggggtaggccaaggaagtataagcctgatggggcggtgactctcgggttatcaccctcttcatcattaacacctcactcggccagcttggggatgggaaccatgattagtgctccaggttctggatttgggtcggagggatcaggggcttcaggcttgggtgcgccatcagagaagcgtggcagggggcggccacctggctctggaaagatgcaacagttggcttcgcttggaaagtggtttcttggctctgttggaactggttttactcctcatgtgattattattcagccaggagaggacgttgctgccagaataatggccttctcacaacaaggcccaagggcagtgtgcatcatttcagcaactggagctgtttctgcagcaacccttcaccaggattcagaatctggcagtgtggttacatatgagggtcggtttgagatcctgtgcctttctgggtcatacttggtggtagatgaaggtggcggcgcacggacccgaagtggagggctttgcatagctttgtgtggtcctgacaacagggttattggtgggagtgtaggtggagtcctgatggcagctggagcggttcagtggggagcttcatgtacggaggaggttcaaagaagaacaaggtgaaagccgagttggacgcggagcctgaggaggcgaacgccggcgaccaagaggtggcacttgcggagcacagcagcatggcccctcatcctgccatgagtggtggtggcgggtgggcatctggcatgatgaggcagatggagtcgagaactcccaacatcgatatcaactccatccgcgagtagtttgcctgtttggttgggtggatgaggaaggctcctcctccttggatgcacacagcacagcggcatgcatatgtttggttgtaggcgttgctatgttttaggactccagagtatattgtgatgtgatgttgtacttggatgttgttgtataagatcatgggaacgcttggtcgtgttattatgttaataaaaatatataatggatggtaagctactgtttggaagaagattaattttgaatctagttttgataggcccattttctttttttttactaacatctccctaatggtggcgtgagcatcgatagtccagaccaactccatctgacgcaacaagttagaactaatcgcaactctatacatttgacacaacaaattggaattgatcacagctccatc

SEQ ID NO: 40784 - DNA, 2014 bp, Zea Mays
cctctctctcctcgaacacagacacggatacaccattgtacatgctcgctcttcctcttggagtcttgggaccgccccctcccctcttccgaggtccgagcctgatccctccttccttccgtcagcgcacatctctagggttttagcgccccatttccgcaacgccattcccgatcggatcgcccccttcccacccgccgccgaccagatcccggcgcgagtgctacccaaccctccggcgccgccacccttagtctcagagggtcggtctccaccgaaagcttcgcacaaatcccctccgtttgtcggtgccatttgttgcaaagattgtgttttcctcctcatccgtgcctcgcgttccatttctgccgtccccgaaaatgccaccgctttgttgagatctctcgtttctcgatctgatctcgcctcggtatggcgtgagagttcctaggggagggcaaaatcgtcggagttgagattcttgcgtccatttgctagtctcaataccgagcatccgatctcgaacagtgagacaaagtagcgacctttgtgccgttccttgtaactgagcttgcccccgcctgcgtatcggtgggtgacggcgagctctacggcgctgcccattcctatgaatggacgggagggagtccacggtggcgtcggggcccaacttctcatcgttctacacgcagcaccggggcatcggggcgccgggtgtccccggccactcggcggtgctccatgacccgccgcccgccgggtaccggcagcatcttgatgctgtctctgctggctccggtggcggcaccagctccggcggtgatatggacattggcatgggttcggctgtgtgcaccaatgttaagggggagctggggagcgggcctgcccaagatgagcaggtgaagaagaagcggggtaggccaaggaagtataagcctgatggggcggtgactctcgggttatcaccctcttcatcattaacacctcactcggccagcttggggatgggaaccatgattagtgctccaggttctggatttgggtcggagggatcaggggcttcaggcttgggtgcgccatcagagaagcgtggcagggggcggccacctggctctggaaagatgcaacagttggcttcgcttggaaagtggtttcttggctctgttggaactggttttactcctcatgtgattattattcagccaggagagggtcggtttgagatcctgtgcctttctgggtcatacttggtggtagatgaaggtggcggcgcacggacccgaagtggagggctttgcatagctttgtgtggtcctgacaacagggttattggtgggagtgtaggtggagtcctgatggcagctggagcggttcaggtgatagtggggagcttcatgtacggaggaggttcaaagaagaacaaggtgaaagccgagttggacgcggagcctgaggaggcgaacgccggcgaccaagaggtggcacttgcggagcacagcagcatggcccctcatcctgccatgagtggtggtggcgggtgggcatctggcatgatgaggcagatggagtcgagaactcccaacatcgatatcaactccatccgcgagtagtttgcctgtttggttgggtggatgaggaaggctcctcctccttggatgcacacagcacagcggcatgcatatgtttggttgtaggcgttgctatgttttaggactccagagtatattgtgatgtgatgttgtacttggatgttgttgtataagatcatgggaacgcttggtcgtgttattatgttaataaaaatatataatggatggtaagctactgtttggaagaagattaattttgaatctagttttgataggcccattttctttttttttactaacatctccctaatggtggcgtgagcatcgatagtccagaccaactccatctgacgcaacaagttagaactaatcgcaactctatacatttgacacaacaaattggaattgatcacagctccatc

SEQ ID NO: 40785 - DNA, 9127 bp, Zea Mays
actccattcccctcgtcgccgaccaccacccaccatggcgggggcggcatctccgcctcaggccctacccccggccccgaccctccaggcctccttcctctgctccctcgcgctcgccttcctccgggccggccgcctctccgctgcctctcacgtcgtctcctcactccccgctccgcctcccgcccgcctcctccgccgcctcatccccgcgctcgcctcctcgggcctcgtcgccgccgcctcccgcttccgccccgtcccaggtgacccgctcaccctcaactccatcatcctctcctactgcagcctccacgcgctccggcccgcgcttagcctgctccgttcctcctcggggccccagccgcaggtcgcggccgacaccgtcagctacaacatcttcctcgctggcctctccgagcagggacacgggaggctcgcgccgcccgtgctctccgagatgtgcaagcgcggcgtgccctgggacggggtcaccatgagcacggcgctcgtggggctgagcaggaccggacttgtcggcgaggccgcggcgttggcggagatgctggtccgaggccgaggaattgatggcttgggtgtggtgggatggaatgctctcattgacggctactgtaaagtccaggacatggccgcagcattggcggtggtggagaggatgactacacaagggctgtcgcttgatgtggtggggtacaataccctggttgccgggtttttctactccggcgatgctgatgctgcatgggaggtagcggagaggatgaaggcggatggggtggagccgagtgtggtcacacacacgacgctcattggggagtattgtaagatgaagcggatcgaggaggcgttcactctgtacgagggtatggtcaggtcgggtgtgctgcctgatgtggtcacccttagtgctcttgttgatggcctatgcagggatggccggttctcagaggcatatgcacttttcagggagatggacaagattggagtcgctccaaaccatgtgacatattgtacatttatcgattcattagcgaaagtgcagagggtgaacgagtcactgggtctattgggagagatggtctcaaggggcgtggccatggatctggtcatgtatacaactgtgatggaccgtttagagctggcaatatcgatggcgcagagcagatgctgttgcaaatggaggagaaatccgttagccccaatgttgtcacattctcatcaatcctcaatggtcttgttaaaagaggatgcatcgccaaagcagctggctatatgaggaagatgaaggacagtggcattgctcctaatgttgttacttacggaacgcttatcgacggcttcttcaagtgccaggggcaagaagcagctcttgatgtgtaccgtgatatgttgcatgagggtgttgaggcaaacaactttattgttgactcactggtgaatggtttgagaaagaatgggaatatagaggaagctgaagcattatttaaagatatgggtgaacgtggtctgttgctagaccatgtcaactatgccaccttaatggatgggctttttaaaacaggaaacatgccagctgctcttaaggcttggcaagttcagtgaagcaaaatcttttttgaaagagatgagaaatacgggcttagaacctgatcaagcaacatataacactatgatttctgcacagtgtcgggaagggaatacctcaaaagctctaaagctactgaatgaaatgaagtggagttcaataaagcctaatctcatcacatatactacacttgttgtgggccttcttgaggctggggttgtggagaaggcaaaatatttactaaatgagatggcttctgctggattcactccaacccctctgacttatcgaagggtgctgcaagcatgttctggaagcaggagcccgtacgtgattttggaagttcatgaattgatgatgggtgctggtcttcatgctgatatcactgtctataatacactcgtgcatgttttgtgttgccatggaatgacaagaaaagctacaattgttttggatgaaatgttggggagaggaattgcaccagacactatcacattcaatgctctcattcttggccattgtaagagcagtcatctagataatgcatttgcaacgtatgctcagatgcttcatcaaggactctcaccaaatatagctacattcaacacacttctgggtggccttgagtccgctggaagaattggagaggcagatactgttatctgtgagatgaagaagatgggccttgaacccaataatctcacctatgatatactggtgacaggatatgcaaagaaaagcaacaaagttgaagcactgaggctgtattgtgagatggtgagtaaaggctttattcccaaagcaagcacatataattcactcataagtgactttgctaaagctggaatgatgaatcaagctaaagagttgttcagtgagatgaaaaggagaggagttttacatacgtcctcaacttatgatatccttttgaatggatggtcaaagcttagaaatggaactgaggtaagaatacttctcaaagatatgaaagagctagggtttaaaccatctaaaggcactattagttctatgtccagagcattttcaaagccgggaatgacttgggaagctcgacgtttacttaagacccttttcaaggtttagggaaaacatgaagtgtcaatatattatctgtctaggatagatgctcaattgagatgattctcccagaactgtacagttgcaaaaaggggtccttactgttggagtgtcttctttgctaagccagatatgctgtttcgtgcataaagagatcatagcaaatgcagttaattctgaaaagagatgggtaggtgcttcagaagaccagcttgatgtcgtgacttacattggttaacaagctgaaacccaaaaatatatacttgtgttatactctgcccttggacagaaagttgttaggcagtttgtcactcagggattctggagtgaagcaccatttgcaatgaactaaatgcatgaggttgagactgttttacactgtttcaaatctgccttgattgatgacctcctacagttgtaaatggcttggatgacatatgtaagttatatgctttgctttctgcaaaccagttactgactgcttgcacttccataaagttgaggtgatctattccttgcactacaaaagtatgtgtttatttaatctgctgcttaacatgtttgattatattaggcaacatgtagttgatcactagaagttatctgatatgaactatggtactccctccattcagatatgatagtcttttcttcaaatttgagaaattcagatatgatagtcttttttacgtatgcaccttgggttccactatgtacgcctgtgtcgctttccttcgccgtgcggacgcgcttctcaggacagagacaaaaggaaggatttggcacgggaaagcgggaaaaaacgaactgtttcacggagttgcctcgtggtattaaaggcctgtgacactgaacagtcccgtggcggaaaaacagcagactaacggatattaccgatggatgaagtaattaggtgataagcaagccactcttcccttgaccatcgtgccattctaaaaagagactatcatatctgaatggagggagtaattgataaggctatggcagtcaccagatgtgtaagagtgatctttgtggcagagagcagtatcactgaaatcagtacacttttctgtttccgctcacttgcatggtattattattattattattattattattattatcatcatcatcatcatcattattattattgttattgttattgttgttattattatcatcatcatcatcatcatcatcatcatgaggaatcatgaccgctacacaatgccaagcagtgtttacaagtcgtccgactaatcgcgattaatcgcgattagtcgggctggtcgcctggaagagggcgattaggtggacgacgcgattaggatttcaagtcgtcctagtcgtccgactaatcgtcgacctgggcgattagtcgtccggtcgaacgcttgctggtcgtttttgttgtcacagttttggtactgggcttcactctagtttttggcccatctatagtagcccgcccctccagcagtaaatcagccgccacaaacccgccagaaatcctcctagccgccagaaaccctcccagccgccagtaaaccctaattctctcctctgtcctctctggtttttgccgacgtctctgctccaagtgctccagccgtccagcatctgcctccggcgtccagtactccagtgctccggcgtctgtcacctagtcaagaattgaagatgagctcgtcatctgaaggtagcacctgctctcccttctctgattatctcccagtctcccttccctctattaccactggtagctcgtcatctgaaggtgcacctgcagacctctgtttgagcagtctattattgcagaaattactgctagtctgctactaattatgcctatattattgcagaaatgcagtgcatatatagttaatatatagttatatacatatacatatgtccttaaatctataggacgactaacggacgactagaggtcgaccaggaccgattagtcgacctaatcgtcgccctaatcgctattaggcgcctggtcgcccgacttgtaaacattgatgtcaagctttggatttgaagttttgaactagtctaatatgccaaggaaatggaatacaacaacaacaacaacaatcttttcagtcccaagtccctactactattaagaacggaaggtgggcacctggtgctaccatggcttcaccccacgctgacacactgggcctgccccacgcgtctcccgcctcggtgtcgttccctgttggtccccacgctcagcacgctctcagctactgacctagctattgacctatggaccccagcgcccgcacacccaccaccagaccacacataccttagtgtttataaataaaaaaatatatatataaaaattagtgcaaagcgagcatttgaacacacgctctcctatattctagaaatttagggttaaccactagactacatgtaccttagtgtttaaaaataaacactaattatatttaaataaatatcttaatacctatttatataatatataaaaactatagcaaaagcacgggcaaatgactagtatagttattaaggcgttaaggcgagttaaggcgagcgtccccttttttaccttttaagcggaaaggcgtaaggcgaggcgacgccttaattatatatatatatatatttatatatatatatatatataatagaccaaatattatttatatatcactaattcgaggtaataaacaagctagcacaactgtaaggcctaagaccatttcagcctaatagaacagagaaacagggaaaaaaataaagaaacccacaatcagcccaacctaacaaatttagggttacttcacgtcctcacctagcacaaatctctctctccctcttctccctctcagccaccagcaattctctctcagccactagcagcttctccctctccttccccgcatttctacttcttcctgcacgtcgttgtgcctaagagggtgggccgccgctgcttgagagggagcaagtgcgccgccgaggccgcgcccgtgcggagctgctccacccacgcgctgcgtgccgccagggaggtagactatacgctgccgcctccacttcactttttttctctcgaatgtgcaggaggactgcacatctttatatattagagagaagaaaaacacccacaaagggcaaaaatacagaacacaaacatacagccaaacacacacacacacacacacacttctaaagaacacaccaggacagggagatctgccacgcaggacccgacgtctacaaagcagaaacacagtcagccaaaccaatgctccccagctgcttggctccagctagaacccagcaagcaagctcatcaaggaaggatctcagcaccttcgcaatggaaggggactcctcatggaagatcactcggttcctatgaagccaaaggtaccatgccccaaggatgatagcactgttgaagcccttcttcttgtctttgtggatctgattgatcactcctccccaccactccacaaaggaggcctccacaggactaggaataaggtgtcctaggttaaaaggggctagaatgccatgccagaactgacgtgtaaaaacacatgtagttaggagatgttgaactgtctcctgctcttgatcacaaaggggacaaacaaccgggtggggcataccacacttgcgtaatctgtcagctgtccaacacctatttcttatggccagccataggaaggttttgcattttggggggggggcaagatttccataaccgcttccatggctcaaaggtgatggaaccataaaataaaacattatagcaagatttagaagtgaactgcccagatgactcatgcctccaaacatgttgatcagtttctggagataaaacaacctcactaatagagtcccaaaggagaaggtattgttgcattccaatcagagtgaggtaacttgatatctctgatccattgaccattaataagggcttgggccacagttctagtggaggttaacttcttgtccacctttgagaataccattggagctaaatctttgatggaattcccgctcaaccacctatcaatccaaaagagagtatcattaccgtttcccacatgggagatcactgaaatggcaaccaaagccttgacttgtggctgaacagggatatcaagaccaatccaggacctgctagggtcggttttctatatagccacaaccacctggcttgtagtgcccagcttctgtaaagcagatttgggaggccaagaccaccaagatgcagtggcctagtaacctttatccacaagccgctcttaaccgtgagcacgattgatataccagttttacactctacagaggttgcacatctttatccacaagccgtgatcccttatctgcctcgggttgcgcagacccttaaacactgccaaggtgagtaggcaagggctcactacgaggcctttccaaagttccactagcatgagagaacccgttacggtttcaggcagaagggggcgatataggaatccctcgtctgaaaagccatcgtagcatgatcgactcgagaacttccctataccagcaacttcccacaccccacttgccccttttgggaaaggattaactcacactagctttcctaattaatcagccaagggtgtcccgttccacccttgtgtagcactgttttctcagattgtcgctccatgttccaattaccacaataatcttaaccatgaacaataattgagccaacaataataataaagcatgatcatagttcagatataatatcaatcccaacacctggtagagcaatagcaagactacccaatgatttatttgtttgcaaggtgtagggtgaataaaactagggtaacctattaggtcccatcaagttaacctagacatgtcacagtgattatcatgaacattattaggtaaagatagtgatcaagtgcacaacttgccttttacttgcgattctaggtacttcaccaagatggtctcagattcctcgtcacctcgcttctagcgtagcaatacatacaatcaaacaaataatggatatgataacattacaccagagcataagaacaaaccatacattagtattctacacgtcgctacgagatcgtaggttcgagaatgactaaaatcggagttatggttgaaaagatatggttttcggaagacctatgtgattaagtaattaaaaataggtcttatgttgattttatagatcatgtgagatagataatctaaagaaataactatcttatctttaatctaagttataacttgagtagagatcatattttggtcagattataattattagcaagattaatctactaaacataggtttaaataaatatctaattatagaagtatatgatatgttacaaataatgttgttactgcatatgtaattttattacgaagctaacacaactggaacagactaaatcagagttaagatgagggatttatgaaatttacaagtttctggacatataaatattatttttatgcccaaattagtttccagggactcagctgcaaaaacctgacttattttcatttattttaatttactattttgggtttgtttcttagaaaggcgaggtctcttttgaaaaatcaccgcgaccgaagcggtatccttcgctctgggccgcgcgattatgaataaacgatccagattagatctcctaatcctatgaaccagtgtgccacactggttgttcgatccgagatcgacagatccaatttaatggttcgaagggatacaccatgatttgatttgggccatcccccgcacgatcaatgattgagagccatccccccttccccgatggtgtagcaaggcggtgccgcctacccgtcggcgaggtcgccgacatgaggggcgattcctgccctcagagctccatcaccccaaattgaaaggtactacacgttgctcgactcaaggcaaattagatgggaggttccttaccatgtacggcaacggggagccctgaccacgtgaacggcggctcggcgggaagtcttcgctctgacgagcaattctgcttttttgagttgcatcccgtgcgccctgtcgttgctccttccttcagcgatctcccgcaaacactcgcaagcagtcttaaggtcttggcgacgccggtggtctggattggcctcggtggcgccccatctctctatttgccctctctctctctctctctctctctcttgacggcttggctcgggatattccgggggcgccatatatagggcagagggcaccaaggtcggtgggttgttgtagaagatctcgtgatggaattggttgtggttgttaccgcgcgcggtgtttgcgggaggaagaggcttctggcaccttggccccacccaacagagaccaaggaggtgcaggcg

SEQ ID NO: 40786 - DNA, 3997 bp, Zea Mays
actccattcccctcgtcgccgaccaccacccaccatggcgggggcggcatctccgcctcaggccctacccccggccccgaccctccaggcctccttcctctgctccctcgcgctcgccttcctccgggccggccgcctctccgctgcctctcacgtcgtctcctcactccccgctccgcctcccgcccgcctcctccgccgcctcatccccgcgctcgcctcctcgggcctcgtcgccgccgcctcccgcttccgccccgtcccaggtgacccgctcaccctcaactccatcatcctctcctactgcagcctccacgcgctccggcccgcgcttagcctgctccgttcctcctcggggccccagccgcaggtcgcggccgacaccgtcagctacaacatcttcctcgctggcctctccgagcagggacacgggaggctcgcgccgcccgtgctctccgagatgtgcaagcgcggcgtgccctgggacggggtcaccatgagcacggcgctcgtggggctgagcaggaccggacttgtcggcgaggccgcggcgttggcggagatgctggtccgaggccgaggaattgatggcttgggtgtggtgggatggaatgctctcattgacggctactgtaaagtccaggacatggccgcagcattggcggtggtggagaggatgactacacaagggctgtcgcttgatgtggtggggtacaataccctggttgccgggtttttctactccggcgatgctgatgctgcatgggaggtagcggagaggatgaaggcggatggggtggagccgagtgtggtcacacacacgacgctcattggggagtattgtaagatgaagcggatcgaggaggcgttcactctgtacgagggtatggtcaggtcgggtgtgctgcctgatgtggtcacccttagtgctcttgttgatggcctatgcagggatggccggttctcagaggcatatgcacttttcagggagatggacaagattggagtcgctccaaaccatgtgacatattgtacatttatcgattcattagcgaaagtgcagagggtgaacgagtcactgggtctattgggagagatggtctcaaggggcgtggccatggatctggtcatgtatacaactgtgatggaccgtttagagctggcaatatcgatggcgcagagcagatgctgttgcaaatggaggagaaatccgttagccccaatgttgtcacattctcatcaatcctcaatggtcttgttaaaagaggatgcatcgccaaagcagctggctatatgaggaagatgaaggacagtggcattgctcctaatgttgttacttacggaacgcttatcgacggcttcttcaagtgccaggggcaagaagcagctcttgatgtgtaccgtgatatgttgcatgagggtgttgaggcaaacaactttattgttgactcactggtgaatggtttgagaaagaatgggaatatagaggaagctgaagcattatttaaagatatgggtgaacgtggtctgttgctagaccatgtcaactatgccaccttaatggatgggctttttaaaacaggaaacatgccagctgctcttaaggttggtcaggagttgatggagagaaatctgtcacctgatgctgttgtctataatgtgtttatcaattgcctttgcaggcttggcaagttcagtgaagcaaaatcttttttgaaagagatgagaaatacgggcttagaacctgatcaagcaacatataacactatgatttctgcacagtgtcgggaagggaatacctcaaaagctctaaagctactgaatgaaatgaagtggagttcaataaagcctaatctcatcacatatactacacttgttgtgggccttcttgaggctggggttgtggagaaggcaaaatatttactaaatgagatggcttctgctggattcactccaacccctctgacttatcgaagggtgctgcaagcatgttctggaagcaggagcccgtacgtgattttggaagttcatgaattgatgatgggtgctggtcttcatgctgatatcactgtctataatacactcgtgcatgttttgtgttgccatggaatgacaagaaaagctacaattgttttggatgaaatgttggggagaggaattgcaccagacactatcacattcaatgctctcattcttggccattgtaagagcagtcatctagataatgcatttgcaacgtatgctcagatgcttcatcaaggactctcaccaaatatagctacattcaacacacttctgggtggccttgagtccgctggaagaattggagaggcagatactgttatctgtgagatgaagaagatgggccttgaacccaataatctcacctatgatatactggtgacaggatatgcaaagaaaagcaacaaagttgaagcactgaggctgtattgtgagatggtgagtaaaggctttattcccaaagcaagcacatataattcactcataagtgactttgctaaagctggaatgatgaatcaagctaaagagttgttcagtgagatgaaaaggagaggagttttacatacgtcctcaacttatgatatccttttgaatggatggtcaaagcttagaaatggaactgaggtaagaatacttctcaaagatatgaaagagctagggtttaaaccatctaaaggcactattagttctatgtccagagcattttcaaagccgggaatgacttgggaagctcgacgtttacttaagacccttttcaaggtttagggaaaacatgaagtgtcaatatattatctgtctaggatagatgctcaattgagatgattctcccagaactgtacagttgcaaaaaggggtccttactgttggagtgtcttctttgctaagccagatatgctgtttcgtgcataaagagatcatagcaaatgcagttaattctgaaaagagatgggtaggtgcttcagaagaccagcttgatgtcgtgacttacattggttaacaagctgaaacccaaaaatatatacttgtgttatactctgcccttggacagaaagttgttaggcagtttgtcactcagggattctggagtgaagcaccatttgcaatgaactaaatgcatgaggttgagactgttttacactgtttcaaatctgccttgattgatgacctcctacagttgtaaatggcttggatgacatatttttcacaagcatgataatcagaacatgttttatgtgcatagatggagaggagctattttggaaaacaagattgttatttgttgctgtagccggcttctttcctatacatcaaggtcatggatgattccaggaatggtggagggaggctgagagcagggcgccaaaactccagaaaaagggcttcaattcaattgtgatccttgtggcttggtgactgtggaaacacattgatggtgcctctccaaacagcaaccttgtcctgcaacatatccatcaagatgctcatatgtggggaatggctggggcagcagacattaggagactttggccttagtcctgggagtgcttgtttgctgctggttgtagtagtgtggtttttcatggacatttatgtgtatgcatgtgtttggccgccgtcaggaggccattttttgtactgtttttgctttataaggcctatttttgttcttaatataatgatgcgcagtcctcctgcattttcgagagaaaaaaatggaagactccacagctgcagatttaggattggaataccataactgagcatttgtagtttgtaaagcaactccatacaaggtttaattgtatcctcaatacatctttagataacttttactctgctatgattttattgtacgtgatatgcatatgtcggagtgaattctgcagggtacttcctatcaacaatgcaaaagattggctgcagtttgagtcaagatagcacatgaatagaaaaaaaaatcaataaatgatcaatt

SEQ ID NO: 40787 - DNA, 4035 bp, Zea Mays
actccattcccctcgtcgccgaccaccacccaccatggcgggggcggcatctccgcctcaggccctacccccggccccgaccctccaggcctccttcctctgctccctcgcgctcgccttcctccgggccggccgcctctccgctgcctctcacgtcgtctcctcactccccgctccgcctcccgcccgcctcctccgccgcctcatccccgcgctcgcctcctcgggcctcgtcgccgccgcctcccgcttccgccccgtcccaggtgacccgctcaccctcaactccatcatcctctcctactgcagcctccacgcgctccggcccgcgcttagcctgctccgttcctcctcggggccccagccgcaggtcgcggccgacaccgtcagctacaacatcttcctcgctggcctctccgagcagggacacgggaggctcgcgccgcccgtgctctccgagatgtgcaagcgcggcgtgccctgggacggggtcaccatgagcacggcgctcgtggggctgagcaggaccggacttgtcggcgaggccgcggcgttggcggagatgctggtccgaggccgaggaattgatggcttgggtgtggtgggatggaatgctctcattgacggctactgtaaagtccaggacatggccgcagcattggcggtggtggagaggatgactacacaagggctgtcgcttgatgtggtggggtacaataccctggttgccgggtttttctactccggcgatgctgatgctgcatgggaggtagcggagaggatgaaggcggatggggtggagccgagtgtggtcacacacacgacgctcattggggagtattgtaagatgaagcggatcgaggaggcgttcactctgtacgagggtatggtcaggtcgggtgtgctgcctgatgtggtcacccttagtgctcttgttgatggcctatgcagggatggccggttctcagaggcatatgcacttttcagggagatggacaagattggagtcgctccaaaccatgtgacatattgtacatttatcgattcattagcgaaagtgcagagggtgaacgagtcactgggtctattgggagagatggtctcaaggggcgtggccatggatctggtcatgtatacaactgtgatggaccgtttagagctggcaatatcgatggcgcagagcagatgctgttgcaaatggaggagaaatccgttagccccaatgttgtcacattctcatcaatcctcaatggtcttgttaaaagaggatgcatcgccaaagcagctggctatatgaggaagatgaaggacagtggcattgctcctaatgttgttacttacggaacgcttatcgacggcttcttcaagtgccaggggcaagaagcagctcttgatgtgtaccgtgatatgttgcatgagggtgttgaggcaaacaactttattgttgactcactggtgaatggtttgagaaagaatgggaatatagaggaagctgaagcattatttaaagatatgggtgaacgtggtctgttgctagaccatgtcaactatgccaccttaatggatgggctttttaaaacaggaaacatgccagctgctcttaaggttggtcaggagttgatggagagaaatctgtcacctgatgctgttgtctataatgtgtttatcaattgcctttgcaggcttggcaagttcagtgaagcaaaatcttttttgaaagagatgagaaatacgggcttagaacctgatcaagcaacatataacactatgatttctgcacagtgtcgggaagggaatacctcaaaagctctaaagctactgaatgaaatgaagtggagttcaataaagcctaatctcatcacatatactacacttgttgtgggccttcttgaggctggggttgtggagaaggcaaaatatttactaaatgagatggcttctgctggattcactccaacccctctgacttatcgaagggtgctgcaagcatgttctggaagcaggagcccgtacgtgattttggaagttcatgaattgatgatgggtgctggtcttcatgctgatatcactgtctataatacactcgtgcatgttttgtgttgccatggaatgacaagaaaagctacaattgttttggatgaaatgttggggagaggaattgcaccagacactatcacattcaatgctctcattcttggccattgtaagagcagtcatctagataatgcatttgcaacgtatgctcagatgcttcatcaaggactctcaccaaatatagctacattcaacacacttctgggtggccttgagtccgctggaagaattggagaggcagatactgttatctgtgagatgaagaagatgggccttgaacccaataatctcacctatgatatactggtgacaggatatgcaaagaaaagcaacaaagttgaagcactgaggctgtattgtgagatggtgagtaaaggctttattcccaaagcaagcacatataattcactcataagtgactttgctaaagctggaatgatgaatcaagctaaagagttgttcagtgagatgaaaaggagaggagttttacatacgtcctcaacttatgatatccttttgaatggatggtcaaagcttagaaatggaactgaggtaagaatacttctcaaagatatgaaagagctagggtttaaaccatctaaaggcactattagttctatgtccagagcattttcaaagccgggaatgacttgggaagctcgacgtttacttaagacccttttcaaggtttagggaaaacatgaagtgtcaatatattatctgtctaggatagatgctcaattgagatgattctcccagaactgtacagttgcaaaaaggggtccttactgttggagtgtcttctttgctaagccagatatgctgtttcgtgcataaagagatcatagcaaatgcagttaattctgaaaagagatgggtaggtgcttcagaagaccagcttgatgtcgtgacttacattggttaacaagctgaaacccaaaaatatatacttgtgttatactctgcccttggacagaaagttgttaggcagtttgtcactcagggattctggagtgaagcaccatttgcaatgaactaaatgcatgaggttgagactgttttacactgtttcaaatctgccttgattgatgacctcctacagttgtaaatggcttggatgacatatatggagaggagctattttggaaaacaagttggttcctctcttcaaacaaaggatgctatatgacaaaggaaattcctcattttgcatccttcaccatcttgtgttaggattgttatttgttgctgtagccggcttctttcctatacatcaaggtcatggatgattccaggaatggtggagggaggctgagagcagggcgccaaaactccagaaaaagggcttcaattcaattgtgatccttgtggcttggtgactgtggaaacacattgatggtgcctctccaaacagcaaccttgtcctgcaacatatccatcaagatgctcatatgtggggaatggctggggcagcagacattaggagactttggccttagtcctgggagtgcttgtttgctgctggttgtagtagtgtggtttttcatggacatttatgtgtatgcatgtgtttggccgccgtcaggaggccattttttgtactgtttttgctttataaggcctatttttgttcttaatataatgatgcgcagtcctcctgcattttcgagagaaaaaaatggaagactccacagctgcagatttaggattggaataccataactgagcatttgtagtttgtaaagcaactccatacaaggtttaattgtatcctcaatacatctttagataacttttactctgctatgattttattgtacgtgatatgcatatgtcggagtgaattctgcagggtacttcctatcaacaatgcaaaagattggctgcagtttgagtcaagatagcacatgaatagaaaaaaaaatcaataaatgatcaatt

SEQ ID NO: 40788 - DNA, 2975 bp, Zea Mays
actccattcccctcgtcgccgaccaccacccaccatggcgggggcggcatctccgcctcaggccctacccccggccccgaccctccaggcctccttcctctgctccctcgcgctcgccttcctccgggccggccgcctctccgctgcctctcacgtcgtctcctcactccccgctccgcctcccgcccgcctcctccgccgcctcatccccgcgctcgcctcctcgggcctcgtcgccgccgcctcccgcttccgccccgtcccagagctggcaatatcgatggcgcagagcagatgctgttgcaaatggaggagaaatccgttagccccaatgttgtcacattctcatcaatcctcaatggtcttgttaaaagaggatgcatcgccaaagcagctggctatatgaggaagatgaaggacagtggcattgctcctaatgttgttacttacggaacgcttatcgacggcttcttcaagtgccaggggcaagaagcagctcttgatgtgtaccgtgatatgttgcatgagggtgttgaggcaaacaactttattgttgactcactggtgaatggtttgagaaagaatgggaatatagaggaagctgaagcattatttaaagatatgggtgaacgtggtctgttgctagaccatgtcaactatgccaccttaatggatgggctttttaaaacaggaaacatgccagctgctcttaaggttggtcaggagttgatggagagaaatctgtcacctgatgctgttgtctataatgtgtttatcaattgcctttgcaggcttggcaagttcagtgaagcaaaatcttttttgaaagagatgagaaatacgggcttagaacctgatcaagcaacatataacactatgatttctgcacagtgtcgggaagggaatacctcaaaagctctaaagctactgaatgaaatgaagtggagttcaataaagcctaatctcatcacatatactacacttgttgtgggccttcttgaggctggggttgtggagaaggcaaaatatttactaaatgagatggcttctgctggattcactccaacccctctgacttatcgaagggtgctgcaagcatgttctggaagcaggagcccgtacgtgattttggaagttcatgaattgatgatgggtgctggtcttcatgctgatatcactgtctataatacactcgtgcatgttttgtgttgccatggaatgacaagaaaagctacaattgttttggatgaaatgttggggagaggaattgcaccagacactatcacattcaatgctctcattcttggccattgtaagagcagtcatctagataatgcatttgcaacgtatgctcagatgcttcatcaaggactctcaccaaatatagctacattcaacacacttctgggtggccttgagtccgctggaagaattggagaggcagatactgttatctgtgagatgaagaagatgggccttgaacccaataatctcacctatgatatactggtgacaggatatgcaaagaaaagcaacaaagttgaagcactgaggctgtattgtgagatggtgagtaaaggctttattcccaaagcaagcacatataattcactcataagtgactttgctaaagctggaatgatgaatcaagctaaagagttgttcagtgagatgaaaaggagaggagttttacatacgtcctcaacttatgatatccttttgaatggatggtcaaagcttagaaatggaactgaggtaagaatacttctcaaagatatgaaagagctagggtttaaaccatctaaaggcactattagttctatgtccagagcattttcaaagccgggaatgacttgggaagctcgacgtttacttaagacccttttcaaggtttagggaaaacatgaagtgtcaatatattatctgtctaggatagatgctcaattgagatgattctcccagaactgtacagttgcaaaaaggggtccttactgttggagtgtcttctttgctaagccagatatgctgtttcgtgcataaagagatcatagcaaatgcagttaattctgaaaagagatgggtaggtgcttcagaagaccagcttgatgtcgtgacttacattggttaacaagctgaaacccaaaaatatatacttgtgttatactctgcccttggacagaaagttgttaggcagtttgtcactcagggattctggagtgaagcaccatttgcaatgaactaaatgcatgaggttgagactgttttacactgtttcaaatctgccttgattgatgacctcctacagttgtaaatggcttggatgacatatgaatggtggagggaggctgagagcagggcgccaaaactccagaaaaagggcttcaattcaattgtgatccttgtggcttggtgactgtggaaacacattgatggtgcctctccaaacagcaaccttgtcctgcaacatatccatcaagatgctcatatgtggggaatggctggggcagcagacattaggagactttggccttagtcctgggagtgcttgtttgctgctggttgtagtagtgtggtttttcatggacatttatgtgtatgcatgtgtttggccgccgtcaggaggccattttttgtactgtttttgctttataaggcctatttttgttcttaatataatgatgcgcagtcctcctgcattttcgagagaaaaaaatggaagactccacagctgcagatttaggattggaataccataactgagcatttgtagtttgtaaagcaactccatacaaggtttaattgtatcctcaatacatctttagataacttttactctgctatgattttattgtacgtgatatgcatatgtcggagtgaattctgcagggtacttcctatcaacaatgcaaaagattggctgcagtttgagtcaagatagcacatgaatagaaaaaaaaatcaataaatgatcaatt

SEQ ID NO: 40789 - DNA, 3928 bp, Zea Mays
actccattcccctcgtcgccgaccaccacccaccatggcgggggcggcatctccgcctcaggccctacccccggccccgaccctccaggcctccttcctctgctccctcgcgctcgccttcctccgggccggccgcctctccgctgcctctcacgtcgtctcctcactccccgctccgcctcccgcccgcctcctccgccgcctcatccccgcgctcgcctcctcgggcctcgtcgccgccgcctcccgcttccgccccgtcccaggtgacccgctcaccctcaactccatcatcctctcctactgcagcctccacgcgctccggcccgcgcttagcctgctccgttcctcctcggggccccagccgcaggtcgcggccgacaccgtcagctacaacatcttcctcgctggcctctccgagcagggacacgggaggctcgcgccgcccgtgctctccgagatgtgcaagcgcggcgtgccctgggacggggtcaccatgagcacggcgctcgtggggctgagcaggaccggacttgtcggcgaggccgcggcgttggcggagatgctggtccgaggccgaggaattgatggcttgggtgtggtgggatggaatgctctcattgacggctactgtaaagtccaggacatggccgcagcattggcggtggtggagaggatgactacacaagggctgtcgcttgatgtggtggggtacaataccctggttgccgggtttttctactccggcgatgctgatgctgcatgggaggtagcggagaggatgaaggcggatggggtggagccgagtgtggtcacacacacgacgctcattggggagtattgtaagatgaagcggatcgaggaggcgttcactctgtacgagggtatggtcaggtcgggtgtgctgcctgatgtggtcacccttagtgctcttgttgatggcctatgcagggatggccggttctcagaggcatatgcacttttcagggagatggacaagattggagtcgctccaaaccatgtgacatattgtacatttatcgattcattagcgaaagtgcagagggtgaacgagtcactgggtctattgggagagatggtctcaaggggcgtggccatggatctggtcatgtatacaactgtgatggaccgtttagagctggcaatatcgatggcgcagagcagatgctgttgcaaatggaggagaaatccgttagccccaatgttgtcacattctcatcaatcctcaatggtcttgttaaaagaggatgcatcgccaaagcagctggctatatgaggaagatgaaggacagtggcattgctcctaatgttgttacttacggaacgcttatcgacggcttcttcaagtgccaggggcaagaagcagctcttgatgtgtaccgtgatatgttgcatgagggtgttgaggcaaacaactttattgttgactcactggtgaatggtttgagaaagaatgggaatatagaggaagctgaagcattatttaaagatatgggtgaacgtggtctgttgctagaccatgtcaactatgccaccttaatggatgggctttttaaaacaggaaacatgccagctgctcttaaggttggtcaggagttgatggagagaaatctgtcacctgatgctgttgtctataatgtgtttatcaattgcctttgcaggcttggcaagttcagtgaagcaaaatcttttttgaaagagatgagaaatacgggcttagaacctgatcaagcaacatataacactatgatttctgcacagtgtcgggaagggaatacctcaaaagctctaaagctactgaatgaaatgaagtggagttcaataaagcctaatctcatcacatatactacacttgttgtgggccttcttgaggctggggttgtggagaaggcaaaatatttactaaatgagatggcttctgctggattcactccaacccctctgacttatcgaagggtgctgcaagcatgttctggaagcaggagcccgtacgtgattttggaagttcatgaattgatgatgggtgctggtcttcatgctgatatcactgtctataatacactcgtgcatgttttgtgttgccatggaatgacaagaaaagctacaattgttttggatgaaatgttggggagaggaattgcaccagacactatcacattcaatgctctcattcttggccattgtaagagcagtcatctagataatgcatttgcaacgtatgctcagatgcttcatcaaggactctcaccaaatatagctacattcaacacacttctgggtggccttgagtccgctggaagaattggagaggcagatactgttatctgtgagatgaagaagatgggccttgaacccaataatctcacctatgatatactggtgacaggatatgcaaagaaaagcaacaaagttgaagcactgaggctgtattgtgagatggtgagtaaaggctttattcccaaagcaagcacatataattcactcataagtgactttgctaaagctggaatgatgaatcaagctaaagagttgttcagtgagatgaaaaggagaggagttttacatacgtcctcaacttatgatatccttttgaatggatggtcaaagcttagaaatggaactgaggtaagaatacttctcaaagatatgaaagagctagggtttaaaccatctaaaggcactattagttctatgtccagagcattttcaaagccgggaatgacttgggaagctcgacgtttacttaagacccttttcaaggtttagggaaaacatgaagtgtcaatatattatctgtctaggatagatgctcaattgagatgattctcccagaactgtacagttgcaaaaaggggtccttactgttggagtgtcttctttgctaagccagatatgctgtttcgtgcataaagagatcatagcaaatgcagttaattctgaaaagagatgggtaggtgcttcagaagaccagcttgatgtcgtgacttacattggttaacaagctgaaacccaaaaatatatacttgtgttatactctgcccttggacagaaagttgttaggcagtttgtcactcagggattctggagtgaagcaccatttgcaatgaactaaatgcatgaggttgagactgttttacactgtttcaaatctgccttgattgatgacctcctacagttgtaaatggcttggatgacatatgattgttatttgttgctgtagccggcttctttcctatacatcaaggtcatggatgattccaggaatggtggagggaggctgagagcagggcgccaaaactccagaaaaagggcttcaattcaattgtgatccttgtggcttggtgactgtggaaacacattgatggtgcctctccaaacagcaaccttgtcctgcaacatatccatcaagatgctcatatgtggggaatggctggggcagcagacattaggagactttggccttagtcctgggagtgcttgtttgctgctggttgtagtagtgtggtttttcatggacatttatgtgtatgcatgtgtttggccgccgtcaggaggccattttttgtactgtttttgctttataaggcctatttttgttcttaatataatgatgcgcagtcctcctgcattttcgagagaaaaaaatggaagactccacagctgcagatttaggattggaataccataactgagcatttgtagtttgtaaagcaactccatacaaggtttaattgtatcctcaatacatctttagataacttttactctgctatgattttattgtacgtgatatgcatatgtcggagtgaattctgcagggtacttcctatcaacaatgcaaaagattggctgcagtttgagtcaagatagcacatgaatagaaaaaaaaatcaataaatgatcaatt

SEQ ID NO: 40790 - DNA, 4126 bp, Zea Mays
actccattcccctcgtcgccgaccaccacccaccatggcgggggcggcatctccgcctcaggccctacccccggccccgaccctccaggcctccttcctctgctccctcgcgctcgccttcctccgggccggccgcctctccgctgcctctcacgtcgtctcctcactccccgctccgcctcccgcccgcctcctccgccgcctcatccccgcgctcgcctcctcgggcctcgtcgccgccgcctcccgcttccgccccgtcccaggtgacccgctcaccctcaactccatcatcctctcctactgcagcctccacgcgctccggcccgcgcttagcctgctccgttcctcctcggggccccagccgcaggtcgcggccgacaccgtcagctacaacatcttcctcgctggcctctccgagcagggacacgggaggctcgcgccgcccgtgctctccgagatgtgcaagcgcggcgtgccctgggacggggtcaccatgagcacggcgctcgtggggctgagcaggaccggacttgtcggcgaggccgcggcgttggcggagatgctggtccgaggccgaggaattgatggcttgggtgtggtgggatggaatgctctcattgacggctactgtaaagtccaggacatggccgcagcattggcggtggtggagaggatgactacacaagggctgtcgcttgatgtggtggggtacaataccctggttgccgggtttttctactccggcgatgctgatgctgcatgggaggtagcggagaggatgaaggcggatggggtggagccgagtgtggtcacacacacgacgctcattggggagtattgtaagatgaagcggatcgaggaggcgttcactctgtacgagggtatggtcaggtcgggtgtgctgcctgatgtggtcacccttagtgctcttgttgatggcctatgcagggatggccggttctcagaggcatatgcacttttcagggagatggacaagattggagtcgctccaaaccatgtgacatattgtacatttatcgattcattagcgaaagtgcagagggtgaacgagtcactgggtctattgggagagatggtctcaaggggcgtggccatggatctggtcatgtatacaactgtgatggaccgtttagagctggcaatatcgatggcgcagagcagatgctgttgcaaatggaggagaaatccgttagccccaatgttgtcacattctcatcaatcctcaatggtcttgttaaaagaggatgcatcgccaaagcagctggctatatgaggaagatgaaggacagtggcattgctcctaatgttgttacttacggaacgcttatcgacggcttcttcaagtgccaggggcaagaagcagctcttgatgtgtaccgtgatatgttgcatgagggtgttgaggcaaacaactttattgttgactcactggtgaatggtttgagaaagaatgggaatatagaggaagctgaagcattatttaaagatatgggtgaacgtggtctgttgctagaccatgtcaactatgccaccttaatggatgggctttttaaaacaggaaacatgccagctgctcttaaggttggtcaggagttgatggagagaaatctgtcacctgatgctgttgtctataatgtgtttatcaattgcctttgcaggcttggcaagttcagtgaagcaaaatcttttttgaaagagatgagaaatacgggcttagaacctgatcaagcaacatataacactatgatttctgcacagtgtcgggaagggaatacctcaaaagctctaaagctactgaatgaaatgaagtggagttcaataaagcctaatctcatcacatatactacacttgttgtgggccttcttgaggctggggttgtggagaaggcaaaatatttactaaatgagatggcttctgctggattcactccaacccctctgacttatcgaagggtgctgcaagcatgttctggaagcaggagcccgtacgtgattttggaagttcatgaattgatgatgggtgctggtcttcatgctgatatcactgtctataatacactcgtgcatgttttgtgttgccatggaatgacaagaaaagctacaattgttttggatgaaatgttggggagaggaattgcaccagacactatcacattcaatgctctcattcttggccattgtaagagcagtcatctagataatgcatttgcaacgtatgctcagatgcttcatcaaggactctcaccaaatatagctacattcaacacacttctgggtggccttgagtccgctggaagaattggagaggcagatactgttatctgtgagatgaagaagatgggccttgaacccaataatctcacctatgatatactggtgacaggatatgcaaagaaaagcaacaaagttgaagcactgaggctgtattgtgagatggtgagtaaaggctttattcccaaagcaagcacatataattcactcataagtgactttgctaaagctggaatgatgaatcaagctaaagagttgttcagtgagatgaaaaggagaggagttttacatacgtcctcaacttatgatatccttttgaatggatggtcaaagcttagaaatggaactgaggtaagaatacttctcaaagatatgaaagagctagggtttaaaccatctaaaggcactattagttctatgtccagagcattttcaaagccgggaatgacttgggaagctcgacgtttacttaagacccttttcaaggtttagggaaaacatgaagtgtcaatatattatctgtctaggatagatgctcaattgagatgattctcccagaactgtacagttgcaaaaaggggtccttactgttggagtgtcttctttgctaagccagatatgctgtttcgtgcataaagagatcatagcaaatgcagttaattctgaaaagagatgggtaggtgcttcagaagaccagcttgatgtcgtgacttacattggttaacaagctgaaacccaaaaatatatacttgtgttatactctgcccttggacagaaagttgttaggcagtttgtcactcagggattctggagtgaagcaccatttgcaatgaactaaatgcatgaggttgagactgttttacacttttcttacattttccaagaaaattgaatatgtttcttgaatttatgaaggtttcaaatctgccttgattgatgacctcctacagttgtaaatggcttggatgacatatttttcacaagcatgataatcagaacatgttttatgtgcatagatggagaggagctattttggaaaacaagttggttcctctcttcaaacaaaggatgctatatgacaaaggaaattcctcattttgcatccttcaccatcttgtgttaggattgttatttgttgctgtagccggcttctttcctatacatcaaggtcatggatgattccaggaatggtggagggaggctgagagcagggcgccaaaactccagaaaaagggcttcaattcaattgtgatccttgtggcttggtgactgtggaaacacattgatggtgcctctccaaacagcaaccttgtcctgcaacatatccatcaagatgctcatatgtggggaatggctggggcagcagacattaggagactttggccttagtcctgggagtgcttgtttgctgctggttgtagtagtgtggtttttcatggacatttatgtgtatgcatgtgtttggccgccgtcaggaggccattttttgtactgtttttgctttataaggcctatttttgttcttaatataatgatgcgcagtcctcctgcattttcgagagaaaaaaatggaagactccacagctgcagatttaggattggaataccataactgagcatttgtagtttgtaaagcaactccatacaaggtttaattgtatcctcaatacatctttagataacttttactctgctatgattttattgtacgtgatatgcatatgtcggagtgaattctgcagggtacttcctatcaacaatgcaaaagattggctgcagtttgagtcaagatagcacatgaatagaaaaaaaaatcaataaatgatcaatt

SEQ ID NO: 40791 - DNA, 3426 bp, Zea Mays
actccattcccctcgtcgccgaccaccacccaccatggcgggggcggcatctccgcctcaggccctacccccggccccgaccctccaggcctccttcctctgctccctcgcgctcgccttcctccgggccggccgcctctccgctgcctctcacgtcgtctcctcactccccgctccgcctcccgcccgcctcctccgccgcctcatccccgcgctcgcctcctcgggcctcgtcgccgccgcctcccgcttccgccccgtcccaggtgacccgctcaccctcaactccatcatcctctcctactgcagcctccacgcgctccggcccgcgcttagcctgctccgttcctcctcggggccccagccgcaggtcgcggccgacaccgtcagctacaacatcttcctcgctggcctctccgagcagggacacgggaggctcgcgccgcccgtgctctccgagatgtgcaagcgcggcgtgccctgggacggggtcaccatgagcacggcgctcgtggggctgagcaggaccggacttgtcggcgaggccgcggcgttggcggagatgctggtccgaggccgaggaattgatggcttgggtgtggtgggatggaatgctctcattgacggctactgtaaagtccaggacatggccgcagcattggcggtggtggagaggatgactacacaagggctgtcgcttgatgtggtggggtacaataccctggttgccgggtttttctactccggcgatgctgatgctgcatgggaggtagcggagaggatgaaggcggatggggtggagccgagtgtggtcacacacacgacgctcattggggagtattgtaagatgaagcggatcgaggaggcgttcactctgtacgagggtatggtcaggtcgggtgtgctgcctgatgtggtcacccttagtgctcttgttgatggcctatgcagggatggccggttctcagaggcatatgcacttttcagggagatggacaagattggagtcgctccaaaccatgtgacatattgtacatttatcgattcattagcgaaagtgcagagggtgaacgagtcactgggtctattgggagagatggtctcaaggggcgtggccatggatctggtcatgtatacaactgtgatggaccgtttagagctggcaatatcgatggcgcagagcagatgctgttgcaaatggaggagaaatccgttagccccaatgttgtcacattctcatcaatcctcaatggtcttgttaaaagaggatgcatcgccaaagcagctggctatatgaggaagatgaaggacagtggcattgctcctaatgttgttacttacggaacgcttatcgacggcttcttcaagtgccaggggcaagaagcagctcttgatgtgtaccgtgatatgttgcatgagggtgttgaggcaaacaactttattgttgactcactggtgaatggtttgagaaagaatgggaatatagaggaagctgaagcattatttaaagatatgggtgaacgtggtctgttgctagaccatgtcaactatgccaccttaatggatgggctttttaaaacaggaaacatgccagctgctcttaaggttggtcaggagttgatggagagaaatctgtcacctgatgctgttgtctataatgtgtttatcaattgcctttgcaggcttggcaagttcagtgaagcaaaatcttttttgaaagagatgagaaatacgggcttagaacctgatcaagcaacatataacactatgatttctgcacagtgtcgggaagggaatacctcaaaagctctaaagctactgaatgaaatgaagtggagttcaataaagcctaatctcatcacatatactacacttgttgtgggccttcttgaggctggggttgtggagaaggcaaaatatttactaaatgagatggcttctgctggattcactccaacccctctgacttatcgaagggtgctgcaagcatgttctggaagcaggagcccgtacgtgattttggaagttcatgaattgatgatgggtgctggtcttcatgctgatatcactgtctataatacactcgtgcatgttttgtgttgccatggaatgacaagaaaagctacaattgttttggatgaaatgttggggagaggaattgcaccagacactatcacattcaatgctctcattcttggccattgtaagagcagtcatctagataatgcatttgcaacgtatgctcagatgcttcatcaaggactctcaccaaatatagctacattcaacacacttctgggtggccttgagtccgctggaagaattggagaggcagatactgttatctgtgagatgaagaagatgggccttgaacccaataatctcacctatgatatactggtgacaggatatgcaaagaaaagcaacaaagttgaagcactgaggctgtattgtgagatggtgagtaaaggctttattcccaaagcaagcacatataattcactcataagtgactttgctaaagctggaatgatgaatcaagctaaagagttgttcagtgagatgaaaaggagaggagttttacatacgtcctcaacttatgatatccttttgaatggatggtcaaagcttagaaatggaactgaggtaagaatacttctcaaagatatgaaagagctagggtttaaaccatctaaaggcactattagttctatgtccagagcattttcaaagccgggaatgacttgggaagctcgacgtttacttaagacccttttcaaggtttagggaaaacatgaagtgtcaatatattatctgtctaggatagatgctcaattgagatgattctcccagaactgtacagttgcaaaaaggggtccttactgttggagtgtcttctttgctaagccagatatgctgtttcgtgcataaagagatcatagcaaatgcagttaattctgaaaagagatgggtaggtgcttcagaagaccagcttgatgtcgtgacttacattggttaacaagctgaaacccaaaaatatatacttgtgttatactctgcccttggacagaaagttgttaggcagtttgtcactcagggattctggagtgaagcaccatttgcaatgaactaaatgcatgaggttgagactgttttacactgtttcaaatctgccttgattgatgacctcctacagttgtaaatggcttggatgacatataatcatgacagacaccaaagaaacggcggatgggattcagatcagatagattttttattagtttgcctgctggatggtgagaagaacaggagcacgagaaacctagggcaggggaagaagcagcagcaagaaaagggggaaagaaagaaacggaacggcacagtggcgctgtattgagccggccggcccaatttcttaatgtggac

SEQ ID NO: 40792 - DNA, 391 bp, Zea Mays
ctcagtttaactgggcccccgtgtggcactggacttggtggggcccgtgtccatggtcgtctcccttgtccatcgtctatcttctcccccaaatcgcattctcatcgcaccgcacgagctacggatctgcggcccgacgactacgacgacggggaggtaggggacgaatcgttgcaagcaacgaggtcagaactaaggaggccgatccatcctccagcctccgatcccatccgacgacatggtctgcgtcgcgtgcctgctgccgctcttcctgatcccggtggtcaacgccctcccttacctcatcgacctcatcatcgtggcatggaagacatcgttttttttttgatcaaggaacctggtatataccaatgcattgctggtgtctgct

SEQ ID NO: 40793 - DNA, 2346 bp, Zea Mays
agtttaactgggcccccgtgtggcactggacttggtggggcccgtgtccatggtcgtctcccttgtccatcgtctatcttctcccccaaatcgcattctcatcgcaccgcacgagctacggatctgcggcccgacgactacgacgacggggaggtaggggacgaatcgttgcaagcaacgaggtcagaactaaggaggccgatccatcctccagcctccgatcccatccgacgacatggtctgcgtcgcgtgcctgctgccgctcttcctgatcccggtggtcaacgccctcccttacctcatcgacctcatcatcagcaaggtgtatcggctatttggatgggagtaccggagacctgaaagagtcccacctgcatgtccatacaagcctgcagctcagaagaacgatgagggtgcgagtgaatcaaaacccctggccgaaccgcacggtgctggtgctgcggcggcagaagataagaaagtggaatgatgcagcaggcgcttaaaatggtggccacggctctgtgtggttagctaagaaacaataattgttgtggatggttatgtacttggttgatgggttgaacttgttatgacactccggatccttaccagttgcattactaatcactgctgctggtctggtctgtctgaatagaagggagttgaacttgcagtcgcaaatgtaatagcgagagtgaatcttgttgtccaaggctttcgtatagaatataatgcttgaataatgagctcaaaattatgattttgtcatcaaaagcttggaaatgcttgaaagagatatcctggttacagaagctaacgttgagtacagtaggcagagattcggattccaacgtgaatggaatagctttatttatctgttcgttattctgctattcaactcgcaaggagatttgggcggatggagtggagatcacttggtatactcgaggacagcatagaaggggtcgagatagatggctcggaaggcggtgaagcctgcggcgtcgacgccgaggtggcggaactcctcctcggagcgctccctcccctgcgtccggtaggtggtcatgacgaagatgtcgttctccagcagcgccctcgtcctggtgctgctgtccgtctcctccggcaccaccggctcgcaggccacgagcttgccgccgtccggcagagcggcgtggcagttcctcaggatggccgtgcactcgtcgtcggtccacgtcgtcagaacccactgcatgcatggtcacagtctggacttgtaagagttgtgtttgcatgcagtgatgcagcagatgcaactaccgtaccgtaccttcatgaaaatggcatcaccggaggggatggacttgaacatatctccgccaacatgcctcactcctgtaatgaaacaacacacgacgaagactgattgtggcgtgttgtgttgtgttggtcttagcacaaggcaggcagttcgtgccctattattaaaaaaattttgggaaaccaacaaacgatctgattccaagatcacagagagtatacagagatcccttctgtctgctctagtgtgtgcctctaggcagttgtcggacctgctacaggtcgcgtgaaacaccgtcagcgccacagaatcgaaaccatccttggttcgcagtaagaactaacaaatctatttacaagtatttttataccaaacatttgaagagtgctcacacattgctacggtgttcaaataagttattgttcaaacatgtttaaacttatttatgataacattaaaactagagaaaacacaacttacttctataaccagttgggtaatagttatgcttcataattcagatatattaataaaggaaatgcaaagaatacacaaatcttggtgccatatatttacaaataaattttatatcattgtagcaaagaatccacgtggcagcgagaactttgaggttccttacagttgttgcatgtgacatggccacacataattgtttatgcggcaataccagattatatagataaatactaacacgattgttagtccttgagcttgtcattgccaagctcactctaatagcgaactattttctcttaaacatgttagcctgttagggaaacattttattctcggacagatagaaatgtatgtgtgggaggaatacactctctttaggtcttattcggttagaagtgaattgaggggatttagggcccgtttggcatagctccagctcctgattctaagcgaggatctggaggagccgtgccaaacgggtattttttttaaactgattctcgtgtggagccgaaagattgggagtcgtttttgtgaagaaatgtgggatctaaaaaaac

SEQ ID NO: 40794 - DNA, 2256 bp, Zea Mays
ccaaccgaacggacgtgacacgcacgcacggacgcacggcacgcggacacggcgcgcgcgcggcgactccgggctggggtctccctcttcccttccctcagatccaactccgtttctccattccctccctagcccagccagggaaccagtctcagtgaatcccgcgcccggatcaatctcgcccaaggaagcagctcttcacgacttgcttccagatccatccatccatccatccatccatccgaggttgggccgtgggggtgtcggtgcggtgggaaatggggaaggggatcagcggcgacgcccgcctcgccgcggcgccttacgaccagtgggtgctgctgagccccgccgggggctcgccgcgcccgcccgcgcgctacaagcatgctgcccaagtggttcaagacaagctgtacgttgtcggagggagtcgcaacggccgttctctatcggacgtccagcgttaagccctgctagaggctcaaaacatcccaaccatgaaaatgatgccacaggtggatcgttcccagcattagcaggccacagtatggtcaagtggaaaaactatctcctggccgtagctgggagcacaaggtcgtcatcatcattaaataaggtttcagtttggcttattgatgtgcaagccaatagctggtctgctgttgaaacttatggaaaagttccaacagctcgagatggccaatcagtatccatacttggttctcgattactgatgtttggtggagaggataacaagagaaggctactgaatgatcttcatatacttgacttggagacaatgatgtgggaagaagtcaaatcagagaaaggtggtccagctcctaggtatgatcattcggctgctgtttacgctgaccagtatcttctgatctttggtggctcttctcactctacatgcttcaatgatctttacctacttgacttgcaaactctggagtggtctcaacctgatgcccaaggagcacacataactcctagaagtggtcatgctggtgctatgattgatgaaaattggtacattgttggcggtggagataatgcaagtggttccactgatacagttgtaattaatgcttccaagtttgtgtggtcagtggtcactagcgtctcagctagagatcctctagcttgtgagggtctcaccctttgctcaaccacagttgatggcgaaaaagttctaattgcctttggcggttacaatgggaaatacagcaacgagatctttgttttgaaatccaagccaagaaatttagtccaacctcgtcttcttcaatcagcagctgcagccgccgccgccgcttctgtgacagctgcctatgctgtaattactgccacagatgagaaaaccagagatattgttgctacagatgattttgatatcaagagagctcaacctgcaagtaattccaaaaagtttgttgctgaaattgatgtacttaatggagagaatggtaaactagcggctagattggcagaggttcgcgatgaaaactcaaaactaaaggataaattagacatgacaaacttgtcatatggtgaattagcaaaggaacttaaatcagttcaagatcaactagcagcagagggttcaagatgccagaagcttgagtcccaaattgctgctgcacggaagagactggaatctgctggttctttggagaatgaactagaagtattgcatcaacatatatctcaggtggaggaaaccattgcaactactcagagaagaaaatctgggggtgtttggaagtgggtggcgggtagtacagaggtctctgacgatgaatagttgacaagcagcttccgaacaggaaacgtaagcggaggatctgctacagttttgaggcagcttgtctgttgccagttgccgggtgcttcctcaaggtcttgctcatggttgatctcgaaaatatgtctcccgaaataatcttgtttatcttcttcggtggtggcacctggtagaaaattttcctgggcagtcttagacattaattcaacagtaaaagcataacatcatgcaagtataccaaatactgagagcgtatcgcattggattattagcagcgctttgtttttgtcgtctggtacctattttttggctggcggttattacaagagcggtctcatattataaattattatatagggcgttcattggttgtgacgctgggaattgaggaaatatacattgcttataccgtaaatttagaaacatttatctggtaacatata

SEQ ID NO: 40795 - DNA, 1164 bp, Zea Mays
cagctctctgctcatcagaaataaatgactctggccttgcaaagctgttatgagttgtccagattttgaggaaatgcaatcggaacaaccgtgcaaggtggtgaacagctactgggtgcaggtgatgggtataccgatggtgtatcgtactttcccaacaatttgggcagtgggcagtttgctgggtacatctattgatgtggacatgaaacacaccaggcagtttgaggttggtagagttcaagttatgattcttgatgctaatcttattcccagcacggtggaggtggtaatcggggaggaagtataccttctgtccttccgggttgaagatgggaatggggggcttcggcctgagacggataatgatgaaaaggggtttaacgatgatgaagatgacctgttgggggatgatgatggtaatgatctcaatggggctggtcctggtcagcttggaaagatgggtgatcgggctccagctgctgccactgggggaacaattacccatcattccaagtctggaattgctcagggggctgctttggatgatgaaagtggaatggggttagtggctgtgtcgggtgcgcagcaagtggcacaagacggggcagtggaaccgaaccgcagtgggtcctgttgcgctcaagagttggctgccattcctgaaatgctggcgggcagcaagtccacccggtctagcaaaagaaggggcgcgtcaatggacgaatcaactctggagcgggcggaaaggcttaaggcgcgactgaatgaaggtaatctacaggggaacctactggtgccgttcctgggcgctgcttcaaaggcatgaagctgcaaaggagaagatagtccaggcttgcagacatctggagagagtggtgatgatggtgtttgcgcattatggatggcgtttctccaatcgcattactctgtagttttttgatgtctttgaaaccctgtgtggttttccccttctttcagtttcctaggtgttttgactctgtggtcgtgtgaatgctgttttatgttgttgttggctcggaccctctacggaggagaaggccggaactgcttttccattatctaaaaaagatagattcaacgttgcttatagctaagcccttcaattgggataattatggacagacgtcaatttcagggcgg

SEQ ID NO: 40796 - DNA, 543 bp, Zea Mays
ctgaattgttttgagattggaattgtggttatggtttattttttttcccaaaactgttttgcttcttaacctaaaactattaggccatgttcgtttaggccgttccccgccgggaaccgcggccaaacctcgtggatccctccccatggaaataagcccggcccacagaaaaacaagcgttcggttacatcccacgtgggctgtatccagatcgttcctcgtcattctagcccgggaaacacgcccggtcgaccggggggtggaaaatatcctagcctggaccgcaagcgaacgcgaagggcacgcgacttctcgtcggcgtcgatctgctccgacgaccgcttctcatcgttgtagacttccaggggtcgagttatgtatgaagtagctccaatctttagaggaagaatgtcttctcaacgggttttataacgagaagaagagatagaagtaactgaagaggagacaccaccaccttcggagtctcaggccaggaatcatttctactttgacatctgtggatctgagtctgattcacctgtg

SEQ ID NO: 40797 - DNA, 461 bp, Zea Mays
ctttgccggagcgtgtgaaccgtacggaatcgccggcatgagatggcggccgcctccgcgttcgggtcgtcccccggagatggagcggttcctctgcgagaggctgcttgatgcggaggaccccatcgcggagcgcttccgggcgttcttctccctcggtccctccgcaacctccgcggggatgcgccgcgccctcatctaagctgcaaaggatccttccaacttgcttgctcatggggctgcatttgcacttggacaaatgcaggatgctgaggctattcctgatctggtggcagttctcaaagatttttctctacatccatgtcttccatgagggcaagggtcgggtctacaatgttggaggaggaaggacgccacccttggagtcactaggaggcacgaccgcggcaggcgacgggatgggtggaaccacctcggcctcgaagtggcgagccagcgaa

SEQ ID NO: 40798 - DNA, 1582 bp, Zea Mays
gcatgagatggcggccgcctccgcgttcgggtcgtcccccggagatggagcggttcctctgcgagaggctgcttgatgcggaggaccccatcgcggagcgcttccgggcgttcttctccctcggtccctccgcaacctccgcggggatgcgccgcgccctcatctaaggatgctgaggctattcctgatctggtggcagttctcaaagatttttctctacatccatgtcttccatgaggttgcttatgtgctaggtcagctgcaaaataaaaccgcttcagatgcacattctacggtcgtgaagaatgtctgtgagcatccaatggccaggcatgaagccgctgaagcccttggctcaatgcggaccaagagagcattgtgcttttggaggagtttgcaaaggatcctgagcccatagtacgagagatcggggaagtcatttgagtttctcttccttgagactcctcgtgtgcagccctatgatcacccaaatgcgaagtggctgaaggctccttggttaatgtgactgcaccaaccatgtatccactggtggcttgcctgcaaaacagatcgtagctgcctcggagctaggagaagaatcctctgatcctttcggtttggatggttttgttgagcacaagcccaagaagcctgagagagcccgagaaagggccgatggcagctctgaacataggaagctgacagggagcaaagatatttctcaagtcgcagctggaggccccttgtgaaacgcctggaaatagctgctcggcgctacagagttccatgggcgcagactgccattgacatccttgcgaagcgcgcatactcccacgagacgaggatcagctgtggttgctcggctaaggtggtcagtcggcagagccgttggtgtctgtctgatccccgcttctcccccttggcaggcgggcgtagcatgatgatctggttgggttcaacaaggacggcgctcgcctgatccatccattgcctatgcctggcctgggactcccatggtccatggatttcggtgcttgtgatgaatgcggacgacgccagggtttcttctttgggcttcggcgagcgacacgggcgtgggagctgctgtttttgtgcttggatttccgtagaggagggttgacatgacatggccatcaccatccccatgcatgacctcatacatcagctgactgactggatgtgttggatgcatctgcatcccttacagttgcgttgcgatgccaagctaagcttgcaggtacctgtacaccgtatggtaggtgggtgggtggtgcctgtactgtacaccgtatggtgtgatatagagaagggggttgacttgaagaaagtacagtagagaaagagagcaaatgttttttggttttgatgatgttttcttttcccttctcttctataagagcaactccattagtttgctaaaggactctctaaatcaataagttaggtagttggtcttaaaacttgtgtccaacagctctttatgaactttctaaacataggaacttcaattcttatatatccttattttgtctctacatttagagaccatttataaactccc

SEQ ID NO: 40799 - DNA, 794 bp, Zea Mays
atggcggccgcctccgcgttcgggtcgtcccccggagatggagcggttcctctgcgagaggctgcttgatgcggaggaccccatcgcggagcgcttccgggcgttcttctccctcggtccctccgcaacctccgcggggatgcgccgcgccctcatctaagctgcaaaggatccttccaacttgcttgctcatggggctgcatttgcacttggacaaatgcaggatgctgaggctattcctgatctggtggcagttctcaaagatttttctctacatccatgtcttccatgaggtagtgaattcgatttatatgctgcttcttgttcttgcatatccatgctaaataactgtgtacgtgtattggttaggcagcagaagctcttggagccattggcatggaaaagagcatccccctgttagaggaatgtgttagataatgcactgcttgttgtattgcatagagtgatggtttcatatatagacacagaaccctaaccctaatgggccgacatctcaacagtggtaccagcccaactacacatacaataaaagagcaaacagacacaaaacaacaaaaaaaaataacatagcaaacaggcagacattaaaagaactgaggagctcacagttcggtttatacaaatttaaaaactttaaaaccccgcagggcaagggtcgggtctacaatgttggaggaggaaggacgccacccttggagtcactaggaggcacgaccgcggcaggcgacgggatgggtggaaccacctcggcctcgaagtggcgagccagcgaa

SEQ ID NO: 40800 - DNA, 1988 bp, Zea Mays
cttcaccccaaggtgaacggccttgcagagttcgttccatacatagccactcagggcttgcatacggctccgtggatatccgccgcatcaaggtctcggctgaattccgccacagtgtccgatatctccttcagctcggccaccttctggtccatggtctgggcggcggtctccagatccttcttgagctctgggaaaggacagaagcgttaagccatgactagaccctaacaattacctcccgtccgagccctcaaagctcggctctcggaccgcttggcctccaagtgcttggagagggagtcgacgcggagggaagcttcggcgacctgacgccgggactcattccgctccgcggccatcgcctgaaggtttcccttcagcagtcgcatttcctcctgctgcagggccgcctctgccttcaggcgacggacctcctccacgagcggagacaccttcccgcgctcggccgcggcttcgtctctcagttcagcgcacagcgaagtcaagtccgccgcctcatcgctcctcagctccaactgctcgttggcacgaagcagcatggccttatggcgctgcagcgcggcccagacgtcgtgttcgcggcgaacgaagattgacttgaccatggacttcgccataaggttgcttatgtgctaggtcagctgcaaaataaaaccgcttcagatgcacattctacggtcgtgaagaatgtctgtgagcatccaatggccaggcatgaagccgctgaagcccttggctcaatgcggaccaagagagcattgtgcttttggaggagtttgcaaaggatcctgagcccatagtacgagagatcggggaagtcatttgagtttctcttccttgagactcctcgtgtgcagccctatgatcacccaaatgcgaagtggctgaaggctccttggttaatgtgactgcaccaaccatgtatccactggtggcttgcctgcaaaacagatcgtagctgcctcggagctaggagaagaatcctctgatcctttcggtttggatggttttgttgagcacaagcccaagaagcctgagagagcccgagaaagggccgatggcagctctgaacataggaagctgacagggagcaaagatatttctcaagtcgcagctggaggccccttgtgaaacgcctggaaatagctgctcggcgctacagagttccatgggcgcagactgccattgacatccttgcgaagcgcgcatactcccacgagacgaggatcagctgtggttgctcggctaaggtggtcagtcggcagagccgttggtgtctgtctgatccccgcttctcccccttggcaggcgggcgtagcatgatgatctggttgggttcaacaaggacggcgctcgcctgatccatccattgcctatgcctggcctgggactcccatggtccatggatttcggtgcttgtgatgaatgcggacgacgccagggtttcttctttgggcttcggcgagcgacacgggcgtgggagctgctgtttttgtgcttggatttccgtagaggagggttgacatgacatggccatcaccatccccatgcatgacctcatacatcagctgactgactggatgtgttggatgcatctgcatcccttacagttgcgttgcgatgccaagctaagcttgcaggtacctgtacaccgtatggtaggtgggtgggtggtgcctgtactgtacaccgtatggtgtgatatagagaagggggttgacttgaagaaagtacagtagagaaagagagcaaatgttttttggttttgatgatgttttcttttcccttctcttctataagagcaactccattagtttgctaaaggactctctaaatcaataagttaggtagttggtcttaaaacttgtgtccaacagctctttatgaactttctaaacataggaacttcaattcttatatatccttattttgtctctacatttagagaccatttataaactccc

SEQ ID NO: 40801 - DNA, 1709 bp, Zea Mays
cttcggcgacctgacgccgggactcattccgctccgcggccatcgcctgaaggtttcccttcagcagtcgcatttcctcctgctgcagggccgcctctgccttcaggcgacggacctcctccacgagcggagacaccttcccgcgctcggccgcggcttcgtctctcagttcagcgcacagcgaagtcaagtccgccgcctcatcgctcctcagctccaactgctcgttggcacgaagcagcatggccttatggcgctgcagcgcggcccagacgtcgtgttcgcggcgaacgaagattgacttgaccatggacttcgccataaggtcctgcaaaggaaggaactcacatcatcacagcagcgtggttgcttatgtgctaggtcagctgcaaaataaaaccgcttcagatgcacattctacggtcgtgaagaatgtctgtgagcatccaatggccaggcatgaagccgctgaagcccttggctcaatgcggaccaagagagcattgtgcttttggaggagtttgcaaaggatcctgagcccatagtacgagagatcggggaagtcatttgagtttctcttccttgagactcctcgtgtgcagccctatgatcacccaaatgcgaagtggctgaaggctccttggttaatgtgactgcaccaaccatgtatccactggtggcttgcctgcaaaacagatcgtagctgcctcggagctaggagaagaatcctctgatcctttcggtttggatggttttgttgagcacaagcccaagaagcctgagagagcccgagaaagggccgatggcagctctgaacataggaagctgacagggagcaaagatatttctcaagtcgcagctggaggccccttgtgaaacgcctggaaatagctgctcggcgctacagagttccatgggcgcagactgccattgacatccttgcgaagcgcgcatactcccacgagacgaggatcagctgtggttgctcggctaaggtggtcagtcggcagagccgttggtgtctgtctgatccccgcttctcccccttggcaggcgggcgtagcatgatgatctggttgggttcaacaaggacggcgctcgcctgatccatccattgcctatgcctggcctgggactcccatggtccatggatttcggtgcttgtgatgaatgcggacgacgccagggtttcttctttgggcttcggcgagcgacacgggcgtgggagctgctgtttttgtgcttggatttccgtagaggagggttgacatgacatggccatcaccatccccatgcatgacctcatacatcagctgactgactggatgtgttggatgcatctgcatcccttacagttgcgttgcgatgccaagctaagcttgcaggtacctgtacaccgtatggtaggtgggtgggtggtgcctgtactgtacaccgtatggtgtgatatagagaagggggttgacttgaagaaagtacagtagagaaagagagcaaatgttttttggttttgatgatgttttcttttcccttctcttctataagagcaactccattagtttgctaaaggactctctaaatcaataagttaggtagttggtcttaaaacttgtgtccaacagctctttatgaactttctaaacataggaacttcaattcttatatatccttattttgtctctacatttagagaccatttataaactccc

SEQ ID NO: 40802 - DNA, 1939 bp, Zea Mays
tgacgccgggactcattccgctccgcggccatcgcctgaaggtttcccttcagcagtcgcatttcctcctgctgcagggccgcctctgccttcaggcgacggacctcctccacgagcggagacaccttcccgcgctcggccgcggcttcgtctctcagttcagcgcacagcgaagtcaagtccgccgcctcatcgctcctcagctccaactgctcgttggcacgaagcagcatggccttatggcgctgcagcgcggcccagacgtcgtgttcgcggcgaacgaagattgacttgaccatggacttcgccataaggtcctgcaaaggaaggaactcacatcatcacagcagcgtggtagtcttgattttaacatttacatgatattcaaattggtataatctgttaaaatggagttgagcactgacttgagcagccttgcagttattttttaaatttatgatgtcatatgtcagttgtttgtcagtattgttagttgttacgctagggaggacaacatcccgttacttcttagtttttggtcagtcagatgccttcaattttgtctaatgcagcacttttttctctctctcgacaggttgcttatgtgctaggtcagctgcaaaataaaaccgcttcagatgcacattctacggtcgtgaagaatgtctgtgagcatccaatggccaggcatgaagccgctgaagcccttggctcaatgcggaccaagagagcattgtgcttttggaggagtttgcaaaggatcctgagcccatagtacgagagatcggggaagtcatttgagtttctcttccttgagactcctcgtgtgcagccctatgatcacccaaatgcgaagtggctgaaggctccttggttaatgtgactgcaccaaccatgtatccactggtggcttgcctgcaaaacagatcgtagctgcctcggagctaggagaagaatcctctgatcctttcggtttggatggttttgttgagcacaagcccaagaagcctgagagagcccgagaaagggccgatggcagctctgaacataggaagctgacagggagcaaagatatttctcaagtcgcagctggaggccccttgtgaaacgcctggaaatagctgctcggcgctacagagttccatgggcgcagactgccattgacatccttgcgaagcgcgcatactcccacgagacgaggatcagctgtggttgctcggctaaggtggtcagtcggcagagccgttggtgtctgtctgatccccgcttctcccccttggcaggcgggcgtagcatgatgatctggttgggttcaacaaggacggcgctcgcctgatccatccattgcctatgcctggcctgggactcccatggtccatggatttcggtgcttgtgatgaatgcggacgacgccagggtttcttctttgggcttcggcgagcgacacgggcgtgggagctgctgtttttgtgcttggatttccgtagaggagggttgacatgacatggccatcaccatccccatgcatgacctcatacatcagctgactgactggatgtgttggatgcatctgcatcccttacagttgcgttgcgatgccaagctaagcttgcaggtacctgtacaccgtatggtaggtgggtgggtggtgcctgtactgtacaccgtatggtgtgatatagagaagggggttgacttgaagaaagtacagtagagaaagagagcaaatgttttttggttttgatgatgttttcttttcccttctcttctataagagcaactccattagtttgctaaaggactctctaaatcaataagttaggtagttggtcttaaaacttgtgtccaacagctctttatgaactttctaaacataggaacttcaattcttatatatccttattttgtctctacatttagagaccatttataaactccc

SEQ ID NO: 40803 - DNA, 2233 bp, Zea Mays
cttttctttcaatcagagagctgacacttgccagttcccacagcatccctgctcttctcttctgtttggagcatggacgcgcactagacgcacatacctgcggtcaagtgggtggctgaaaggacatgcagcttcaaaatcaagtgggtgccatctgttcagatcaacgctgcctgcctcgatcggtagtacctgagtgcgcaaataccggatttatttgtttattctctgtgagcaggagtttgcctacggcctacctgaattgtcagtctgtcactgacaacgtcgttctccctgtacctaagagaaacagtggtagacgagacgagggacacgttttgtttggtgacatttccatcccaccaccaccactccaccagcaggtctgcttgcttgtgtttggtggatctgaatcaccactcactcccacctgctcgccatctccccttctctctctccctgctgccgtgcggctccagctccagctgcaggcgcgggagaggggccgcatcgacctccccaatccccatggccgctaccaagatccttgacaggctcaaggtgggggcttcacctccagcgcccggcggcgcgctcccgctcaccttcttcgacgtgccgtggctcttcacgggccccgtggagcgcgtcttcttctacccctacgcgcacacggcggaccacttcgccgcccacctcctgccgtccctcgtctcctccctctccgccacgctgcgcgcgttctacccgctgctcggccgcgtccgcccgtgcccggacggcggcggcgggtacgaattcttctgctccgacggcggcgaggccgtcgagctcatcgtcgccgagagctccgacgacttcgacgagctctccgccggcgggccgagggacgtcgcccggctctacgcgctggtgccgcggctcccgtcgcccggggccgacggctccttcgccctcgcggcggcgcaggtcaccgtgttccccgcccgcggggtcgccgtcggcgtgtccatccaccacgtggcctgcgacgactccagctacacgcacttcatcaggacctgggccgcccagtgccgcgtggctagcggcggcgcggacgcggtgccgccgccgcctttcctggaccgtggcgtggtcgccgaccccgagggcctcgccggcaggacgctcgacgaaatgcgccagctggcaggcaacggcccgcctccgcctccgccgccggcggcaggcccacagccgaagcttgtcatcgcgtcgttcgcgctcacccgcgaccgcatcgacgcgctgaagcggcgcgtggccgccaaggtcgcggcggacggcggcggcacgggccgcgtccactgctcggcgttcacggtggcgtgcgcgctggcgtgggcctgcctggcacgcgtgggcggcggggagcggccccgcgcgcacctgctgttctcggtggagtgccggcgccgcctggcgccgccgatcccgcaggagtacctgggcaactgcctccggccgtgcttcgtggaggtgggcacgggcgagctgctgggcggcgacggcgtggcggctgcggccgcggcgatcggcgcggccgtcgcggcgctcgacggcggcgtgctggatggggcaggcgggtggttccacaagatcctgtcgctggtcccggagcgcccgatgtcggtgggcgggtccccgcggtacggtgtgtacgagactgacttcgggttgggccggccggccaaggtggagctggtgtccatcgacaagacgcccggcacggtgtccctggcggaggcccgcgacgccggggtggaggtcggcgtcgtgctgcaggaggccgagatggcgcgcttcggctcctgcttcgccgatgcactggaggtgctctgtgacagtgtgactgaactgaactgagcggcatcgacgatggcacctccattttcgagaagctggtcatcagctcgcgattacatgtaatggagctcgcgaaattacactacatgaagtggtgtttaaggagtagtataataagaaaatatagggataagagagatgatccgaagtgtatatttgagggagggatgggtatattttcatatttgcgtggagtaatctcgtatgcgagaatatcaattgtgtgattgataaaaaagaagggttcattgattcgtgctattatagtttttgaagttatgagatttgttattataattatctattttgaaatttggcattacaa

SEQ ID NO: 40804 - DNA, 2043 bp, Zea Mays
ctcagcccagtgaagcccagaaggtacctaatgagctctgctacttactgttaagacgagaaagcccatgcccaacccgtcgccagatcccccgcctcgccctccccgccggcctgcgccgccgcgagcaagcaaccgctccatcgcccaccatggcgctacgccgcgtcgcctccgttctcctcagaacccgcctgcgaggccccgtcacgtcccccgcgcgcaaagccctcgtacaccctctccaagcgccgccccgccgccaattctcgccgcggccgcctcctcccgtccccttcgccgccgccgccgccgcggatgccgcggaagaggcgttcgaggcagcgaggtcaactaacgacatgctcgctgcattctcccgcctcgaggccaccgtgcccgccaacgacaagcgcctcgccctcgcctgcctcaagctcggccagcacctcgaggcgtccggctccgccgacacgtcccgcgtcctcgcgcttgccctccggtgcctgggcatactcgaggccagccccaacgcctccaccccctcctccgcctcggacgccgtctcgctcgccatggcactccacctcgccggctccgcctccttcgacctctcccgcttccacgacgcgttgtccttcctctcccgcgcgctacgcctcctcgccccgctcctccccgaaacaggcgtcgcgttcgaggttggggaggaaccgggagggttcgacgtcaggcccgtggcgcacgcggtgcggctgcagctggccaacgtgaagacggcgctggggaggcgggaggaggcgctcgccgacatgcgcgcctgccttgacctcaaggagtccattctgcctccgggcagccgggagctgggagtcgcgtaccgggacctcgcggaggcgcacgccaccctgcttgacttcaagcaggcgctgccgttctgccagaaggcgctggagctgcatgagtcgacgctcggcaagaactccgtggaggttgcgcacgacaggcgcctgcttggtgtgatatacactgggctagagcagcatgagcaggcgctggagcagaacgagatttcacagagggtgatcaagagctggggtgcagctagccctgacctcctcctacatgctgagattgatgcggcaaacatcaatattgcattgggaaagtttgatgaggctgtcagcgtgttgaagaatgtcgctaagcaggtgaagaaggatagcgagacgcgagctctagttttcatatcgatggcgaaggcgctcgctaaccaggagaaggctggggacacaaagaggtgcttggagattgcttgcgacatcctggagaagaagaaattcgcgacacccgacaaggtggcagagatgtacatagaggtatcctcactgtttgagacggtgaatgagttggaaaaggcaatatctttgctgaagaagagcctgggaatgcttgagaggatgcctcaggcacagcacctggagggcaatgtcgcagcgaggattgggtggctgttgcttttgactggtaaggtctctgaagctgtcccgtacttggaggatgcagtggagaggatgaaggacagcttcggtccgaagcattatggagtagggtatgtgtataacaacttgggtgctgcttacatggagatggaccgtccgcagtctgctgcacagatgtttgcgctcgctaaagaagtcatggatgtctccttagggcctcaccattcggataccatcgaggcttgtcagagccttgctaatgcctacaatgctatgggaaggggaggaggcgaggagctgctgtgttcaggccaacaagcggcatgcctaagcaaccttcaaaataaccaactctactacttcaaagtagccctcctctagattccagatcaagctccaccaccactgcctctggccatgagttggatgatgattactaatcttagatgcaagttgtaacatacatgttgcatagacttgtgttatttgttttgtgaacttatgagtatgaatatatcctatcctgtcattttatgtcaag

SEQ ID NO: 40805 - DNA, 1716 bp, Zea Mays
cccccgcctcgccctccccgccggcctgcgccgccgcgagcaagcaaccgctccatcgcccaccatggcgctacgccgcgtcgcctccgttctcctcagaacccgcctgcgaggccccgtcacgtcccccgcgcgcaaagccctcgtacaccctctccaagcgccgccccgccgccaattctcgccgcggccgcctcctcccgtccccttcgccgccgccgccgccgcggatgccgcggaagaggcgttcgaggcagcgaggtcaactaacgacatgctcgctgcattctcccgcctcgaggccaccgtgcccgccaacgacaagcgcctcgccctcgcctgcctcaagctcggccagcacctcgaggcgtccggctccgccgacacgtcccgcgtcctcgcgcttgccctccggtgcctgggcatactcgaggccagccccaacgcctccaccccctcctccgcctcggacgccgtctcgctcgccatggcactccacctcgccggctccgcctccttcgacctctcccgcttccacgacgcgttgtccttcctctcccgcgcgctacgcctcctcgccccgctcctccccgaaacaggcgtcgcgttcgaggttggggaggaaccgggagggttcgacgtcaggcccgtggcgcacgcggtgcggctgcagctggccaacgtgaagacggcgctggggaggcgggaggaggcgctcgccgacatgcgcgcctgccttgacctcaaggagtccattctgcctccgggcagccgggagctgggagtcgcgtaccgggacctcgcggaggcgcacgccaccctgcttgacttcaagcaggcgctgccgttctgccagaaggcgctggagctgcatgagtcgacgctcggcaagaactccgtggaggttgcgcacgacaggcgcctgcttggtgtgatatacactgggctagagcagcatgagcaggcgctggagcagaacgagatttcacagagggtgatcaagagctggggtgcagctagccctgacctcctcctacatgctgagattgatgcggcaaacatcaatattgcattgggaaagtttgatgaggctgtcagcgtgttgaagaatgtcgctaagcaggtgaagaaggatagcgagacgcgagctctagttttcatatcgatggcgaaggcgctcgctaaccaggagaaggctggggacacaaagaggtgcttggagattgcttgcgacatcctggagaagaagaaattcgcgacacccgacaaggtggcagagatgtacatagaggtatcctcactgtttgagacggtgaatgagttggaaaaggcaatatctttgctgaagaagagcctgggaatgcttgagaggatgcctcaggcacagcacctggagggcaatgtcgcagcgaggattgggtggctgttgcttttgactggtaaggtctctgaagctgtcccgtacttggaggatgcagtggagaggatgaaggacagcttcggtccgaagcattatggagtagggtatgtgtataacaacttgggtgctgcttacatggagatggaccgtccgcagtctgctgcacagatgtttgcgctcgctaaagaagtcatggatgtctccttagggcctcaccattcggataccatcgaggcttgtcagagccttgctaatgcctacaatgctatgggaagttgatatattccagacatgct

SEQ ID NO: 40806 - DNA, 2064 bp, Zea Mays
tggatcagacctatctaggccgagcttcatctggctgtgccggaccggcggcgtttgaacatcactatccggagcccgagcctcagtctcacaggagggagagggacagcggaggagaaatcgcccttcttccagtttcattcagacaaattccttcccagttttgactgtcgttgctcctgctgcttccgtgcgctccctgaatcccagtctcctcccccgtcgcgtcccggatcggagctcccctccggcacgggcgtctccactcccctcggatcggccagccccgtcgccgcaagataagcaagctatgaggtgcctgcctttcttgcatggagacgtcagtgagaaggatcctgtcactaagtcggcctctgtacggtccatgagcacaacatcgcgctcccgctccggttcagacttcacctccttgaatgtttccgacatgagcgccgagtcaataaggaggacacagtaccccagcttcactgactgcccgtctaacctgagggtgttctcctttgctgaattgaagagtgccacacgcaacttcagccgatctctcatgcttggcgagggtggctttggctgtgtgttcagcggcatcatcaagacctctgacaaacctaatgaacgaattgagattgctgttaagcaattgaaccgtaaaggacttcagaaggagtggttgacagagatgaatgtgcttggaattgtggaccatccaaacctagttaaactaataggctactgtgctgaagatgatgagaggggagtacaacgccttctagtgtatgaatatatgcctaatggaagtgtggatgatcacttatcaagtaggtcaactactctgtcatggccaatgagactaaaagtagctcttgattctgctcggggactgaagtatctgcatgaagaaatggaattccaggttattttccgagacctaaaaacatccaacattctgctggatgaaaactggaatgctaagttgtcagactttggtttggctaggcatgggccaacagaaggtctcacccatgtctccaccgcggtggttggaactctaggctacacagctccagaatacatgcagactggacacctcacggcgaagagcgacatatggagctacggagtcgtcctgtacgagctcatcacaggccgccgccccatcgaccagaaccgtccaaagagcgagcagaagcttctggactgggtgaagccatacatctcggacgtgaagcggttccccgtgatcatcgacccgcggctggaggggcactacaacctcaagtccgcgacgaagctggcgagcgtcgcgaaccggtgcatggtccggctgcccaagtcccgccccaagatgagcgaggtgtacggcatggtccagaggatcgtggacggcgtcgggaccggcccgccgcagcccccgctgctgcactaccaccatggctcggcctccgagccgggtgccaagcgcgccgagaaagggtcgctgaggaggaggttccgggaattcaggtccggctgccggcacgttgtcctgcggcggggcaggaagcctgaggtcgtgaaggacctctgagggagggaggcggtggtggatccggtgctgcaagtatatggtagtagtaggtgttcatagagacggtggtatcagttccaccgtgtagtgcttgggttggtatagggtgagttcatgcatgcataccagtcttgaagaagaaagaaagaaagaaaaaaagaaagaaagacaaggtgcaccgttgagcggtggcgttcgtgtagagtagtgctagctgtggttttgacctcctgtgtggtttacacaatgtgtgagctgcgataaggtgatctacagcatagggacccctttgtgtttacagtgcaacttctgctggctctttcgtcttgttgagaatcctttcagtagagttagaaattataggagtggtcttcgggaaagcctgcttccgttctgttccattgattcagattctcactcccttcttcgagtgtttatttgattttttatattaaagttgagattcttcgaaaagtaag

SEQ ID NO: 40807 - DNA, 2741 bp, Zea Mays
gcatagattctgctacttcagtccaaatcaaaggcgtgtttttgggctcggcgctgtctgaatttgagctatgaggtgcctgcctttcttgcatggagacgtcagtgagaaggatcctgtcactaagtcggcctctgtacggtccatgagcacaacatcgcgctcccgctccggttcagacttcacctccttgaatgtttccgacatgagcgccgagtcaataaggaggacacagtaccccagcttcactgactgcccgtctaacctgagggtgttctcctttgctgaattgaagagtgccacacgcaacttcagccgatctctcatgcttggcgagggtggctttggctgtgtgttcagcggcatcatcaagacctctgacaaacctaatgaacgaattgagattgctgttaagcaattgaaccgtaaaggacttcaggggcagaaggagtggttgacagagatgaatgtgcttggaattgtggaccatccaaacctagttaaactaataggctactgtgctgaagatgatgagaggggagtacaacgccttctagtgtatgaatatatgcctaatggaagtgtggatgatcacttatcaagtaggtcaactactctgtcatggccaatgagactaaaagtagctcttgattctgctcggggactgaagtatctgcatgaagaaatggaattccaggttattttccgagacctaaaaacatccaacattctgctggatgaaaactggaatgctaagttgtcagactttggtttggctaggcatgggccaacagaaggtctcacccatgtctccaccgcggtatgcacaattacaagccgactgttagtttattacattagtgtgtttagattgaatagtgttttgtatccttttggaaagtagatactagtatcctgacagtattcaagtgatgaaaggcatattacttgaacaaaaagagaattatggtgaagaaaaaatagacaattagtgagctcttttagctgtacttctataacattattgactttttatgccattgaatttggatactgagttgctaggcctccagaaacagaattatttttgtttactacttgcacaagtaacctcttaatgcatatgtttagtttcagtaccagacatgaagaacagagtcaaaaattgagaatgggaattgaagtaatggagaggtttgactacttgaaaacattgcaagtgatattcatttcctgaccagcttcagaatgtagcatgccactgtattctagccaaaatattcgaggaaaaaaaaacccagaagtcacctcttttcctgatcgcaggtgacaggaggggttgccccctactgattgtatgtttaaaaggagttgtgtgcagccaaaaaggaaaataaaagcccaagattacacaaaaacctttatccatcattttgtagcaggaaagttggatttcattgctcaatgggtgatcagagcaatagtatttctaggaagctctctgcatcgtcaaactttcaaagacatggcacacctcttaataacaaatagagaaggacactattaagtactttttttttgctaagttaccagctgccatatgaatttgccacagacagttttacatctatgtcctctccatgccatctcactagttcgttcctagagcagtctgaagttaccattccatgtaactacgaccctctttttgttatgtttcattttgaacaggtggttggaactctaggctacacagctccagaatacatgcagactggacacctcacggcgaagagcgacatatggagctacggagtcgtcctgtacgagctcatcacaggccgccgccccatcgaccagaaccgtccaaagagcgagcagaagcttctggactgggtgaagccatacatctcggacgtgaagcggttccccgtgatcatcgacccgcggctggaggggcactacaacctcaagtccgcgacgaagctggcgagcgtcgcgaaccggtgcatggtccggctgcccaagtcccgccccaagatgagcgaggtgtacggcatggtccagaggatcgtggacggcgtcgggaccggcccgccgcagcccccgctgctgcactaccaccatggctcggcctccgagccgggtgccaagcgcgccgagaaagggtcgctgaggaggaggttccgggaattcaggtccggctgccggcacgttgtcctgcggcggggcaggaagcctgaggtcgtgaaggacctctgagggagggaggcggtggtggatccggtgctgcaagtatatggtagtagtaggtgttcatagagacggtggtatcagttccaccgtgtagtgcttgggttggtatagggtgagttcatgcatgcataccagtcttgaagaagaaagaaagaaagaaaaaaagaaagaaagacaaggtgcaccgttgagcggtggcgttcgtgtagagtagtgctagctgtggttttgacctcctgtgtggtttacacaatgtgtgagctgcgataaggtgatctacagcatagggacccctttgtgtttacagtgcaacttctgctggctctttcgtcttgttgagaatcctttcagtagagttagaaattataggagtggtcttcgggaaagcctgcttccgttctgttccattgattcagattctcactcccttcttcgagtgtttatttgattttttatattaaagttgagattcttcgaaaagtaag

SEQ ID NO: 40808 - DNA, 2720 bp, Zea Mays
cttcagtccaaatcaaaggcgtgtttttgggctcggcgctgtctgaatttgagctatgaggtgcctgcctttcttgcatggagacgtcagtgagaaggatcctgtcactaagtcggcctctgtacggtccatgagcacaacatcgcgctcccgctccggttcagacttcacctccttgaatgtttccgacatgagcgccgagtcaataaggaggacacagtaccccagcttcactgactgcccgtctaacctgagggtgttctcctttgctgaattgaagagtgccacacgcaacttcagccgatctctcatgcttggcgagggtggctttggctgtgtgttcagcggcatcatcaagacctctgacaaacctaatgaacgaattgagattgctgttaagcaattgaaccgtaaaggacttcagaaggagtggttgacagagatgaatgtgcttggaattgtggaccatccaaacctagttaaactaataggctactgtgctgaagatgatgagaggggagtacaacgccttctagtgtatgaatatatgcctaatggaagtgtggatgatcacttatcaagtaggtcaactactctgtcatggccaatgagactaaaagtagctcttgattctgctcggggactgaagtatctgcatgaagaaatggaattccaggttattttccgagacctaaaaacatccaacattctgctggatgaaaactggaatgctaagttgtcagactttggtttggctaggcatgggccaacagaaggtctcacccatgtctccaccgcggtatgcacaattacaagccgactgttagtttattacattagtgtgtttagattgaatagtgttttgtatccttttggaaagtagatactagtatcctgacagtattcaagtgatgaaaggcatattacttgaacaaaaagagaattatggtgaagaaaaaatagacaattagtgagctcttttagctgtacttctataacattattgactttttatgccattgaatttggatactgagttgctaggcctccagaaacagaattatttttgtttactacttgcacaagtaacctcttaatgcatatgtttagtttcagtaccagacatgaagaacagagtcaaaaattgagaatgggaattgaagtaatggagaggtttgactacttgaaaacattgcaagtgatattcatttcctgaccagcttcagaatgtagcatgccactgtattctagccaaaatattcgaggaaaaaaaaacccagaagtcacctcttttcctgatcgcaggtgacaggaggggttgccccctactgattgtatgtttaaaaggagttgtgtgcagccaaaaaggaaaataaaagcccaagattacacaaaaacctttatccatcattttgtagcaggaaagttggatttcattgctcaatgggtgatcagagcaatagtatttctaggaagctctctgcatcgtcaaactttcaaagacatggcacacctcttaataacaaatagagaaggacactattaagtactttttttttgctaagttaccagctgccatatgaatttgccacagacagttttacatctatgtcctctccatgccatctcactagttcgttcctagagcagtctgaagttaccattccatgtaactacgaccctctttttgttatgtttcattttgaacaggtggttggaactctaggctacacagctccagaatacatgcagactggacacctcacggcgaagagcgacatatggagctacggagtcgtcctgtacgagctcatcacaggccgccgccccatcgaccagaaccgtccaaagagcgagcagaagcttctggactgggtgaagccatacatctcggacgtgaagcggttccccgtgatcatcgacccgcggctggaggggcactacaacctcaagtccgcgacgaagctggcgagcgtcgcgaaccggtgcatggtccggctgcccaagtcccgccccaagatgagcgaggtgtacggcatggtccagaggatcgtggacggcgtcgggaccggcccgccgcagcccccgctgctgcactaccaccatggctcggcctccgagccgggtgccaagcgcgccgagaaagggtcgctgaggaggaggttccgggaattcaggtccggctgccggcacgttgtcctgcggcggggcaggaagcctgaggtcgtgaaggacctctgagggagggaggcggtggtggatccggtgctgcaagtatatggtagtagtaggtgttcatagagacggtggtatcagttccaccgtgtagtgcttgggttggtatagggtgagttcatgcatgcataccagtcttgaagaagaaagaaagaaagaaaaaaagaaagaaagacaaggtgcaccgttgagcggtggcgttcgtgtagagtagtgctagctgtggttttgacctcctgtgtggtttacacaatgtgtgagctgcgataaggtgatctacagcatagggacccctttgtgtttacagtgcaacttctgctggctctttcgtcttgttgagaatcctttcagtagagttagaaattataggagtggtcttcgggaaagcctgcttccgttctgttccattgattcagattctcactcccttcttcgagtgtttatttgattttttatattaaagttgagattcttcgaaaagtaag

SEQ ID NO: 40809 - DNA, 2555 bp, Zea Mays
tagatccctgcatcgaaagcttagctttccgctcaatttctgcgggggcttgggcgtgaatcacctcctccggctgcatgtctgctgtgttggctggcatgtgtgtggtttgtgatcgccgattttgacaagaaaaagattagcaagagagtattcgatgtaatgaagagtgaattcttggctcaatcaaagtcagacggggcaggcaaacaagaaaattatcctgctcttggccttggagatggaacagatactcaaaaaatgctggagagaagcgatagcagcataccgtttgaattatacaagaaccagactaccgttgttatctcaagagaggagtttgtaagtgttgtatgcgatgccctctctttgtacaagtatgttggacccaaccagaaagcagacctgctcctcgcttgcagaattaaagagagaaaggaatcggtgacaatactcttgtgtgggacaagcggatgcggcaagtccactttatcatctttgctgggtagtaggctgggtatcacgacagtggtttctactgattccatacgccatatgatgagaggcttcgcagatcaaaaacagaatcctcttctctatgcctcgacctaccatgcaggcgaatatctagatcctattgcagttgctcaggcgaaggcaaagcacaaggcgaataaacccacggttgtttctcatccaaatacctgtggaggcacttcttcagacgacaaatcacagcaagggtcctcggaactacctcctagagccgaactgattggcagcaagcagatggcggtagaaggctacaaggcgcagagcgagatggtgatcgacagcctggacagattaattacctcctgggaagagcagaaagaatccgtgatcgtcgaaggagtgcatctaagccttaacttcgtgatgggattaatgaagaagcatccttccataataccattcatggtatacatcacaaacgaggagaaacacatggaacggtttgctgtgcgtgcgaagtacatgacactagacccagcgaagaacaggtacatcaagtacatccgaaacatcagagccatccaggaatacctgtgcaaccgcgctgacaagcacctcgtgccgaagatcaacaacaccaacgtcgaccagagcgtggccgccatacacgccacggccttcagctgcctccgccggcgagcggccggggagcagctgtacgacctcaacacgaacactgctgccgtagtggacgaggagtacaggaaccagcgtgcggccaacaccttgggttccaagggcatgttccagctgatccagaggcaggggtcttcgaggaaccttatggcgctcctcaacaccgacggctcagtcaccaaagcctggcatgtaggtgccactgacggcggtggggaaaatcttggtggtaatacaagcagcggcaagaagcccgatgaaaatcgtgtgctggatgcctcgcagattgggaaggcagaggcggtcaacctccagttcggtcctttcgggatcagcgcctggatgagcgacacgggtggaaccagccatgctggaagtgtggaagacctgagggctgatggcgtggagactggtggtaggaattactcgtcgtgctgcagttcgccgaagacgtcggattccacttcgaaggagcttatggaggactattcggtctatgtcagcgaagaagaggaagaggaggaagctgacgacccttgtgatgctgaaactgatgaagatctatccgatgaagaaagagacatgcacgagatagatgcaggctctgtggacgagcactcgaccaagtcagacgaggagtatgaggacctagccatgcgcgatgtgatggagagtggcgactggtccgacgatgagcagcaaggcgtcagcaaaaccaagaactcacctaccctggagtgcagcattcatgggagtggggcagctgaagatgatggcataaatggccggtaccaccacaacctggacctgttcctgaagatgtccaaggaggtggtagccagcaacagaatgccttgcgcgtcgtcatagccccaccggccggcgacacgctgccctggtcccggcgggtgatacgtttcttgggctggtgctgtagagtggtggctgtgtctttgtagcgtgtacctgtgcaaactacaagatgccctcacctggatgtaaagagagaccctgatgctttgtccaggcaaccatgttcatccataccatgtagtagtaggagtattagggggtgtttgggaacaaagtttttctgcagttttggaagaatactgcagtattctcaaatactgcagtattatatacataatggtgtttggtaagctgggtaaaatctctgttttcaaaactgaagtattgcaaatactatagttgttttaaggcattctaaacttagctctggacctcagttttcaaaactgcggtattataaactacggtattgtcataactaaagtatagtatagtatttcaaaaactgtggttttcaaaaactttgttcccaaacagggccttatcttcgg

SEQ ID NO: 40810 - DNA, 2646 bp, Zea Mays
ctgcatcgaaagcttagctttccgctcaatttctgcgggggcttgggcgtgaatcacctcctccggctgcatgtctgctgtgttggctggcatgtgtgtggtttgtgatcgccgattttgacaagaaaaaggcttgagctgaactcccatcccaaggcttccgaattccgcgttctttggaaacccgaaaaagattccaccttcagttcttgttcttgtttaccaccaaattagcaagagagtattcgatgtaatgaagagtgaattcttggctcaatcaaagtcagacggggcaggcaaacaagaaaattatcctgctcttggccttggagatggaacagatactcaaaaaatgctggagagaagcgatagcagcataccgtttgaattatacaagaaccagactaccgttgttatctcaagagaggagtttgtaagtgttgtatgcgatgccctctctttgtacaagtatgttggacccaaccagaaagcagacctgctcctcgcttgcagaattaaagagagaaaggaatcggtgacaatactcttgtgtgggacaagcggatgcggcaagtccactttatcatctttgctgggtagtaggctgggtatcacgacagtggtttctactgattccatacgccatatgatgagaggcttcgcagatcaaaaacagaatcctcttctctatgcctcgacctaccatgcaggcgaatatctagatcctattgcagttgctcaggcgaaggcaaagcacaaggcgaataaacccacggttgtttctcatccaaatacctgtggaggcacttcttcagacgacaaatcacagcaagggtcctcggaactacctcctagagccgaactgattggcagcaagcagatggcggtagaaggctacaaggcgcagagcgagatggtgatcgacagcctggacagattaattacctcctgggaagagcagaaagaatccgtgatcgtcgaaggagtgcatctaagccttaacttcgtgatgggattaatgaagaagcatccttccataataccattcatggtatacatcacaaacgaggagaaacacatggaacggtttgctgtgcgtgcgaagtacatgacactagacccagcgaagaacaggtacatcaagtacatccgaaacatcagagccatccaggaatacctgtgcaaccgcgctgacaagcacctcgtgccgaagatcaacaacaccaacgtcgaccagagcgtggccgccatacacgccacggccttcagctgcctccgccggcgagcggccggggagcagctgtacgacctcaacacgaacactgctgccgtagtggacgaggagtacaggaaccagcgtgcggccaacaccttgggttccaagggcatgttccagctgatccagaggcaggggtcttcgaggaaccttatggcgctcctcaacaccgacggctcagtcaccaaagcctggcatgtaggtgccactgacggcggtggggaaaatcttggtggtaatacaagcagcggcaagaagcccgatgaaaatcgtgtgctggatgcctcgcagattgggaaggcagaggcggtcaacctccagttcggtcctttcgggatcagcgcctggatgagcgacacgggtggaaccagccatgctggaagtgtggaagacctgagggctgatggcgtggagactggtggtaggaattactcgtcgtgctgcagttcgccgaagacgtcggattccacttcgaaggagcttatggaggactattcggtctatgtcagcgaagaagaggaagaggaggaagctgacgacccttgtgatgctgaaactgatgaagatctatccgatgaagaaagagacatgcacgagatagatgcaggctctgtggacgagcactcgaccaagtcagacgaggagtatgaggacctagccatgcgcgatgtgatggagagtggcgactggtccgacgatgagcagcaaggcgtcagcaaaaccaagaactcacctaccctggagtgcagcattcatgggagtggggcagctgaagatgatggcataaatggccggtaccaccacaacctggacctgttcctgaagatgtccaaggaggtggtagccagcaacagaatgccttgcgcgtcgtcatagccccaccggccggcgacacgctgccctggtcccggcgggtgatacgtttcttgggctggtgctgtagagtggtggctgtgtctttgtagcgtgtacctgtgcaaactacaagatgccctcacctggatgtaaagagagaccctgatgctttgtccaggcaaccatgttcatccataccatgtagtagtaggagtattagggggtgtttgggaacaaagtttttctgcagttttggaagaatactgcagtattctcaaatactgcagtattatatacataatggtgtttggtaagctgggtaaaatctctgttttcaaaactgaagtattgcaaatactatagttgttttaaggcattctaaacttagctctggacctcagttttcaaaactgcggtattataaactacggtattgtcataactaaagtatagtatagtatttcaaaaactgtggttttcaaaaactttgttcccaaacagggccttatcttcgg

SEQ ID NO: 40811 - DNA, 2492 bp, Zea Mays
ctgctgtgttggctggcatgtgtgtggtttgtgatcgccgattttgacaagaaaaagattagcaagagagtattcgatgtaatgaagagtgaattcttggctcaatcaaagtcagacggggcaggcaaacaagaaaattatcctgctcttggccttggagatggaacagatactcaaaaaatgctggagagaagcgatagcagcataccgtttgaattatacaagaaccagactaccgttgttatctcaagagaggagtttgtaagtgttgtatgcgatgccctctctttgtacaagtatgttggacccaaccagaaagcagacctgctcctcgcttgcagaattaaagagagaaaggaatcggtgacaatactcttgtgtgggacaagcggatgcggcaagtccactttatcatctttgctgggtagtaggctgggtatcacgacagtggtttctactgattccatacgccatatgatgagaggcttcgcagatcaaaaacagaatcctcttctctatgcctcgacctaccatgcaggcgaatatctagatcctattgcagttgctcaggcgaaggcaaagcacaaggcgaataaacccacggttgtttctcatccaaatacctgtggaggcacttcttcagacgacaaatcacagcaagggtcctcggaactacctcctagagccgaactgattggcagcaagcagatggcggtagaaggctacaaggcgcagagcgagatggtgatcgacagcctggacagattaattacctcctgggaagagcagaaagaatccgtgatcgtcgaaggagtgcatctaagccttaacttcgtgatgggattaatgaagaagcatccttccataataccattcatggtatacatcacaaacgaggagaaacacatggaacggtttgctgtgcgtgcgaagtacatgacactagacccagcgaagaacaggtacatcaagtacatccgaaacatcagagccatccaggaatacctgtgcaaccgcgctgacaagcacctcgtgccgaagatcaacaacaccaacgtcgaccagagcgtggccgccatacacgccacggccttcagctgcctccgccggcgagcggccggggagcagctgtacgacctcaacacgaacactgctgccgtagtggacgaggagtacaggaaccagcgtgcggccaacaccttgggttccaagggcatgttccagctgatccagaggcaggggtcttcgaggaaccttatggcgctcctcaacaccgacggctcagtcaccaaagcctggcatgtaggtgccactgacggcggtggggaaaatcttggtggtaatacaagcagcggcaagaagcccgatgaaaatcgtgtgctggatgcctcgcagattgggaaggcagaggcggtcaacctccagttcggtcctttcgggatcagcgcctggatgagcgacacgggtggaaccagccatgctggaagtgtggaagacctgagggctgatggcgtggagactggtggtaggaattactcgtcgtgctgcagttcgccgaagacgtcggattccacttcgaaggagatgctttcacctcgccagcttatggaggactattcggtctatgtcagcgaagaagaggaagaggaggaagctgacgacccttgtgatgctgaaactgatgaagatctatccgatgaagaaagagacatgcacgagatagatgcaggctctgtggacgagcactcgaccaagtcagacgaggagtatgaggacctagccatgcgcgatgtgatggagagtggcgactggtccgacgatgagcagcaaggcgtcagcaaaaccaagaactcacctaccctggagtgcagcattcatgggagtggggcagctgaagatgatggcataaatggccggtaccaccacaacctggacctgttcctgaagatgtccaaggaggtggtagccagcaacagaatgccttgcgcgtcgtcatagccccaccggccggcgacacgctgccctggtcccggcgggtgatacgtttcttgggctggtgctgtagagtggtggctgtgtctttgtagcgtgtacctgtgcaaactacaagatgccctcacctggatgtaaagagagaccctgatgctttgtccaggcaaccatgttcatccataccatgtagtagtaggagtattagggggtgtttgggaacaaagtttttctgcagttttggaagaatactgcagtattctcaaatactgcagtattatatacataatggtgtttggtaagctgggtaaaatctctgttttcaaaactgaagtattgcaaatactatagttgttttaaggcattctaaacttagctctggacctcagttttcaaaactgcggtattataaactacggtattgtcataactaaagtatagtatagtatttcaaaaactgtggttttcaaaaactttgttcccaaacagggccttatcttcgg

SEQ ID NO: 40812 - DNA, 4392 bp, Zea Mays
aaaaatttagctttgagcgaggtccccgtgtcggaacgagatcctctgacgtggggagagggcactgccgcgtggcccccgcgtgcgatagggcccgcgcgcagtgaccctactgcccctgcagtacgtcagaggaaccggctccccccgtgtccgttcacctctccggctctccctcccagcctcgccctcccaccgtcccacgttgttcctcccgaccctcgccgtccctcccgccgcgacccgccctcctcctcccgaccacgccgcccagcccgtgtaccactccctcccagcctcgccctcccacgccgtccctcccgtcgtgacccttcctcctcctcccgacctcgccgcctagcccgtgtcgccgccgtcgcccgtgccactctgctgctgcgaccacgacaatggggatgtggaaggtggtgtgcgtcaccgacgcatcagcgtacatcgcgtcctggatcgttaggctcctcctcgaccgtggctacaccgtccgcgccaccgtgcgagacacaggtgcgcatcccggcccgtcctccccaatccccgtgcctttctttcccactgattccctgtggtagctagcggaattactgtgatgttttgtgagattggttaggttagactgggaattgattagttggcaggggactgcataacctaccttggtaaatttgggatgttaggttcggtactattttgcttctggatccacttgcctccggcaacccaaaatcttgattgcatctgtagactgaaaaatgctgctacagatgaacttggcttgtcagtttattaaggagcaatttgtatccccatacatatcagtacaccaagttccagaagggagagaaatagaaaatcaaccaaacggatagaaacagaaactattttttagaatgggtccctattataatcctaacgaggagaaaccttgaagtgcagcctatccttagctccatccaacgcagtcacttgcaatgttttctttgggtcagccgaaaagtgaaggtaacaacaatgaccgaatgccaaaggtaatattactaaagaattatggtaagaaatagaagacagtagtattattctgttgtatctccatgttaggatttgcaacatgtattctgcatttgcaacttttatttgttcttcgtgtggtcattctagcatgcttggattactctctgcatacatagatatgggaaaatagctccgatccattttttggtagccaacgatagctggcagaaaatttattctgtcagacaggcacttctggtctctagatctagattaattaacacactgcacataaatgaggtttccatccgggactatagcttatttctgcactagcgcatcgccacatgtatatgtatcaagcttgagtataagtatatatttccagcagttctacatatgtcaccacaatatatatgttatctttggccattaacttgtatatgtctgtatttatacttcttcgatacggaccctatactatatatctacgttgtcaagggctacgtttgacaatagtttaatttcctgcccccatgaaaggaattctgctggagttcgcgtgtctatttcagatgctgttgcaactgaaccaacccagttgacctgcacgcttgtataagattttcatgtctcacttcattcactgatgatcaccatcaacatttcaatctccgcgcatatttggtcacatatccacgcttgtttggtactttggtcacttaactagcttctgaatcttgcaaactctcatctacagagaggagtcaccaagccaattgtactctctataggcttctttcctctccccggaagataaaggattgtagctgtcttttcttaatagaatggagaaagatctgtactgtgagtatttgtgtacgttgttggtcgatggctcaaatcgtctgaccaaatcttttattcagcgagaatggcaagcaaaatatatttgatcttttgtgttgtgtttttagacatgtgtggattctcacagttcatttggttgcatttttacttgcctttaaacctgatccctgatgctggtcgtcaaatactcagcttgttggctgcaatctgtgtttatcttggtatatccttgaaagttgatagtacagaaccaaagcatattaaggcatactgctattatttatcattcatgtttcaaacacacttgatactgcatatctctacagtttgtttacatgctcagatgttgaactcgatctattccttgccatatttatttatgattgacgaaccaatatccattgaccatgacatcaatgttccctagagtaaatgcatcaaaagtcggaaggagtgatctttgagtagttctatttgttgctggtagtatactgaaagtttcgttagttctcatctctctgatgctttttctttcagttctccacaacctacattcacttaacaaggcactttttcttgagaataataaaaaatgtactcctttcagtgttgctatcatcataaagtgttgcttgtggacttcctttttgtaatattcatctaatgttgatgagaatctaccggttggtgatgtgaatgaccaaataacattgctaaacactttgttaatgtaacatacatgactggtataggggatccacgagagagaaagcactgggcgctcctactgatgcttttgaaagttttgtcctccttggtttagtggaaacaagttattattctactttaatgatgccttcttagaattttatataactagacaagtgaaaatatgggatatacattgtcttttgcacccatggatgtgtaagttgtaacctcatcaatgcagttatgctctggttttaaaaaaaatagtgagcttacatatgcctgcacgcggactgctgatccatgcgttcccctttcttgagcccaatacacatgctaatagcagcatcaggttttagtgttgctgacttgctgtgtggggcaaaccaaaacaaggcaggcttcaaatctaaggaatttccctcttgcctagggctcttacagttgctattatttggccaaggtcaagattctcatacagattgtgtcctgtagtgtgggttggtgccttgttctgttttccatctcactcatccagcacaattctgcccctctaaacaaactttgtattcgctctgctatttaggtgttaaaaaggagaactaaatttagctgtcaaaaaaggagaactgtcctgtataatttctttggtcacacattcatagttcttctgtgacattattacaattaaccaaatatatgcaccacttttcccatgtttttttcccttttcctgagctgatgtcactcttttttctggattgcgtgatctcactctccaaatatttggcccttcattatgtatctgtctgactgatgatttcatctcatctgttctcacctaaatgagttgttgatcatccaccttctggtacccaacttcatggcaccaaataatggagtggccgtctaatttgggatctactaccttggatccaactggttgatgagctgatacgtatgaaactgttttaatatataataactacttacagatggtactacatcgcaacttacacaacctttggaaatgtagagcccacctcagttgatctattcaagaacttccattatagcaaaaacaatggatttaccgagtttgtacagaaagcaattgatgatatggaaggcatcatgagtgaaccagtacaagatggacatgaaccaaagttagcaaatgaagctgtttctcaggttgtcaaaatcaactacttttcttcgtgttgcaggtgtttgtttggcctccaagagtacctctagaggcacaatatcgtcacaggtccaagatctttagattaccttgagaatgagaagcaataaacggcagaacttcgacaagagttggataacatgaagatggaatcagaaactttggtaaaacattctgaggaaatagaggatttaaagaagacaccataagaaatacatgccctccttcactagctgctaagcttcaatcaggatcagcacaatccagggccataaagttcctaagcccccaacagtgaactattgcaggacgtttctgttttgaaatttggttgttggttgaactatgtctaattgttttatcaataattggttgctagttgtttacaagtatgacttagtaggtccaagtttattgatttttgttactggtacctccaagttttgttgaacattgttgcttcttgcaagacgtattgtgatctatgaattggaactcatgtctgctataattttggtcattggatgtgtaaattttgtgaaatatgttatgtgaacatctgtacgcttgaa

SEQ ID NO: 40813 - DNA, 1009 bp, Zea Mays
cttaaaccttatcatcatcactctctcttcctctctcttctggccggccggtcctttcacctcactcatcttctcagttcattccatggagagcgtcgttcctatatatcatgcatcatccaccaaggccctagctaagctgctactacctgctaggggttttattagttgctcaaccttcgctggccggccttatatatacctagctatagctgtcttgcttgcatagatcatcgatccatgttgctagctagctagctccctcagttcagttcagttcagttcagctcagctagctagctcactcctctcttgagtcgtggtgtccatcacaatcttctctatatcgatacagggggctggcctaccagctggtactagcaggaatgaagagcatatatatatgaacatgatgatgcatatatgcagagcagcaacagcagcatcgtcgtaccatctcatatatatcattgcaaacatgagcagtagtggtagttcatgaatcatgatgaaagcaaggaagaggaagctagcagtgctggacgcggatcagatgcagatcgatggaggccggggccgggggtgtacctacgtagtacattgctattattgtgtccatggaagggggaccaaagtatgtaatgcgttgcacaccacacaccagagctggctcagcagctagcagcagcctgtggtggtggtggtacaatgcagcgtgtactgctgtcgtcccagcagcaagttgaaaggtaaaagagagaaatatttcagctgactttactcatcacgcactctgcctgcatgctggctgcaggcctgctgtgagtctgtgtgtgtgtgcttgttctcttgctttagtggtggtgtagatcttctatttgctagtttcagtccacacttcactcaccgcctgcgtctatcatccatacatatatgcatatctacaaagcctgcaaattagattgccacactgtgttatgggggccagccagccaccactacaccacct

SEQ ID NO: 40814 - DNA, 1496 bp, Zea Mays
ttgctagctagctagctccctcagttcagttcagttcagttcagctcagctagctagctcactcctctcttgagtcgtggtgtccatcacaatcttctctatatcgatacaggtgaggaggtagctagacagatcaacaccaatcctctcaacgacatccccttgttcttgtagagagagttggtgtaggtcgaaaggcagatagatcatatatagagggagagatgcatatatggtgtagggttcttcaatttgtttctatgatcgattcattcgccctgcagccccccctgcgcatctagttatgtctccatccctcctcccttgttcctgatacatatatatatatgtaggtagtggctctgtatatacccatgccatctctctcaatctcatctatatcatatatacccatgctttgcatctagctgtttcatttcttttcactcgtgctttgaaagatctggtacagtccggcctgtattagtaagaacgagttagaaaaatacacacgtacgcgcgagaaccatgcatcatcagctagctcctctctttcctctttttttttgttaatgcatacattcatatatatattcccatgaatgaatgctttaagcatgaggcaagcaaacatcgacagtgggtgcttgcaggtgcagcaccaccaagattcacatccaactctcacgcatcttcagtgatgcatgcatgctctgtgatgtctcgcagcagctatatgcatatgtgatgagatgagaatcttgatgatgctgcatcagcagacactcactcatcacaccaacgtaccccaacaagggtgagagacgacgaatcggctgctgggggctggcctaccagctggtactagcaggaatgaagagcatatatatatgaacatgatgatgcatatatgcagagcagcaacagcagcatcgtcgtaccatctcatatatatcattgcaaacatgagcagtagtggtagttcatgaatcatgatgaaagcaaggaagaggaagctagcagtgctggacgcggatcagatgcagatcgatggaggccggggccgggggtgtacctacgtagtacattgctattattgtgtccatggaagggggaccaaagtatgtaatgcgttgcacaccacacaccagagctggctcagcagctagcagcagcctgtggtggtggtggtacaatgcagcgtgtactgctgtcgtcccagcagcaagttgaaaggtaaaagagagaaatatttcagctgactttactcatcacgcactctgcctgcatgctggctgcaggcctgctgtgagtctgtgtgtgtgtgcttgttctcttgctttagtggtggtgtagatcttctatttgctagtttcagtccacacttcactcaccgcctgcgtctatcatccatacatatatgcatatctacaaagcctgcaaattagattgccacactgtgttatgggggccagccagccaccactacaccacct

SEQ ID NO: 40815 - DNA, 584 bp, Zea Mays
gaccaacacggtatagtttctctgccctcagaaccctcgccgccgcccgtcggagctccggtgtgtcagttcgccgtcgaaggatatggactatgacaggttgaattcgccgaacacgtcggctatttcgctggaggtgatgggccaccggctacatatttcacaggatccaaactccaagcaccttgggaccacggtctgggatgcatcaatggtgtttgtcaagttcttggaaaagaatagcagaaaaggtcggttttgtccatccaagctaaaaggaaagagagtgattgaattaggagctggctgtggcctggctgggttcggaatgaccttgttgggttgtgatgttacaacaactgaccaagtcgaggtgcttccgctgcttatgagaaatgttgaacgcaacagatcttggatttcgcaatcgaattccgacacagataccatcggctcaattacagttgcagaattggactgggggaacaaagaacatatcaaggccgttgaacctccatttgattacattattggaactgacgtttacatcatgaagaacatcacttataacttcaccagtatgt

SEQ ID NO: 40816 - DNA, 1636 bp, Zea Mays
aatgaatcatcatcatcatcagtcacaacaggagcaggcacaccaagggcccacaagtcaggatcgcaggaggtgaaagctctccctaccccggcctgcacgcatacccagagctcctccctctctctctgtctgctgtgctcagataatagcgacacctcctttcctctccctcgaggtgtctctcccagaacgcacagcacagtcgcagaacaggaaggcagagagcagcgccgcgatgagaggaggaggagcggggcccactgcggcgttcatgtccgacgagccgcctccagccgacgcggaagaggtggaggagaactccggcgccgaggaggaggacgaggagacggtggtggagcaggacgacgacgagctggagctggggctctgcctcggctccaagcaacagcagcagcagcatccgccgccgtgccggatcctcacggcccgggacctgcagccgaggtccctgtcaccggattcctccgtgtcctcttcctcccccgcggcaggtgcaggtaccgcggcgccaagcaagagggccaaggcggatgcggcgcccaactcgccagggacggtcgcgtctggccacccacagagctttggagtggtgggatggccacccataagaactttcaggatgaacagcctatttaaccaggccaaagagaatgcatcggaggctggcgccaagaagcccatcgtcgaacctgacatgcaggaagacaaggaggagagcaagaaaggccggaccgtcggttgggtgaaggtgaacatggaaggagatatcattggaaggaaggtcgatctcaatgcccatcgctcttacaagacccttgcctcagcacttgagctcatgttcatgaagccgtccattggtctttgcacttctagcagttcaaagactctaaagctattagacagctcatcggagtatcagctcacctatgaggacagggacggggactggatgcttgttggagatgttccctgggagatgtttgtaggttcagtgaagaggctcaagatcatgagaacctcagacgccaaaggtctcggtccacgattccaagggtctcacagacccacagcagcttgcacgagaggcaggacgtgaaaccaccgatgtgcgtttggtgctaacaccgctggtgaagcttgaactgtatttgatatcacgtaacagtaacagcagcccatatcgctggcatagttgtgagattacggggctgtttggtttactgtctaaggcgccacaacatggctaacttttatgtctaagtttagttcttcaattcgaacgactaaacttaggcaacttcattgtgtctagtggaaatagtagaagtttttttttttgcttcttccctgtggtgccctcgttgagcttttcttatgggctatacgagcatcatcgcccccagctcttctgtccacgctgtttacctgtgaggaatggtcgcccaaagtgttggtttttatccttgtgtttgatatggcagaagtatctgctctgctgtttcatatctgtgttcatatctgaattccatgttgccgcacagtatgtctttgctaattgctgtggtctgcaatgcaacgccaaccacccacccgggtgttggatggggacaaa

SEQ ID NO: 40817 - DNA, 1527 bp, Zea Mays
atacccagagctcctccctctctctctgtctgctgtgctcagataatagcgacacctcctttcctctccctcgaggtgtctctcccagaacgcacagcacagtcgcagaacaggaaggcagagagcagcgccgcgatgagaggaggaggagcggggcccactgcggcgttcatgtccgacgagccgcctccagccgacgcggaagaggtggaggagaactccggcgccgaggaggaggacgaggagacggtggtggagcaggacgacgacgagctggagctggggctctgcctcggctccaagcaacagcagcagcagcatccgccgccgtgccggatcctcacggcccgggacctgcagccgaggtccctgtcaccggattcctccgtgtcctcttcctcccccgcggcaggtgcaggtaccgcggcgccaagcaagagggccaaggcggatgcggcgcccaactcgccagggacggtcgcgtctggccacccacagagctttggagtggtgggatggccacccataagaactttcaggatgaacagcctatttaaccaggccaaagagaatgcatcggaggctggcgccaagaagcccatcgtcgaacctgacatgcaggaagacaaggaggagagcaagaaaggccggaccgtcggttgggtgaaggtgaacatggaaggagatatcattggaaggaaggtcgatctcaatgcccatcgctcttacaagacccttgcctcagcacttgagctcatgttcatgaagccgtccattggtctttgcacttctagcagttcaaagactctaaagctattagacagctcatcggagtatcagctcacctatgaggacagggacggggactggatgcttgttggagatgttccctgggagatgtttgtaggttcagtgaagaggctcaagatcatgagaacctcagacgccaaaggtccacgattccaagggtctcacagacccacagcagcttgcacgagaggcaggacgtgaaaccaccgatgtgcgtttggtgctaacaccgctggtgaagcttgaactgtatttgatatcacgtaacagtaacagcagcccatatcgctggcatagttgtgagattacggggctgtttggtttactgtctaaggcgccacaacatggctaacttttatgtctaagtttagttcttcaattcgaacgactaaacttaggcaacttcattgtgtctagtggaaatagtagaagtttttttttttgcttcttccctgtggtgccctcgttgagcttttcttatgggctatacgagcatcatcgcccccagctcttctgtccacgctgtttacctgtgaggaatggtcgcccaaagtgttggtttttatccttgtgtttgatatggcagaagtatctgctctgctgtttcatatctgtgttcatatctgaattccatgttgccgcacagtatgtctttgctaattgctgtggtctgcaatgcaacgccaaccacccacccgggtgttggatggggacaaa

SEQ ID NO: 40818 - DNA, 1529 bp, Zea Mays
atacccagagctcctccctctctctctgtctgctgtgctcagataatagcgacacctcctttcctctccctcgaggtgtctctcccagaacgcacagcacagtcgcagaacaggaaggcagagagcagcgccgcgatgagaggaggaggagcggggcccactgcggcgttcatgtccgacgagccgcctccagccgacgcggaagaggtggaggagaactccggcgccgaggaggaggacgaggagacggtggtggagcaggacgacgacgagctggagctggggctctgcctcggctccaagcaacagcagcagcagcatccgccgccgtgccggatcctcacggcccgggacctgcagccgaggtccctgtcaccggattcctccgtgtcctcttcctcccccgcggcaggtgcaggtaccgcggcgccaagcaagagggccaaggcggatgcggcgcccaactcgccagggacggtcgcgtctggccacccacagagctttggagtggtgggatggccacccataagaactttcaggatgaacagcctatttaaccaggccaaagagaatgcatcggaggctggcgccaagaagcccatcgtcgaacctgacatgcaggaagacaaggaggagagcaagaaaggccggaccgtcggttgggtgaaggtgaacatggaaggagatatcattggaaggaaggtcgatctcaatgcccatcgctcttacaagacccttgcctcagcacttgagctcatgttcatgaagccgtccattggtctttgcacttctattcaaagactctaaagctattagacagctcatcggagtatcagctcacctatgaggacagggacggggactggatgcttgttggagatgttccctgggagatgtttgtaggttcagtgaagaggctcaagatcatgagaacctcagacgccaaaggtctcggtccacgattccaagggtctcacagacccacagcagcttgcacgagaggcaggacgtgaaaccaccgatgtgcgtttggtgctaacaccgctggtgaagcttgaactgtatttgatatcacgtaacagtaacagcagcccatatcgctggcatagttgtgagattacggggctgtttggtttactgtctaaggcgccacaacatggctaacttttatgtctaagtttagttcttcaattcgaacgactaaacttaggcaacttcattgtgtctagtggaaatagtagaagtttttttttttgcttcttccctgtggtgccctcgttgagcttttcttatgggctatacgagcatcatcgcccccagctcttctgtccacgctgtttacctgtgaggaatggtcgcccaaagtgttggtttttatccttgtgtttgatatggcagaagtatctgctctgctgtttcatatctgtgttcatatctgaattccatgttgccgcacagtatgtctttgctaattgctgtggtctgcaatgcaacgccaaccacccacccgggtgttggatggggacaaa

SEQ ID NO: 40819 - DNA, 1659 bp, Zea Mays
agcatttccttttgcctctctccactctacctctcctctcctgtgcgctacagcgagggggaaggggagcgtcgaccgattcgtcccggcctcccgtcccgccgctggcctcgcctgccccgatggcggcggtggcgatccaccagttcgccgagtgcatcacctgccacgcctggagcccggaccagtcgatgattgccttttgtccaaacaaccatgaagtacatatctataaattcttcacagacaagtgggagaaacttcatgttctgtcaaagcatgatcagatggtttcggggatagactggagtaaatcatccaacaaaatcgtaacagtttcacatgatagaaattcatatgtttggacacaagaaggatctgattgggtacctaccctggttattctaaagttaaatcgtgcagctttatgtgttcagtggagcccaaaagaaaacaagtttgccgtgggaagcggtgccaaatctgtgtgtatttgttactatgaacaagaaaataactggtggattagcaaggttatcaggaaaaagcatgaatcttctgtcactagtcttgcatggcatccaaacaatatatatcttgcaacatcgtctacggatggtaaatgcagagtgttctctacttttatcaagggtgtagacacaagaggatcaaaatcgagcacttcaaccgattcaaaattcggagagcaaatcgctcagcttgatctatcatctacctgggtatttggtgtaaggtggtcaccaagtgggaagacattggcctatgcaggttcttgttcctctaccagattgttgctatcaaaggcacaactccatgatttatttcatcgatgaagtcgaatcatctcctgtggcacaaaatttggcactgcgtgatctgcctctccgtgatgtgggttctttttgtctctgagcgcacattgattggtgtcggatttgactgcaatcctatgatctttgctgctgatgatactgggctttggactttcataagattcttggacgagaggaaagctgccccatcagcttcaaaagcctcgcagctctctgaagcccttggaaagctatacggccaatcaaagcaagggactagtagtgataccgttgaaccatcaaaacctcgtggcggggcccatgagaattgcataacgtgtattgtacccttgagaaaaggaagcgacggtagtatcaaacgattcagcacatcaggattggatggtaagatcgtggtatgggatttggagaatcacgtcagcattgcaaaatagctcgagggagactttatcaccaatcaaatcgagggaactcctgtcattaccagccgtcctgcaggttttcaagatccagggccagccagatagattgttttttttttaatttttaaattttgttgtacctgtacacagaaacattgccttagcgtagggacagcttgcatctatcaagtagcttcatttttggcgagtaattttgccctttgaattgaatctatacaatattatactataattttagttaggtcgtaggcagttgacgtgatcccgcgttctttcgctctttctttccggtgccctgtgtaaaataaccacacgtggaatcttatctatccgggacttgtggtcatcttgtttcttctgct

SEQ ID NO: 40820 - DNA, 1616 bp, Zea Mays
agcatttccttttgcctctctccactctacctctcctctcctgtgcgctacagcgagggggaaggggagcgtcgaccgattcgtcccggcctcccgtcccgccgctggcctcgcctgccccgatggcggcggtggcgatccaccagttcgccgagtgcatcacctgccacgcctggagcccggaccagtcgatgattgccttttgtccaaacaaccatgaagtacatatctataaattcttcacagacaagtgggagaaacttcatgttctgtcaaagatggtttcggggatagactggagtaaatcatccaacaaaatcgtaacagtttcacatgatagaaattcatatgtttggacacaagaaggatctgattgggtacctaccctggttattctaaagttaaatcgtgcagctttatgtgttcagtggagcccaaaagaaaacaagtttgccgtgggaagcggtgccaaatctgtgtgtatttgttactatgaacaagaaaataactggtggattagcaaggttatcaggaaaaagcatgaatcttctgtcactagtcttgcatggcatccaaacaatatatatcttgcaacatcgtctacggatggtaaatgcagagtgttctctacttttatcaagggtgtagacacaagaggatcaaaatcgagcacttcaaccgattcaaaattcggagagcaaatcgctcagcttgatctatcatctacctgggtatttggtgtaaggtggtcaccaagtgggaagacattggcctatgcagggcacaactccatgatttatttcatcgatgaagtcgaatcatctcctgtggcacaaaatttggcactgcgtgatctgcctctccgtgatgtgggttctttttgtctctgagcgcacattgattggtgtcggatttgactgcaatcctatgatctttgctgctgatgatactgggctttggactttcataagattcttggacgagaggaaagctgccccatcagcttcaaaagcctcgcagctctctgaagcccttggaaagctatacggccaatcaaagcaagggactagtagtgataccgttgaaccatcaaaacctcgtggcggggcccatgagaattgcataacgtgtattgtacccttgagaaaaggaagcgacggtagtatcaaacgattcagcacatcaggattggatggtaagatcgtggtatgggatttggagaatcacgtcagcattgcaaaatagctcgagggagactttatcaccaatcaaatcgagggaactcctgtcattaccagccgtcctgcaggttttcaagatccagggccagccagatagattgttttttttttaatttttaaattttgttgtacctgtacacagaaacattgccttagcgtagggacagcttgcatctatcaagtagcttcatttttggcgagtaattttgccctttgaattgaatctatacaatattatactataattttagttaggtcgtaggcagttgacgtgatcccgcgttctttcgctctttctttccggtgccctgtgtaaaataaccacacgtggaatcttatctatccgggacttgtggtcatcttgtttcttctgct

SEQ ID NO: 40821 - DNA, 1757 bp, Zea Mays
agcatttccttttgcctctctccactctacctctcctctcctgtgcgctacagcgagggggaaggggagcgtcgaccgattcgtcccggcctcccgtcccgccgctggcctcgcctgccccgatggcggcggtggcgatccaccagttcgccgagtgcatcacctgccacgcctggagcccggaccagtcgatgattgccttttgtccaaacaaccatgaagtacatatctataaattcttcacagacaagtgggagaaacttcatgttctgtcaaagcatgatcagatggtttcggggatagactggagtaaatcatccaacaaaatcgtaacagtttcacatgatagaaattcatatgtttggacacaagaaggatctgattgggtacctaccctggttattctaaagttaaatcgtgcagctttatgtgttcagtggagcccaaaagtaatacccagctgatttcttggagctggagctcttccaaactgggcgttcggtgccttagctattcagattatcttagccgacttcacactttgttggagcaccatgttggccgtgttgaaagaatgcaattacttaaaacaagtttgccgtgggaagcggtgccaaatctgtgtgtatttgttactatgaacaagaaaataactggtggattagcaaggttatcaggaaaaagcatgaatcttctgtcactagtcttgcatggcatccaaacaatatatatcttgcaacatcgtctacggatggtaaatgcagagtgttctctacttttatcaagggtgtagacacaagaggatcaaaatcgagcacttcaaccgattcaaaattcggagagcaaatcgctcagcttgatctatcatctacctgggtatttggtgtaaggtggtcaccaagtgggaagacattggcctatgcagggcacaactccatgatttatttcatcgatgaagtcgaatcatctcctgtggcacaaaatttggcactgcgtgatctgcctctccgtgatgttctttttgtctctgagcgcacattgattggtgtcggatttgactgcaatcctatgatctttgctgctgatgatactgggctttggactttcataagattcttggacgagaggaaagctgccccatcagcttcaaaagcctcgcagctctctgaagcccttggaaagctatacggccaatcaaagcaagggactagtagtgataccgttgaaccatcaaaacctcgtggcggggcccatgagaattgcataacgtgtattgtacccttgagaaaaggaagcgacggtagtatcaaacgattcagcacatcaggattggatggtaagatcgtggtatgggatttggagaatcacgtcagcattgcaaaatagctcgagggagactttatcaccaatcaaatcgagggaactcctgtcattaccagccgtcctgcaggttttcaagatccagggccagccagatagattgttttttttttaatttttaaattttgttgtacctgtacacagaaacattgccttagcgtagggacagcttgcatctatcaagtagcttcatttttggcgagtaattttgccctttgaattgaatctatacaatattatactataattttagttaggtcgtaggcagttgacgtgatcccgcgttctttcgctctttctttccggtgccctgtgtaaaataaccacacgtggaatcttatctatccgggacttgtggtcatcttgtttcttctgct

SEQ ID NO: 40822 - DNA, 944 bp, Zea Mays
cattgttctagactcgaccccttcttcaaatcgctcagcttgatctatcatctacctgggtatttggtgtaaggtggtcaccaagtgggaagacattggcctatgcagggcacaactccatgatttatttcatcgatgaagtcgaatcatctcctgtggcacaaaatttggcactgcgtgatctgcctctccgtgatgtgggttctttttgtctctgagcgcacattgattggtgtcggatttgactgcaatcctatgatctttgctgctgatgatactgggctttggactttcataagattcttggacgagaggaaagctgccccatcagcttcaaaagcctcgcagctctctgaagcccttggaaagctatacggccaatcaaagcaagggactagtagtgataccgttgaaccatcaaaacctcgtggcggggcccatgagaattgcataacgtgtattgtacccttgagaaaaggaagcgacggtagtatcaaacgattcagcacatcaggattggatggtaagatcgtggtatgggatttggagaatcacgtcagcattgcaaaatagctcgagggagactttatcaccaatcaaatcgagggaactcctgtcattaccagccgtcctgcaggttttcaagatccagggccagccagatagattgttttttttttaatttttaaattttgttgtacctgtacacagaaacattgccttagcgtagggacagcttgcatctatcaagtagcttcatttttggcgagtaattttgccctttgaattgaatctatacaatattatactataattttagttaggtcgtaggcagttgacgtgatcccgcgttctttcgctctttctttccggtgccctgtgtaaaataaccacacgtggaatcttatctatccgggacttgtggtcatcttgtttcttctgct

SEQ ID NO: 40823 - DNA, 3552 bp, Zea Mays
ggtgctctcacctgacctgacattctccgctctcacggtggggtcgtcgtcgtcgacggcgacgactgttctgccaccgtccacccgttctttgtccagcgcggtgcccgcctccgcgccgtccgtgtgctagtgccgcactcgcggcgcacgcgggagggcgcgcggcaccacaagcgcggctcacggcactcgtggccacgcgcgcgccaccccggtgacctgagtggcctgctattgaccatccccccgcccccaattcctcttctctcccaaccactgaaccaccaccaacttcacgtctgtccagccggccagtcagttgccttctcacatcgcaacccccgctgcccgcccgctccacgcttgccacgccggcctcgcttcccacctcccaccagagacgctgctgcgggccgagtccacaccacagccggcatggaggctgcggcggcggcgccgcatctactgcactgcggcggcttcggccgcgtagcgcacctcccagcgctccaccgccgaggacagttcccacgcgtccgcgccgtcgccacggagcccaagctgtccacctccacctcctcctcctcccgcggcaggaccaggagccgtaatgacctctctgacaccaggttcggagaggtgtccaaggagatccagcgcgtgcgtaagcagatggagcaggacgagcagcttgccacgctcatgcgcggtctccgcggccagaacctccgcgacgagcagttcgccgacgacaacgtccgcctccgcctcgtcgaggtagaatccgcggacaacaatgagggcctgcctcttgtgtatagccctgaaatcatatcagcctactggggcaagcgtcctagggccgtcgccacccgggttgtgcagctgctgtctgtcgctggtggtttcatctcccatctcgtatccgatcttattaacaagaagctcaaggagaatgaagtggctcgcgcaattgaactgagagaaatcgtgacgtctctgggtcctgcttacatcaagcttgggcaggcgctaagtatacgtccagatattctgtcccctgcagcaatgaccgagttgcagaaattatgtgataaggttccttcattcccagatgatatagcaatggctcttcttgaagaagagcttggtcagccttggcaagcaatctactcagagttatccccctccccaatcgctgcaggtagacaatgatgcagtctctgcttgccacactccacagtaatcgaattccttgactatacatattcaatgcattgtattgcagcatctctgggacaggtttataagggccgcttgaaagaaacgggagaactagtagctgtcaaagttcagaggccatttgtacttgagactgttaccatcgatttattcatcattagaaacttgggtttggtactcaggagatttccacaggtgtccatcgatgttgttggcctggtagatgagtgggctgctcgattttttgaagaacttgattatgtaaatgaaggggaaaatggcacttactttgctgacgtgatgaaagaagatcttccacaggttgttgtaccaaagacttaccataaatacacgtctagaaaagttcttaccacacaatggatagagggagagaagttgtcacagagcacagaggacgatgttggatcattggtcagtgtaggagtcatttgctatctgaaacaggttagtttgaaaagcatttgtttacatcttataaatactatccacatcttacatgattgaacatatgcatgcactcacttgctgaaggtaaggaataacggtcttcaccatcttatccatagtattcccgtcctacatgattgaagatatgtgtgcactcatgtcaccttttttagaggaagtatcttcatgttatatttatttttatttgcagttgcttgatactgggttcttccacgctgatccacatcctggcaatatgattagaacacctgatggaaagctggctattcttgattttgggcttgtaacaaaactgacagatgatcaaaagtatggaatgatcgaagcaatagctcaccttattcatcgtgattatgatgcaattgttaaggactttgtgaagcttggttttattcctgaaggggttaacttggatcctatcttgcctgtactggccaaggtttttgatcaggcactagaaggaggcggtgccaagaatattaacttccaagaattggcagcagatctagcacagataacttttgattatccattcaggatacctccgtattttgctttgattattagagccatcggagtattagaaggcatagctttggtgggagatcctgaatttgccattgtggatgaagcatacccatacatcgcacaggtctgtaccgtgtgcattgacactgttgcaactaaaacaattctgtgtcaaagaaacacacgtaggaggcacaaagaagttctagttgggtatttgctttaaacttccatattactaacacgtggctttatttgacaataccagaggctactaacggacgaatcgcctcggctaaggagcgccttgcgttacaccatatatggcaaaaccggtgttttcgacgcggaaaggttcattgatgttatgcaagctttcgagaattttatccgtgcagcgaagagcggtggtggggagaacttgaagggaaacatggctgagctggctgagttgggaggtcaacctagcaccagtctggttcctgtatttgcaatggccgtagcgcagcctgagcagccagttaaagcccgtgcggctcttgcttttctactctctgagagggggaacttctttcgggagtttattcttgacgagattgtgaaagccatcgatgcgatttcaagggagcagttgatccagatcgccgcgtcttttgggataggaaacgcggccccagtttttagcatggttcctgtcagggccagggcattgcttccgacgatcacagaggaagacagggtcatcctgaacaacgtcgagaaggttgtgaagttcctgacatccgggactgcaactccaacagtgggcggggacgtgaacgtggtgtctgtggtgcaagagcttctacctgtgttgccaggcatctcgtcgaagatcctacctgatgtcttgagccggttgtcgtcacgggtatttgcacggataatccgggagacatttttgtagagtgttctctttttgtttgccccttgctaacaggaaaactacaagtagcaatatctgcccaaacaacacgcaaatgaatggtgatagaagattgtacagcaatacaatgtatagaatttgcatctaagtaagttaacaaaagcagcaaagcttaaccaacacgtactgtctgtagtgagcacacgagggctcaacacgataaaactggagaggttgtgttggcttgacaagtgcttcgacctctgcgattgtactctcggcttctccaatctcagcaacttgctcattcgactcctccacctcagcctgcaacgttgaaatggcctaagaaaacaaaacaacgc

SEQ ID NO: 40824 - DNA, 3106 bp, Zea Mays
ggtgctctcacctgacctgacattctccgctctcacggtggggtcgtcgtcgtcgacggcgacgactgttctgccaccgtccacccgttctttgtccagcgcggtgcccgcctccgcgccgtccgtgtgctagtgccgcactcgcggcgcacgcgggagggcgcgcggcaccacaagcgcggctcacggcactcgtggccacgcgcgcgccaccccggtgacctgagtggcctgctattgaccatccccccgcccccaattcctcttctctcccaaccactgaaccaccaccaacttcacgtctgtccagccggccagtcagttgccttctcacatcgcaacccccgctgcccgcccgctccacgcttgccacgccggcctcgcttcccacctcccaccagagacgctgctgcgggccgagtccacaccacagccggcatggaggctgcggcggcggcgccgcatctactgcactgcggcggcttcggccgcgtagcgcacctcccagcgctccaccgccgaggacagttcccacgcgtccgcgccgtcgccacggagcccaagctgtccacctccacctcctcctcctcccgcggcaggaccaggagccgtaatgacctctctgacaccaggttcggagaggtgtccaaggagatccagcgcgtgcgtaagcagatggagcaggacgagcagcttgccacgctcatgcgcggtctccgcggccagaacctccgcgacgagcagttcgccgacgacaacgtccgcctccgcctcgtcgagaatccgcggacaacaatgagggcctgcctcttgtgtatagccctgaaatcatatcagcctactggggcaagcgtcctagggccgtcgccacccgggttgtgcagctgctgtctgtcgctggtggtttcatctcccatctcgtatccgatcttattaacaagaagctcaaggagaatgaagtggctcgcgcaattgaactgagagaaatcgtgacgtctctgggtcctgcttacatcaagcttgggcaggcgctaagtatacgtccagatattctgtcccctgcagcaatgaccgagttgcagaaattatgtgataaggttccttcattcccagatgatatagcaatggctcttcttgaagaagagcttggtcagccttggcaagcaatctactcagagttatccccctccccaatcgctgcagcatctctgggacaggtttataagggccgcttgaaagaaacgggagaactagtagctgtcaaagttcagaggccatttgtacttgagactgttaccatcgatttattcatcattagaaacttgggtttggtactcaggagatttccacaggtgtccatcgatgttgttggcctggtagatgagtgggctgctcgattttttgaagaacttgattatgtaaatgaaggggaaaatggcacttactttgctgacgtgatgaaagaagatcttccacaggttgttgtaccaaagacttaccataaatacacgtctagaaaagttcttaccacacaatggatagagggagagaagttgtcacagagcacagaggacgatgttggatcattggtcagtgtaggagtcatttgctatctgaaacagttgcttgatactgggttcttccacgctgatccacatcctggcaatatgattagaacacctgatggaaagctggctattcttgattttgggcttgtaacaaaactgacagatgatcaaaagtatggaatgatcgaagcaatagctcaccttattcatcgtgattatgatgcaattgttaaggactttgtgaagcttggttttattcctgaaggggttaacttggatcctatcttgcctgtactggccaaggtttttgatcaggcactagaaggaggcggtgccaagaatattaacttccaagaattggcagcagatctagcacagataacttttgattatccattcaggatacctccgtattttgctttgattattagagccatcggagtattagaaggcatagctttggtgggagatcctgaatttgccattgtggatgaagcatacccatacatcgcacagaggctactaacggacgaatcgcctcggctaaggagcgccttgcgttacaccatatatggcaaaaccggtgttttcgacgcggaaaggttcattgatgttatgcaagctttcgagaattttatccgtgcagcgaagagcggtggtggggagaacttgaagggaaacatggctgagctggctgagttgggaggtcaacctagcaccagtctggttcctgtatttgcaatggccgtagcgcagcctgagcagccagttaaagcccgtgcggctcttgcttttctactctctgagagggggaacttctttcgggagtttattcttgacgagattgtgaaagccatcgatgcgatttcaagggagcagttgatccagatcgccgcgtcttttgggataggaaacgcggccccagtttttagcatggttcctgtcagggccagggcattgcttccgacgatcacagaggaagacagggtcatcctgaacaacgtcgagaaggttgtgaagttcctgacatccgggactgcaactccaacagtgggcggggacgtgaacgtggtgtctgtggtgcaagagcttctacctgtgttgccaggcatctcgtcgaagatcctacctgatgtcttgagccggttgtcgtcacgggtatttgcacggataatccgggagacatttttgtagagtgttctctttttgtttgccccttgctaacaggaaaactacaagtagcaatatctgcccaaacaacacgcaaatgaatggtgatagaagattgtacagcaatacaatgtatagaatttgcatctaagtaagttaacaaaagcagcaaagcttaaccaacacgtactgtctgtagtgagcacacgagggctcaacacgataaaactggagaggttgtgttggcttgacaagtgcttcgacctctgcgattgtactctcggcttctccaatctcagcaacttgctcattcgactcctccacctcagcctgcaacgttgaaatggcctaagaaaacaaaacaacgc

SEQ ID NO: 40825 - DNA, 2949 bp, Zea Mays
ggtgctctcacctgacctgacattctccgctctcacggtggggtcgtcgtcgtcgacggcgacgactgttctgccaccgtccacccgttctttgtccagcgcggtgcccgcctccgcgccgtccgtgtgctagtgccgcactcgcggcgcacgcgggagggcgcgcggcaccacaagcgcggctcacggcactcgtggccacgcgcgcgccaccccggtgacctgagtggcctgctattgaccatccccccgcccccaattcctcttctctcccaaccactgaaccaccaccaacttcacgtctgtccagccggccagtcagttgccttctcacatcgcaacccccgctgcccgcccgctccacgcttgccacgccggcctcgcttcccacctcccaccagagacgctgctgcgggccgagtccacaccacagccggcatggaggctgcggcggcggcgccgcatctactgcactgcggcggcttcggccgcgtagcgcacctcccagcgctccaccgccgaggacagttcccacgcgtccgcgccgtcgccacggagcccaagctgtccacctccacctcctcctcctcccgcggcaggaccaggagccgtaatgacctctctgacaccaggttcggagaggtgtccaaggagatccagcgcgtgcgtaagcagatggagcaggacgagcagcttgccacgctcatgcgcggtctccgcggccagaacctccgcgacgagcagttcgccgacgacaacgtccgcctccgcctcgtcgaggtagaatccgcggacaacaatgagggcctgcctcttgtgtatagccctgaaatcatatcagcctactggggcaagcgtcctagggccgtcgccacccgggttgtgcagctgctgtctgtcgctggtggtttcatctcccatctcgtatccgatcttattaacaagaagctcaaggagaatgaagtggctcgcgcaattgaactgagagaaatcgtgacgtctctgggtcctgcttacatcaagcttgggcaggcgctaagtatacgtccagatattctgtcccctgcagcaatgaccgagttgcagaaattatgtgataaggttccttcattcccagatgatatagcaatggctcttcttgaagaagagcttggtcagccttggcaagcaatctactcagagttatccccctccccaatcgctgcagcatctctgggacaggtttataagggccgcttgaaagaaacgggagaactagtagctgtcaaagttcagaggccatttgtacttgagactgttaccatcgatttattcatcattagaaacttgggtttggtactcaggagatttccacaggtgtccatcgatgttgttggcctggtagatgagtgggctgctcgattttttgaagaacttgattatgtaaatgaaggggaaaatggcacttactttgctgacgtgatgaaagaagatcttccacaggttgttgtaccaaagacttaccataaatacacgtctagaaaagttcttaccacacaatggatagagggagagaagttgtcacagagcacagaggacgatgttggatcattggtcagtgtaggagtcatttgctatctgaaacagttgcttgatactgggttcttccacgctgatccacatcctggcaatatgattagaacacctgatggaaagctggctattcttgattttggtttttgatcaggcactagaaggaggcggtgccaagaatattaacttccaagaattggcagcagatctagcacagataacttttgattatccattcaggatacctccgtattttgctttgattattagagccatcggagtattagaaggcatagctttggtgggagatcctgaatttgccattgtggatgaagcatacccatacatcgcacagaggctactaacggacgaatcgcctcggctaaggagcgccttgcgttacaccatatatggcaaaaccggtgttttcgacgcggaaaggttcattgatgttatgcaagctttcgagaattttatccgtgcagcgaagagcggtggtggggagaacttgaagggaaacatggctgagctggctgagttgggaggtcaacctagcaccagtctggttcctgtatttgcaatggccgtagcgcagcctgagcagccagttaaagcccgtgcggctcttgcttttctactctctgagagggggaacttctttcgggagtttattcttgacgagattgtgaaagccatcgatgcgatttcaagggagcagttgatccagatcgccgcgtcttttgggataggaaacgcggccccagtttttagcatggttcctgtcagggccagggcattgcttccgacgatcacagaggaagacagggtcatcctgaacaacgtcgagaaggttgtgaagttcctgacatccgggactgcaactccaacagtgggcggggacgtgaacgtggtgtctgtggtgcaagagcttctacctgtgttgccaggcatctcgtcgaagatcctacctgatgtcttgagccggttgtcgtcacgggtatttgcacggataatccgggagacatttttgtagagtgttctctttttgtttgccccttgctaacaggaaaactacaagtagcaatatctgcccaaacaacacgcaaatgaatggtgatagaagattgtacagcaatacaatgtatagaatttgcatctaagtaagttaacaaaagcagcaaagcttaaccaacacgtactgtctgtagtgagcacacgagggctcaacacgataaaactggagaggttgtgttggcttgacaagtgcttcgacctctgcgattgtactctcggcttctccaatctcagcaacttgctcattcgactcctccacctcagcctgcaacgttgaaatggcctaagaaaacaaaacaacgc

SEQ ID NO: 40826 - DNA, 3840 bp, Zea Mays
ggtgctctcacctgacctgacattctccgctctcacggtggggtcgtcgtcgtcgacggcgacgactgttctgccaccgtccacccgttctttgtccagcgcggtgcccgcctccgcgccgtccgtgtgctagtgccgcactcgcggcgcacgcgggagggcgcgcggcaccacaagcgcggctcacggcactcgtggccacgcgcgcgccaccccggtgacctgagtggcctgctattgaccatccccccgcccccaattcctcttctctcccaaccactgaaccaccaccaacttcacgtctgtccagccggccagtcagttgccttctcacatcgcaacccccgctgcccgcccgctccacgcttgccacgccggcctcgcttcccacctcccaccagagacgctgctgcgggccgagtccacaccacagccggcatggaggctgcggcggcggcgccgcatctactgcactgcggcggcttcggccgcgtagcgcacctcccagcgctccaccgccgaggacagttcccacgcgtccgcgccgtcgccacggagcccaagctgtccacctccacctcctcctcctcccgcggcaggaccaggagccgtaatgacctctctgacaccaggttcggagaggtgtccaaggagatccagcgcgtgcgtaagcagatggagcaggacgagcagcttgccacgctcatgcgcggtctccgcggccagaacctccgcgacgagcagttcgccgacgacaacgtccgcctccgcctcgtcgaggtagaatccgcggacaacaatgagggcctgcctcttgtgtatagccctgaaatcatatcagcctactggggcaagcgtcctagggccgtcgccacccgggttgtgcagctgctgtctgtcgctggtggtttcatctcccatctcgtatccgatcttattaacaagaagctcaaggaggtacctatcatattccttcctgcagctgcgttgccttccctaaaaccatgtaaacgcgcttgctgatcgctgtcttctggtgttggaacatgttcgtcgatagaatgaagtggctcgcgcaattgaactgagagaaatcgtgacgtctctgggtcctgcttacatcaagcttgggcaggcgctaagtatacgtccagatattctgtcccctgcagcaatgaccgagttgcagaaattatgtgataaggtagtgctgcctgcaatagttcttttgttaagtttcccttgttaccgcatgtatatagcacatacctacttgctgattggggattttttactgcgacgtcaaggttccttcattcccagatgatatagcaatggctcttcttgaagaagagcttggtcagccttggcaagcaatctactcagagttatccccctccccaatcgctgcaggtagacaatgatgcagtctctgcttgccacactccacagtaatcgaattccttgactatacatattcaatgcattgtattgcagcatctctgggacaggtttataagggccgcttgaaagaaacgggagaactagtagctgtcaaagttcagaggccatttgtacttgagactgttaccatcgatttattcatcattagaaacttgggtttggtactcaggagatttccacaggtgtccatcgatgttgttggcctggtagatgagtgggctgctcgattttttgaagaacttgattatgtaaatgaaggggaaaatggcacttactttgctgacgtgatgaaagaagatcttccacaggttgttgtaccaaagacttaccataaatacacgtctagaaaagttcttaccacacaatggatagagggagagaagttgtcacagagcacagaggacgatgttggatcattggtcagtgtaggagtcatttgctatctgaaacagttgcttgatactgggttcttccacgctgatccacatcctggcaatatgattagaacacctgatggaaagctggctattcttgattttggtatgtcaactagtagtttgaaaatccacaaataactattttgtccaactatggtattttgttttgcttctcataaaattatatataaacattatattagattttttttggcacataagactgctttactattattactacaatgacacagtgacatccatttaagaattttctttcactctgcattactaactagtaactgcaactgtgcatactcgtactagactaaagcatgaaagtgcaggccttttcagtagcatctgatagcctgtttgcattgcctttagcaagaattctgctgactaagtttgcacaaaattatttgtgtctttagctttttgttcagcctactttttgctatcttttttttcatttttaagcacatggaaaaaacaataaaaaagggggtagacccgtgtcggaagcttccacatgagtggggtatgggaaagggaaccatcccccagcagatgcggagagactacttcgaaccttctaccttattcatcgtgattatgatgcaattgttaaggactttgtgaagcttggttttattcctgaaggggttaacttggatcctatcttgcctgtactggccaaggtttttgatcaggcactagaaggaggcggtgccaagaatattaacttccaagaattggcagcagatctagcacagataacttttgattatccattcaggatacctccgtattttgctttgattattagagccatcggagtattagaaggcatagctttggtgggagatcctgaatttgccattgtggatgaagcatacccatacatcgcacagaggctactaacggacgaatcgcctcggctaaggagcgccttgcgttacaccatatatggcaaaaccggtgttttcgacgcggaaaggttcattgatgttatgcaagctttcgagaattttatccgtgcagcgaagagcggtggtggggagaacttgaagggaaacatggctgagctggctgagttgggaggtcaacctagcaccagtctggttcctgtatttgcaatggccgtagcgcagcctgagcagccagttaaagcccgtgcggctcttgcttttctactctctgagagggggaacttctttcgggagtttattcttgacgagattgtgaaagccatcgatgcgatttcaagggagcagttgatccagatcgccgcgtcttttgggataggaaacgcggccccagtttttagcatggttcctgtcagggccagggcattgcttccgacgatcacagaggaagacagggtcatcctgaacaacgtcgagaaggttgtgaagttcctgacatccgggactgcaactccaacagtgggcggggacgtgaacgtggtgtctgtggtgcaagagcttctacctgtgttgccaggcatctcgtcgaagatcctacctgatgtcttgagccggttgtcgtcacgggtatttgcacggataatccgggagacatttttgtagagtgttctctttttgtttgccccttgctaacaggaaaactacaagtagcaatatctgcccaaacaacacgcaaatgaatggtgatagaagattgtacagcaatacaatgtatagaatttgcatctaagtaagttaacaaaagcagcaaagcttaaccaacacgtactgtctgtagtgagcacacgagggctcaacacgataaaactggagaggttgtgttggcttgacaagtgcttcgacctctgcgattgtactctcggcttctccaatctcagcaacttgctcattcgactcctccacctcagcctgcaacgttgaaatggcctaagaaaacaaaacaacgc

SEQ ID NO: 40827 - DNA, 1386 bp, Zea Mays
accacccaggcaggcggcaggccaacgccacccgaaggccgcagcaggcaccacacaacacggacacaagtcaggcgcagcccataaccccccaccccagccgaagccatccgatacgggagggcccatccagcggcccaggtcacgctctcacgccacgcacgcatgctcccccgcctgctcaacgggccccaccgcctgctccttggcgggccccacgcctcgggcgccgcgcccctccaccgccgccgcgtcctcgccggccgccgggccatgtccgcctccgcctcgcccgcgtccgggccgaggcgtccgctgcgcggggtggtcttcgacatggacggcaccctcacggtgccagtcatcgatttcccggccatgtaccgcgaggtgctcggcggggacgccgcctacgccgcggcgcgcggctcggggggaggctccgtcgacatcctccactgcatcgaggactgggcgcccgacaagcagcgccacgcgtacgaggtcatcgcgcgcttcgagcgggagggcctcgaccgcctccagatcatgcccggggcctcggagctgtgtggcttcctggacgcgaagcagatcaggtcagtgcttgctgcctccacatcatggaagatggaactactgtcaagcttgtaagaggtttgatcacccgtaatgtgaaggacacagttgatttgttccaccaaagatttggtatgacgttcactcctgcactgagcagagaatttcgcccctataaaccaaatcctgctccactgcttcacatatgctccgcttggaacattccaccacacgaagtgatcatggttggcgacagtctcaaggatgatgttgtttgtggaaagagggcaggagctttcacttgcttgcttgatgaaacggggcgatatggtcctcacgattctttacctgaggaagtaaaacctgacttcaaggtgtcctcactgacagaagtattcgctgtgctggaggagcacttcgatttggcaccagtgcctgccgagagtagaatatgacagggaagttttattggacctcccttctaatgtgaaatcggctacccaaccaacagcttgaataatgtggaggacgttgatgggactttcaagtatcagaagcccctgctagagcctgcagccagagcccagaaggacgatggctgttccaaggggggattgaatgtctttggaaaggcaatgaagtgattcagttcgttgtaaatctattatattatgttgccccagactaaaccagcttgtgtggtttagtgactgaaatgaccacacgtatctggagattcagaatataacaatcgatttccacggatttcattcgttcaatttggttcccctatctctttcacacagc

SEQ ID NO: 40828 - DNA, 601 bp, Zea Mays
cattcttcatctgattccgagctgtagcatataatgggttgctatatactccattcatttttagttgtttgtggaaagagggcaggagctttcacttgcttgcttgatgaaacggggcgatatggtcctcacgattctttacctgaggaagtaaaacctgacttcaaggtgtcctcactgacagaagtattcgctgtgctggaggagcacttcgatttggcaccagtgcctgccgagagtagaatatgacagggaagttttattggacctcccttctaatgtgaaatcggctacccaaccaacagcttgaataatgtggaggacgttgatgggactttcaagtatcagaagcccctgctagagcctgcagccagagcccagaaggacgatggctgttccaaggggggattgaatgtctttggaaaggcaatgaagtgattcagttcgttgtaaatctattatattatgttgccccagactaaaccagcttgtgtggtttagtgactgaaatgaccacacgtatctggagattcagaatataacaatcgatttccacggatttcattcgttcaatttggttcccctatctctttcacacagc

SEQ ID NO: 40829 - DNA, 2703 bp, Zea Mays
ggacctcggaaggcaaccaagcgcgtcgtcgacgcctgcaatggcgccccccttccctcgcaggcacagcagtcagcaggcgttccatccagcgtgaactatattgcctaacccagcaccgagtccatctagcccccctgaagcgagatcgtttggacctcgaatttccccttcatatcctccaagggcactgtctccaggatctcctgacattgatgtgcgctctcattcgcacaagcccccacaccatagagagtcaaatcagggcccttcaccatcctcagcagaagcaggttgttctagttatatatgcactgaaccactgactgcaacaccaattggttccccttgtggctgtgtcgagcctattagtgttatcgttgatctggacttagctccttacctactgttcatgagcatagctgagttagaagttgaagttgcagctgggacatttcttaaacaaagccaagtgaagatcatggctgcagttgcaagtatccaggatgaccagaagacacgggtgaccatttatttggtgccactaagagaagagtttgatacttatacggcatccctaatatctgataggttcagggataaaaaggtccagataaattcatctatatttggagattataaagttatcaatgtcagctatcatggattgcaatccccaccatcatctgtgcctggaggatcggatccttcaggaaccgaagatcctataactgcagaggtgcctgatcagatgaaaaagcacaagaaatcagatattttgatcgtcgtggtagcgttagggtcttctcttggacttctgttgacatgtgctgttgtcctgatcttactagtaagatggaagaaacttggacggcttcatgaggatatgaaccctgcaactaccccaacagttaatagaagatacggtgctagatcaactttgtcaaccggcatggtgagctctgcgtcagcatcagcgttttcaacagtggctacttgcacaacatctgtaaagacattttcactaggccaacttcagaaggccacagatggttttgattcgagaagagttttgggtcaaggtggctttgggtgtgtctaccatgggacaatagaggatggaaacgaaattgctgttaaattgcttacaagggaggacaggagtggtgaccgtgagtttattgcggaggtggaaatgctcagtcgactgcaccaccgtaatcttgtcaaattgattggtatttgcgttgatcggagcaaaagatgtcttgtgtatgagctcatacgcaacggaagtgtggaatctcatcttcatggcgctgacaaggctaagggtaagctgaactgggatgttaggatgaaaattgctcttggggctgctcgaggcttagcatacctgcatgaagattcaaaccctcatgtcatacaccgtgacttcaaggccagcaatatcttgttagaggaagatttcactcccaaagttactgattttggtttagcaagggaagcatccaatgcaactcaacctatatctaccagggtaatgggcactttcggttatgttgctccagaatatgcaatgacgggtcatcttcttgtgaagagcgacgtctacagttacggggttgtcttgctggaacttctatcaggaaggaagcccgtaagcatctccgagtcgaaggatcccgagaaccttgtgacctgggcccgtcctctgctaagccacaaggagggcctggagaagttgatcgacccttctctggaagggaacttcaacttcgacaacgtggctaaggtggcgtccatcgcttccatgtgcgtgcacgcggacccatcgcagaggccgttcatgggcgaagccgtccaggcactgaagctcatctacagtgatccggacgaggcctgcgacgattcctacagcccgaggaactcatccgaccaagacggtggctacgacggagacctggtcttcgggagcgggagctgggggtttggggcctctggctctgggtgcctggactaccggaactccctgccgtttgttaccatggactacagttccggccgaatagaagggccgcgcgaccctcgcgcggcgttgtcggcgggctcccatgcccagccaccggtgctgcagaatagatcaggccccttgcgggtgaagaagaagctggccgcctcctaccgctctagaggcagtgttagcgagcatgggcacctgccgcgccattgatcagtagtagccaatgaagtagtgttaggccgctaccttccggtttgaccttggaggctgcggtggggtttgtcatcacctctcgatgattcgtgcctcgtgctagttagtgtacagttagttcgtggtgacccttggacatgcatgcatgcctgcctgccttgggtgtaggtgtttttttctttcttattcttcttgtttgccttctgcttcttccccggaagcaatgaggatggggttggcagatgctgtctaattttcgcaaaaatgcggctcatgcatctgattggtgtaatctggtttagggctttgacggaattctggacatcatgttgttgtggctaggttgttgtattggatgcagttcgtcactaacaagcgttagggcctgttcgtttcgcatggaacgaaggagtggaataaatctagcttgtattcgtttaataattactataaattttgaagatttt

SEQ ID NO: 40830 - DNA, 2744 bp, Zea Mays
ctctagctactactactactattctgtagattgatacagatagcggcgctcttctcgcttcgcctcgctgccaatctcgtcgccgatccccgggtccggcgccgccacgagcttccagatccaccgcccgggcaatgctgtagcgcctcgcgccgagatgggcggcgtcggcgccgcctcgcttgccctgctgccgctccccctcctcctcctcctgctcgtccgcgcggaggcctccgctctccacggaactatattgcctaacccagcaccgagtccatctagcccccctgaagcgagatcgtttggacctcgaatttccccttcatatcctccaagggcactgtctccaggatctcctgacattgatgtgcgctctcattcgcacaagcccccacaccatagagagtcaaatcagggcccttcaccatcctcagcagaagcaggttgttctagttatatatgcactgaaccactgactgcaacaccaattggttccccttgtggctgtgtcgagcctattagtgttatcgttgatctggacttagctccttacctactgttcatgagcatagctgagttagaagttgaagttgcagctgggacatttcttaaacaaagccaagtgaagatcatggctgcagttgcaagtatccaggatgaccagaagacacgggtgaccatttatttggtgccactaagagaagagtttgatacttatacggcatccctaatatctgataggttcagggataaaaaggtccagataaattcatctatatttggagattataaagttatcaatgtcagctatcatggattgcaatccccaccatcatctgtgcctggaggatcggatccttcaggaaccgaagatcctataactgcagagtaagatggaagaaacttggacggcttcatgaggatatgaaccctgcaactaccccaacagttaatagaagatacggtgctagatcaactttgtcaaccggcatggtgagctctgcgtcagcatcagcgttttcaacagtggctacttgcacaacatctgtaaagacattttcactaggccaacttcagaaggccacagatggttttgattcgagaagagttttgggtcaaggtggctttgggtgtgtctaccatgggacaatagaggatggaaacgaaattgctgttaaattgcttacaagggaggacaggagtggtgaccgtgagtttattgcggaggtggaaatgctcagtcgactgcaccaccgtaatcttgtcaaattgattggtatttgcgttgatcggagcaaaagatgtcttgtgtatgagctcatacgcaacggaagtgtggaatctcatcttcatggcgctgacaaggctaagggtaagctgaactgggatgttaggatgaaaattgctcttggggctgctcgaggcttagcatacctgcatgaagattcaaaccctcatgtcatacaccgtgacttcaaggccagcaatatcttgttagaggaagatttcactcccaaagttactgattttggtttagcaagggaagcatccaatgcaactcaacctatatctaccagggtaatgggcactttcggttatgttgctccagaatatgcaatgacgggtcatcttcttgtgaagagcgacgtctacagttacggggttgtcttgctggaacttctatcaggaaggaagcccgtaagcatctccgagtcgaaggatcccgagaaccttgtgacctgggcccgtcctctgctaagccacaaggagggcctggagaagttgatcgacccttctctggaagggaacttcaacttcgacaacgtggctaaggtggcgtccatcgcttccatgtgcgtgcacgcggacccatcgcagaggccgttcatgggcgaagccgtccaggcactgaagctcatctacagtgatccggacgaggcctgcgacgattcctacagcccgaggaactcatccgaccaagacggtggctacgacggagacctggtcttcgggagcgggagctgggggtttggggcctctggctctgggtgcctggactaccggaactccctgccgtttgttaccatggactacagttccggccgaatagaagggccgcgcgaccctcgcgcggcgttgtcggcgggctcccatgcccagccaccggtgctgcagaatagatcaggccccttgcgggtgaagaagaagctggccgcctcctaccgctctagaggcagtgttagcgagcatgggcacctgccgcgccattgatcagtagtagccaatgaagtagtgttaggccgctaccttccggtttgaccttggaggctgcggtggggtttgtcatcacctctcgatgattcgtgcctcgtgctagttagtgtacagttagttcgtggtgacccttggacatgcatgcatgcctgcctgccttgggtgtaggtgtttttttctttcttattcttcttgtttgccttctgcttcttccccggaagcaatgaggatggggttggcagatgctgtctaattttcgcaaaaatgcggctcatgcatctgattggtgtaatctggtttagggctttgacggaattctggacatcatgttgttgtggctaggttgttgtattggatgcagttcgtcactaacaagcgttagggcctgttcgtttcgcatggaacgaaggagtggaataaatctagcttgtattcgtttaataattactataaattttgaagatttt

SEQ ID NO: 40831 - DNA, 2675 bp, Zea Mays
gaatgggggttctgcttagactggcacatgccttcctctcagttggacctcgttgcaactcgttctagaactatattgcctaacccagcaccgagtccatctagcccccctgaagcgagatcgtttggacctcgaatttccccttcatatcctccaagggcactgtctccaggatctcctgacattgatgtgcgctctcattcgcacaagcccccacaccatagagagtcaaatcagggcccttcaccatcctcagcagaagcaggttgttctagttatatatgcactgaaccactgactgcaacaccaattggttccccttgtggctgtgtcgagcctattagtgttatcgttgatctggacttagctccttacctactgttcatgagcatagctgagttagaagttgaagttgcagctgggacatttcttaaacaaagccaagtgaagatcatggctgcagttgcaagtatccaggatgaccagaagacacgggtgaccatttatttggtgccactaagagaagagtttgatacttatacggcatccctaatatctgataggttcagggataaaaaggtccagataaattcatctatatttggagattataaagttatcaatgtcagctatcatggattgcaatccccaccatcatctgtgcctggaggatcggatccttcaggaaccgaagatcctataactgcagaggtgcctgatcagatgaaaaagcacaagaaatcagatattttgatcgtcgtggtagcgttagggtcttctcttggacttctgttgacatgtgctgttgtcctgatcttactagtaagatggaagaaacttggacggcttcatgaggatatgaaccctgcaactaccccaacagttaatagaagatacggtgctagatcaactttgtcaaccggcatggtgagctctgcgtcagcatcagcgttttcaacagtggctacttgcacaacatctgtaaagacattttcactaggccaacttcagaaggccacagatggttttgattcgagaagagttttgggtcaaggtggctttgggtgtgtctaccatgggacaatagaggatggaaacgaaattgctgttaaattgcttacaagggaggacaggagtggtgaccgtgagtttattgcggaggtggaaatgctcagtcgactgcaccaccgtaatcttgtcaaattgattggtatttgcgttgatcggagcaaaagatgtcttgtgtatgagctcatacgcaacggaagtgtggaatctcatcttcatggcgctgacaaggctaagggtaagctgaactgggatgttaggatgaaaattgctcttggggctgctcgaggcttagcatacctgcatgaagattcaaaccctcatgtcatacaccgtgacttcaaggccagcaatatcttgttagaggaagatttcactcccaaagttactgattttggtttagcaagggaagcatccaatgcaactcaacctatatctaccagggtaatgggcactttcggttatgttgctccagaatatgcaatgacgggtcatcttcttgtgaagagcgacgtctacagttacggggttgtcttgctggaacttctatcaggaaggaagcccgtaagcatctccgagtcgaaggatcccgagaaccttgtgacctgggcccgtcctctgctaagccacaaggagggcctggagaagttgatcgacccttctctggaagggaacttcaacttcgacaacgtggctaaggtggcgtccatcgcttccatgtgcgtgcacgcggacccatcgcagaggccgttcatgggcgaagccgtccaggcactgaagctcatctacagtgatccggacgaggcctgcgacgattcctacagcccgaggaactcatccgaccaagacggtggctacgacggagacctggtcttcgggagcgggagctgggggtttggggcctctggctctgggtgcctggactaccggaactccctgccgtttgttaccatggactacagttccggccgaatagaagggccgcgcgaccctcgcgcggcgttgtcggcgggctcccatgcccagccaccggtgctgcagaatagatcaggccccttgcgggtgaagaagaagctggccgcctcctaccgctctagaggcagtgttagcgagcatgggcacctgccgcgccattgatcagtagtagccaatgaagtagtgttaggccgctaccttccggtttgaccttggaggctgcggtggggtttgtcatcacctctcgatgattcgtgcctcgtgctagttagtgtacagttagttcgtggtgacccttggacatgcatgcatgcctgcctgccttgggtgtaggtgtttttttctttcttattcttcttgtttgccttctgcttcttccccggaagcaatgaggatggggttggcagatgctgtctaattttcgcaaaaatgcggctcatgcatctgattggtgtaatctggtttagggctttgacggaattctggacatcatgttgttgtggctaggttgttgtattggatgcagttcgtcactaacaagcgttagggcctgttcgtttcgcatggaacgaaggagtggaataaatctagcttgtattcgtttaataattactataaattttgaagatttt

SEQ ID NO: 40832 - DNA, 2764 bp, Zea Mays
gggtgtgactcttgcaaagacccattgcacgagtattgaatttgcattaaagtaactcatgcaaagctacatcatttttggatgcagtataaagtttatttgggaactcaagcttttgaagaaaaaaaagaggttttatctttctatatcaatcatgaactatattgcctaacccagcaccgagtccatctagcccccctgaagcgagatcgtttggacctcgaatttccccttcatatcctccaagggcactgtctccaggatctcctgacattgatgtgcgctctcattcgcacaagcccccacaccatagagagtcaaatcagggcccttcaccatcctcagcagaagcaggttgttctagttatatatgcactgaaccactgactgcaacaccaattggttccccttgtggctgtgtcgagcctattagtgttatcgttgatctggacttagctccttacctactgttcatgagcatagctgagttagaagttgaagttgcagctgggacatttcttaaacaaagccaagtgaagatcatggctgcagttgcaagtatccaggatgaccagaagacacgggtgaccatttatttggtgccactaagagaagagtttgatacttatacggcatccctaatatctgataggttcagggataaaaaggtccagataaattcatctatatttggagattataaagttatcaatgtcagctatcatggattgcaatccccaccatcatctgtgcctggaggatcggatccttcaggaaccgaagatcctataactgcagaggtgcctgatcagatgaaaaagcacaagaaatcagatattttgatcgtcgtggtagcgttagggtcttctcttggacttctgttgacatgtgctgttgtcctgatcttactagtaagatggaagaaacttggacggcttcatgaggatatgaaccctgcaactaccccaacagttaatagaagatacggtgctagatcaactttgtcaaccggcatggtgagctctgcgtcagcatcagcgttttcaacagtggctacttgcacaacatctgtaaagacattttcactaggccaacttcagaaggccacagatggttttgattcgagaagagttttgggtcaaggtggctttgggtgtgtctaccatgggacaatagaggatggaaacgaaattgctgttaaattgcttacaagggaggacaggagtggtgaccgtgagtttattgcggaggtggaaatgctcagtcgactgcaccaccgtaatcttgtcaaattgattggtatttgcgttgatcggagcaaaagatgtcttgtgtatgagctcatacgcaacggaagtgtggaatctcatcttcatggcgctgacaaggctaagggtaagctgaactgggatgttaggatgaaaattgctcttggggctgctcgaggcttagcatacctgcatgaagattcaaaccctcatgtcatacaccgtgacttcaaggccagcaatatcttgttagaggaagatttcactcccaaagttactgattttggtttagcaagggaagcatccaatgcaactcaacctatatctaccagggtaatgggcactttcggttatgttgctccagaatatgcaatgacgggtcatcttcttgtgaagagcgacgtctacagttacggggttgtcttgctggaacttctatcaggaaggaagcccgtaagcatctccgagtcgaaggatcccgagaaccttgtgacctgggcccgtcctctgctaagccacaaggagggcctggagaagttgatcgacccttctctggaagggaacttcaacttcgacaacgtggctaaggtggcgtccatcgcttccatgtgcgtgcacgcggacccatcgcagaggccgttcatgggcgaagccgtccaggcactgaagctcatctacagtgatccggacgaggcctgcgacgattcctacagcccgaggaactcatccgaccaagacggtggctacgacggagacctggtcttcgggagcgggagctgggggtttggggcctctggctctgggtgcctggactaccggaactccctgccgtttgttaccatggactacagttccggccgaatagaagggccgcgcgaccctcgcgcggcgttgtcggcgggctcccatgcccagccaccggtgctgcagaatagatcaggccccttgcgggtgaagaagaagctggccgcctcctaccgctctagaggcagtgttagcgagcatgggcacctgccgcgccattgatcagtagtagccaatgaagtagtgttaggccgctaccttccggtttgaccttggaggctgcggtggggtttgtcatcacctctcgatgattcgtgcctcgtgctagttagtgtacagttagttcgtggtgacccttggacatgcatgcatgcctgcctgccttgggtgtaggtgtttttttctttcttattcttcttgtttgccttctgcttcttccccggaagcaatgaggatggggttggcagatgctgtctaattttcgcaaaaatgcggctcatgcatctgattggtgtaatctggtttagggctttgacggaattctggacatcatgttgttgtggctaggttgttgtattggatgcagttcgtcactaacaagcgttagggcctgttcgtttcgcatggaacgaaggagtggaataaatctagcttgtattcgtttaataattactataaattttgaagatttt

SEQ ID NO: 40833 - DNA, 2636 bp, Zea Mays
aaaagaggttttatctttctatatcaatcatgaactatattgcctaacccagcaccgagtccatctagcccccctgaagcgagatcgtttggacctcgaatttccccttcatatcctccaagggcactgtctccaggatctcctgacattgatgtgcgctctcattcgcacaagcccccacaccatagagagtcaaatcagggcccttcaccatcctcagcagaaggttgttctagttatatatgcactgaaccactgactgcaacaccaattggttccccttgtggctgtgtcgagcctattagtgttatcgttgatctggacttagctccttacctactgttcatgagcatagctgagttagaagttgaagttgcagctgggacatttcttaaacaaagccaagtgaagatcatggctgcagttgcaagtatccaggatgaccagaagacacgggtgaccatttatttggtgccactaagagaagagtttgatacttatacggcatccctaatatctgataggttcagggataaaaaggtccagataaattcatctatatttggagattataaagttatcaatgtcagctatcatggattgcaatccccaccatcatctgtgcctggaggatcggatccttcaggaaccgaagatcctataactgcagaggtgcctgatcagatgaaaaagcacaagaaatcagatattttgatcgtcgtggtagcgttagggtcttctcttggacttctgttgacatgtgctgttgtcctgatcttactagtaagatggaagaaacttggacggcttcatgaggatatgaaccctgcaactaccccaacagttaatagaagatacggtgctagatcaactttgtcaaccggcatggtgagctctgcgtcagcatcagcgttttcaacagtggctacttgcacaacatctgtaaagacattttcactaggccaacttcagaaggccacagatggttttgattcgagaagagttttgggtcaaggtggctttgggtgtgtctaccatgggacaatagaggatggaaacgaaattgctgttaaattgcttacaagggaggacaggagtggtgaccgtgagtttattgcggaggtggaaatgctcagtcgactgcaccaccgtaatcttgtcaaattgattggtatttgcgttgatcggagcaaaagatgtcttgtgtatgagctcatacgcaacggaagtgtggaatctcatcttcatggcgctgacaaggctaagggtaagctgaactgggatgttaggatgaaaattgctcttggggctgctcgaggcttagcatacctgcatgaagattcaaaccctcatgtcatacaccgtgacttcaaggccagcaatatcttgttagaggaagatttcactcccaaagttactgattttggtttagcaagggaagcatccaatgcaactcaacctatatctaccagggtaatgggcactttcggttatgttgctccagaatatgcaatgacgggtcatcttcttgtgaagagcgacgtctacagttacggggttgtcttgctggaacttctatcaggaaggaagcccgtaagcatctccgagtcgaaggatcccgagaaccttgtgacctgggcccgtcctctgctaagccacaaggagggcctggagaagttgatcgacccttctctggaagggaacttcaacttcgacaacgtggctaaggtggcgtccatcgcttccatgtgcgtgcacgcggacccatcgcagaggccgttcatgggcgaagccgtccaggcactgaagctcatctacagtgatccggacgaggcctgcgacgattcctacagcccgaggaactcatccgaccaagacggtggctacgacggagacctggtcttcgggagcgggagctgggggtttggggcctctggctctgggtgcctggactaccggaactccctgccgtttgttaccatggactacagttccggccgaatagaagggccgcgcgaccctcgcgcggcgttgtcggcgggctcccatgcccagccaccggtgctgcagaatagatcaggccccttgcgggtgaagaagaagctggccgcctcctaccgctctagaggcagtgttagcgagcatgggcacctgccgcgccattgatcagtagtagccaatgaagtagtgttaggccgctaccttccggtttgaccttggaggctgcggtggggtttgtcatcacctctcgatgattcgtgcctcgtgctagttagtgtacagttagttcgtggtgacccttggacatgcatgcatgcctgcctgccttgggtgtaggtgtttttttctttcttattcttcttgtttgccttctgcttcttccccggaagcaatgaggatggggttggcagatgctgtctaattttcgcaaaaatgcggctcatgcatctgattggtgtaatctggtttagggctttgacggaattctggacatcatgttgttgtggctaggttgttgtattggatgcagttcgtcactaacaagcgttagggcctgttcgtttcgcatggaacgaaggagtggaataaatctagcttgtattcgtttaataattactataaattttgaagatttt

SEQ ID NO: 40834 - DNA, 1337 bp, Zea Mays
ctttccgtgaccaaaaggccctggcccaataaagcccatgacacgattaagagctttacccagcggcagcgacgaggagacagattcttctccccccacggccacacccacgcaccgcagcgccgcctcgtctcctctcgccggcgatggaggaggtgggcggggacatgcctctcccgaaacagaagctctccgctgcaccgtacagggacggaggtggcgtcgtgctcgtggccactgggagctttaaccctcccacctacatgcacctgcgcatgtttgagctggcaaaggatgaactcgagctgcgaggttattctgtgttgggcggctacatgtctccggtgaatgatgcatataagaagaaggacctcttaccggctgctcaccgaattcgcttttgtgaacttgcgtccaaaagctcatcttttgtgatggttgatccgtgggaggcaatgcagaatggttatcagcgcactttgaccgttctttcgagaatacgaaactcactatgcaaggatggtgtagctgaccaaggtagcctcaaggtaatgcttttatgtggctctgacttgctcgagtcattcaccactccaggtgtttggatcctagaccaggtcagaaccatatgccaggactttggtgtcgtatgcatacggcgagaaggaaaggatgttggaaaattgatagacaacagcgatatattgcaagaatgcagggataacattatttcggttgatgagattgtgccaaatcagatcagttcatccagagtaagagactgcataagaagatctctatcgataaagtatctcactagtgatgaagtaattgaatacatcagagaacacaagctgtttatggaaggcaatggcggcgacatagcattgctgtaatagaggtatttggaggtaaactctgtaatcgacaaggatcggctgtggacgtctacctcaggagtcaggataccatctggaccgtgcattctgggcaattacttcgcacaaacacagaaataaacggaactggccacttaaattactactatatttttgttaaatttgattctggaggttgaagtgagttgcatgttgattaattttgcttttgtgccagaatcaagtgctacatacaacatgaattctgacaaccatataaatgccaaggttattctgacatagcaatcgtggatatagcatcggttagacaaacatatcataaagaattaagcctcatttgcagacagttctgatgtatataagcacagacaaaagatgtctctgtaacggattctattgaacagaacacatgccattatacaactgatcaactgcttt

SEQ ID NO: 40835 - DNA, 1256 bp, Zea Mays
acgaggagacagattcttctccccccacggccacacccacgcaccgcagcgccgcctcgtctcctctcgccggcgatggaggaggtgggcggggacatgcctctcccgaaacagaagctctccgctgcaccgtacagggacggaggtggcgtcgtgctcgtggccactgggagctttaaccctcccacctacatgcacctgcgcatgtttgagctggcaaaggatgaactcgagctgcgaggttattctgtgttgggcggctacatgtctccggtgaatgatgcatataagaagaaggacctcttaccggctgctcaccgaattcgcttttgtgaacttgcgtccaaaagctcatcttttgtgatggttgatccgtgggaggcaatgcagaatggttatcagcgcactttgaccgttctttcgagaatacgaaactcactatgcaaggatggtgtagctgaccaaggtagcctcaaggtaatgcttttatgtggctctgacttgctcgagtcattcaccactccaggtgtttggatcctagaccaggtcagaaccatatgccaggactttggtgtcgtatgcatacggcgagaaggaaaggatgttggaaaattgatagacaacagcgatatattgcaagaatgcagggataacattatttcggttgatgagattgtgccaaatcagatcagttcatccagagtaagagactgcataagaagatctctatcgataaagtatctcactagtgatgaagtaattgaatacatcagagaacacaagctgtttatggaaggcaatggcggcgacatagcattgctgtaatagaggtaaactctgtaatcgacaaggatcggctgtggacgtctacctcaggagtcaggataccatctggaccgtgcattctgggcaattacttcgcacaaacacagaaataaacggaactggccacttaaattactactatatttttgttaaatttgattctggaggttgaagtgagttgcatgttgattaattttgcttttgtgccagaatcaagtgctacatacaacatgaattctgacaaccatataaatgccaaggttattctgacatagcaatcgtggatatagcatcggttagacaaacatatcataaagaattaagcctcatttgcagacagttctgatgtatataagcacagacaaaagatgtctctgtaacggattctattgaacagaacacatgccattatacaactgatcaactgcttt

SEQ ID NO: 40836 - DNA, 1248 bp, Zea Mays
gattcttctccccccacggccacacccacgcaccgcagcgccgcctcgtctcctctcgccggcgatggaggaggtgggcggggacatgcctctcccgaaacagaagctctccgctgcaccgtacagggacggaggtggcgtcgtgctcgtggccactgggagctttaaccctcccacctacatgcacctgcgcatgtttgagctggcaaaggatgaactcgagctgcgaggttattctgtgttgggcggctacatgtctccggtgaatgatgcatataagaagaaggacctcttaccggctgctcaccgaattcgcttttgtgaacttgcgtccaaaagctcatcttttgtgatggttgatccgtgggaggcaatgcagaatggttatcagcgcactttgaccgttctttcgagaatacgaaactcactatgcaaggatggtgtagctgaccaaggtagcctcaaggtaatgcttttatgtggctctgacttgctcgagtcattcaccactccaggtgtttggatcctagaccaggtcagaaccatatgccaggactttggtgtcgtatgcatacggcgagaaggaaaggatgttggaaaattgatagacaacagcgatatattgcaagaatgcagggataacattatttcggttgatgagattgtgccaaatcagatcagttcatccagaactgcataagaagatctctatcgataaagtatctcactagtgatgaagtaattgaatacatcagagaacacaagctgtttatggaaggcaatggcggcgacatagcattgctgtaatagaggtatttggaggtaaactctgtaatcgacaaggatcggctgtggacgtctacctcaggagtcaggataccatctggaccgtgcattctgggcaattacttcgcacaaacacagaaataaacggaactggccacttaaattactactatatttttgttaaatttgattctggaggttgaagtgagttgcatgttgattaattttgcttttgtgccagaatcaagtgctacatacaacatgaattctgacaaccatataaatgccaaggttattctgacatagcaatcgtggatatagcatcggttagacaaacatatcataaagaattaagcctcatttgcagacagttctgatgtatataagcacagacaaaagatgtctctgtaacggattctattgaacagaacacatgccattatacaactgatcaactgcttt

SEQ ID NO: 40837 - DNA, 1111 bp, Zea Mays
gattcttctccccccacggccacacccacgcaccgcagcgccgcctcgtctcctctcgccggcgatggaggaggtgggcggggacatgcctctcccgaaacagaagctctccgctgcaccgtacagggacggaggtggcgtcgtgctcgtggccactgggagctttaaccctcccacctacatgcacctgcgcatgtttgagctggcaaaggatgaactcgagctgcgaggttattctgtgttgggcggctacatgtctccggtgaatgatgcatataagaagaaggacctcttaccggctgctcaccgaattcgcttttgtgaacttgcgtccaaaagctcatcttttgtgatggttgatccgtgggaggcaatgcagaatggttatcagcgcactttgaccgttctttcgagaatacgaaactcactatgcaaggatggtgtagctgaccaaggtagcctcaaggtaatgcttttatgtggctctgacttgctcgagtcattcaccactccaggtgtttggatcctagaccaggtcagaaccatatgccaggactttggtgtcgtatgcatacggcgagaaggaaaggatgttggaaaattgatagacaacagcgatatattgcaagaatgcagggataacattatttcggttgatgagattgtgccaaatcagatcagttcatccagagtaagagactgcataagaagatctctatcgataaagtatctcactagtgatgaagtaattgaatacatcagagaacacaagctgtttatggaaggcaatggcggcgacatagcattgctgtaatagaggtatttggagattttcactatcatgcaggttgaagtgagttgcatgttgattaattttgcttttgtgccagaatcaagtgctacatacaacatgaattctgacaaccatataaatgccaaggttattctgacatagcaatcgtggatatagcatcggttagacaaacatatcataaagaattaagcctcatttgcagacagttctgatgtatataagcacagacaaaagatgtctctgtaacggattctattgaacagaacacatgccattatacaactgatcaactgcttt

SEQ ID NO: 40838 - DNA, 1240 bp, Zea Mays
gattcttctccccccacggccacacccacgcaccgcagcgccgcctcgtctcctctcgccggcgatggaggaggtgggcggggacatgcctctcccgaaacagaagctctccgctgcaccgtacagggacggaggtggcgtcgtgctcgtggccactgggagctttaaccctcccacctacatgcacctgcgcatgtttgagctggcaaaggatgaactcgagctgcgaggttattctgtgttgggcggctacatgtctccggtgaatgatgcatataagaagaaggacctcttaccggctgctcaccgaattcgcttttgtgaacttgcgtccaaaagctcatcttttgtgatggttgatccgtgggaggcaatgcagaatggttatcagcgcactttgaccgttctttcgagaatacgaaactcactatgcaaggatggtgtagctgaccaaggtagcctcaaggtaatgcttttatgtggctctgacttgctcgagtcattcaccactccaggtgtttggatcctagaccaggtcagaaccatatgccaggactttggtgtcgtatgcatacggcgagaaggaaaggatgttggaaaattgatagacaacagcgatatattgcaagaatgcagggataacattatttcggttgatgagattgtgccaaatcagatcagttcatccagagtaagatctctatcgataaagtatctcactagtgatgaagtaattgaatacatcagagaacacaagctgtttatggaaggcaatggcggcgacatagcattgctgtaatagaggtatttggaggtaaactctgtaatcgacaaggatcggctgtggacgtctacctcaggagtcaggataccatctggaccgtgcattctgggcaattacttcgcacaaacacagaaataaacggaactggccacttaaattactactatatttttgttaaatttgattctggaggttgaagtgagttgcatgttgattaattttgcttttgtgccagaatcaagtgctacatacaacatgaattctgacaaccatataaatgccaaggttattctgacatagcaatcgtggatatagcatcggttagacaaacatatcataaagaattaagcctcatttgcagacagttctgatgtatataagcacagacaaaagatgtctctgtaacggattctattgaacagaacacatgccattatacaactgatcaactgcttt

SEQ ID NO: 40839 - DNA, 1250 bp, Zea Mays
gattcttctccccccacggccacacccacgcaccgcagcgccgcctcgtctcctctcgccggcgatggaggaggtgggcggggacatgcctctcccgaaacagaagctctccgctgcaccgtacagggacggaggtggcgtcgtgctcgtggccactgggagctttaaccctcccacctacatgcacctgcgcatgtttgagctggcaaaggatgaactcgagctgcgaggttattctgtgttgggcggctacatgtctccggtgaatgatgcatataagaagaaggacctcttaccggctgctcaccgaattcgcttttgtgaacttgcgtccaaaagctcatcttttgtgatggttgatccgtgggaggcaatgcagaatggttatcagcgcactttgaccgttctttcgagaatacgaaactcactatgcaaggatggtgtagctgaccaaggtagcctcaaggtaatgcttttatgtggctctgacttgctcgagtcattcaccactccaggtgtttggatcctagaccaggtcagaaccatatgccaggactttggtgtcgtatgcatacggcgagaaggaaaggatgttggaaaattgatagacaacagcgatatattgcaagaatgcagggataacattatttcggttgatgagattgtgccaaatcagatcagttcatccagaagactgcataagaagatctctatcgataaagtatctcactagtgatgaagtaattgaatacatcagagaacacaagctgtttatggaaggcaatggcggcgacatagcattgctgtaatagaggtatttggaggtaaactctgtaatcgacaaggatcggctgtggacgtctacctcaggagtcaggataccatctggaccgtgcattctgggcaattacttcgcacaaacacagaaataaacggaactggccacttaaattactactatatttttgttaaatttgattctggaggttgaagtgagttgcatgttgattaattttgcttttgtgccagaatcaagtgctacatacaacatgaattctgacaaccatataaatgccaaggttattctgacatagcaatcgtggatatagcatcggttagacaaacatatcataaagaattaagcctcatttgcagacagttctgatgtatataagcacagacaaaagatgtctctgtaacggattctattgaacagaacacatgccattatacaactgatcaactgcttt

SEQ ID NO: 40840 - DNA, 1454 bp, Zea Mays
gatatcaaatctttaacatttaaactcttccgattgtcaggctaagcaacagtttatcgatatggggaggatgccatcgaagctaacaggaaacggtccagcagcacaaacatcatccgggaaaacatctttagggccatcaaaagctcgtctaactaaaaactctcttcccaattcgcaacacaaacaaatgttatttgaagtaaatttcgatcaactgattccactagacaatcgcatttgccgcgctggcaatcctaggccacagatcagcacactcctttccgatgggtccagtgatggcagagcctttcatctctccctttgggttcacaatcactccagcattgtctgcaatatcacataaacagaacattacagaagcatgaaccacgaaccaaggctgaagtaaatgtggtgttgaccacgagcagcaggtaaataaaaagagttgctgatcaccaaatgtctaatataaatctctagacatgtgacaggcacaaaaaatgttaaaagacagaataaataactcaaatcaactgcaggtcgacaccaaattataccaaggcataaccacataactagtacaatccagccaagatgcaacatctaacttgcacatattcaccgttgctagagtttgaattaaaaaacatgagaacatgctattggtatctgagcaaataaatagtattggtcattgtttcgcgaatacttcaacatgtgccaggagacaggtaacactgcacaacgggaaaatgcacaatgctgtttaatactggccaattcgcttatatgcttcctcttgacaaatgaccagactgcacggtcactctttattaggtaaagaagcaacactttttgtgcagagaacatcaagcttcctaaaatctaatcataattcctcagaacaaagtattctagagtacaaatttgcaacaacaaaaaaacaactatgatatcttggtcatcatgtttactaaaattcagaaataatatcaaaagtagaatgttagctaagcagacatcacactctaaagaaccaaaatcaaatgaaaagaagactatccaagagaactgaattctgggtaattctacaaggacacagaagctcaaatgattggaccattgcagagtcaatgcacccagtcatgataataaatgtaccttcaaagtacatgtagacaccatcctttcggcgccatggcttgcgctgcctcacaatgacagctggcatcaccttcttcctaaggtcaggctttcccttcttcacagttgccataaccatgtcaccaacacaggcagaaggaagcctgttaaggcgccccttgattcccttcacagaaatgatgtaaaggttcttggctccagtgttatcagcacagttcacagtggctgccactggtagacccagtgacatccggaacttgttaccagcagaacctccacgtcct

SEQ ID NO: 40841 - DNA, 2028 bp, Zea Mays
agttcgggatttcttgcgcgttagtcccttcggaagtcaggatcgtgagaaggaggctcgggaaatggggtgggcgcacccggcggtgaccatggaggaggtgctccgtctggtgcggggtttcgtcgacgtccttgtccttgccggcggccgcacctcgtccggcgccgctgctacttggagcgccgacgagatcaagaaggccctccggtgggcgctcttcttcgaggagattttcaaggacctgctcgactcgggccagtacgaggattctgcaagagaactcgatgcggcactccttgagctcacttcaagtcccgagttccctaagggtcttgctgctgtacgttcagatttgctatccatggcaagggtgttggttatgcgacattttctgaaaccaaacacaatgagcgtggaaaacttttgtgctcttcttgaagcggttgctggcatggatattgatggcatttgtgctagtggtgcgcacaacgcatgccaagagtatgctgagtcaatattgaatatgaatacatcatgttttgcgcagaccatgaatgcttgtgatggtggacttcccactagttcttatgatctgcgggctgaatccacgggccattcatggattatagttaaagaatttcagaagacgctggattcggcatcgtgtggacggttggctgatagaggactggaaacgtttttgaacagtgtgaaaaggaacatcttggaaaatggtagtaataagccttgtgtcccagcaattccgaaaacatcgcaaatgatcgacgagtttctaatgtggaagcaatggagagcaaagtgtttgtcatatttgcttgatcaacggaccattcgagttctgtctggagctagtttgatttttaaagctcctaaagagcagtggatgaaagtgtttgagcccttaaaaagtatagaagaaacatgtcatagtggtcttgttgaaaccatggagctatgcttgctgggttcgattacaaggcgatggaacacattgatagagggcttcatgtcacacactttctgttccattcctatatccaagaagcacgctgatctgcaccagtgccttcacagaacctttcaggacaaattccaagacgaatatcttaatttggaggaaaaggatattcttgactatgcaagacagacattagagaggaaaccatccgtactatggcttctacctccagttcttaccgccgcagcaattccaccgcagtcaagcttgttccagatatacctagctcaaatcgataagcaaattcatgaagctgctcctgcagatcgaaagtgtagttgcagaggagatgaaatagatcggcatgttaactgtgagattactgaaaggattcaatgtctatatgcattccttattcagcaactttcatataacggttccacaagattacactgaatgttagcagtgtgcactggctgtggatgtccaggaagggcagcgacgcccgccctcaaggtgttggatgaaatggtgcacgcttatgggagggtgacactgagcagtccttctggttgagaagatgaaagacatctgcaagtataatcatctacaatttgctgctaaaaggaactcaatcattgatgcaagatccatgatgagcatgcattggttatcttatcgcagaaaatcttccggcatgagacaactacacagactttggccagcttctgattcgatagtgattgcaaatgttgatatcttcagctagctggctataattatgtgcacacttgaaagtcaatctaaatttattttgagccccagccatgtgtcatgcctcgacgacaactggctagctagctacatgtcgtggcaatcagaaaaagggtccacagatagaaagggtgatgaagtggactctccccgtcgttcgttcatggttttcagtcgggacactgaaacaaatgagaaaagcaattactaggatttaaacatactaatgccaaagacgtcgtcatgtaattcgatggcatgtaacaaatgag

SEQ ID NO: 40842 - DNA, 647 bp, Zea Mays
tcagatttgaaatgagataagcacccaagtgctcaaaattcttcagctaaaccttgttttttttcttccttccagggctgtggatgtccaggaagggcagcgacgcccgccctcaaggtgttggatgaaatggtgcacgcttatgggagggtgacactgagcagtccttctggttgagaagatgaaagacatctgcaagtataatcatctacaatttgctgctaaaaggaactcaatcattgatgcaagatccatgatgagcatgcattggttatcttatcgcagaaaatcttccggcatgagacaactacacagactttggccagcttctgattcgatagtgattgcaaatgttgatatcttcagctagctggctataattatgtgcacacttgaaagtcaatctaaatttattttgagccccagccatgtgtcatgcctcgacgacaactggctagctagctacatgtcgtggcaatcagaaaaagggtccacagatagaaagggtgatgaagtggactctccccgtcgttcgttcatggttttcagtcgggacactgaaacaaatgagaaaagcaattactaggatttaaacatactaatgccaaagacgtcgtcatgtaattcgatggcatgtaacaaatgag

SEQ ID NO: 40843 - DNA, 597 bp, Zea Mays
tgactcctctttttttgtctccaagggctgtggatgtccaggaagggcagcgacgcccgccctcaaggtgttggatgaaatggtgcacgcttatgggagggtgacactgagcagtccttctggttgagaagatgaaagacatctgcaagtataatcatctacaatttgctgctaaaaggaactcaatcattgatgcaagatccatgatgagcatgcattggttatcttatcgcagaaaatcttccggcatgagacaactacacagactttggccagcttctgattcgatagtgattgcaaatgttgatatcttcagctagctggctataattatgtgcacacttgaaagtcaatctaaatttattttgagccccagccatgtgtcatgcctcgacgacaactggctagctagctacatgtcgtggcaatcagaaaaagggtccacagatagaaagggtgatgaagtggactctccccgtcgttcgttcatggttttcagtcgggacactgaaacaaatgagaaaagcaattactaggatttaaacatactaatgccaaagacgtcgtcatgtaattcgatggcatgtaacaaatgag

SEQ ID NO: 40844 - DNA, 3088 bp, Zea Mays
gctgccgtctgcacctaaagttttgcagtgaatttattgagtcactactgccagctacagagggacgacgacgagcattgggaccagagcgcgcggtaaaaaaaataaataaaagcgtgtactttagttgattttgggcctccattgctaggagactacgtactcgattcctttggcacctctccccttctccctctactcctctctaccagtgtacctatataaagatggcaatgggcatgccctctacagctgaaagagctaaactaccacacacacacacatcctacgcatcttctcgcagccatctttgtggaagcaaggcgggcaacatcgtgtggctagccagcaagagggagagaaacaagcacaagtatggcctcaaaacctggccctctgagtcgctggccatggcaagatcttggaaactacaagtacgcgctggtggctccatgggcggtgcgcagcacgtacaggttcgtgaggagcgggagcggggagcgggacctgctcgccttcgccgtgctgccggtgctcctcctccgcctcctctacagccagctctggatcaccgtgtcccgccaccagacggcccggagcaggcacaggatcgtcaacaagagcctcgacttcgagcaggtcgacagggagaggaactgggacgaccagatcctgctgacggcgctgctcttctacgcggtgaacgcggcggtgccggtggcgcagtcggtgccgtggtgggactcgagggggctgctggtggcggcgctcctccacgtgggtcccgtggagttcctctactactggctccaccgcgcgctgcaccaccactacctctacgcccgcggtgatccatccgttcgcggaggagctggtgtacttcaccctgttcgccatcccgctgctcaccatggtgggcaccggcaccgcctccgtggccgtggccaacggctacctcgcctacatcgacttcatgaactacctcggccactgcaacttcgagctcgtccccaggctgctcttcgacgtcttccctcccctcaagtacctcatgtacacgccatcgttccactcgctgcaccacacgcagttccgcagcaactactcgctcttcatgccgctctacgaccacctgtacggcacggcggacaagtcaagcgacgacctgtacgagcgcgcgctgcagggccgcgccggggaggacgcgcccgacgtcgtccacctcacgcacctcaccacgccggcctccctcctccgcctccgcctcggcttcgcgtccctcgccgccgcgccggcgccgcccgcgtcccgctacggcgccggcagcagcagcagcagcagcagcagcctggcggcggtggcgtgcccgctggccgcgctcctcggctggacccggaccgccttcaggtccgaggccaacaggctccacaagctcaagctcgagacgtgggtcgttccaagatacacctctcagtacctgtccaagcaaggcctgtacgcagtggggcgtgtggtggagaaggcggtggcggacgcggaggcgagtggcgcgagagtactcacgctgggtctactgaaccaggcaaacgagctgaacaaaaacggcgagctgtacgtcatcaggaagcccagcatgaggaccaagatcgtcgacgggacaagcctggccgccgccgccgtgctccacatgatccctgagggcaccgacgaggtgctcctcctgggagacgccggcggcaataagatggcgggcgtgctggcttcggcgctctgcgaacgcgagattcaggttcacgtggtcgacaaggacctgtacgagtccgtgaagcagcagctgcgcccagagacgcacgagcatctcctccacctcgctgagtggtggagtcacagcgccaagacgaccaaggtatggctcgtcggcgacaggctgacgggcgaggagcagaggagggcgcagggcggcgcccacttcgttccctactcgcagttccctcctggcgccgtcgtccgcgccgactgcgtctaccacagcaccccggcgctggtggtgccggacgccttcgaggacctccacgcatgcgagaactggctgccgcggagggtgatgagcgcgtggcgcgcggcgggcatcgtgcacgcgctcgaaggctgggacgcgcacgagtgcggcgccagggtcaccggcgtcgacaaggcctggcgcgccgcgctcgcccacggcttccgcccctacgaccgctatggcgccaactaatacgtgaagtgaccattacgaacgacgacgactacgaagcgtacctgtgcatggaatgatgagtagcatctatctatgaagacgaggaaaaaaacacttctttgtttatcgttcaagatgcaaaaagaaaaacaaagattcgtctttgacagttcacaccacggcccatactgctctttcacgtaaaccgggtgaattccgtgtacgtacggtacgtgtgtgtactaccctacaattaattactactagttgggccaggtccggcaaggcggcaacgatcacagagtcctcagcggcccatggtaaaacccaaaccgctggttccaaacaattcacggagcgggaaggacggggacggacacctggctcgcccgactggccccgaactgtctatcagtctctcgctcaaagtcaaaaccggcatctttgacccatcctccgtcccttccctttcgcgggaagacgtcgatatagtcgatcacagccattcgtgtgggagtggacgacgcagatggaccagtaccgcatgtctccaacccaactcgagacgctccgccgaaccagggtagtggtggtgagttgggtgtcgtgggcgattgtgttggaaatcatactctggtcagtaagtaagagtagtaattagatggttgtctgttgcggttcagctgtccaagagcagtgagtttgttgataggtggttgcatttatcctgacaggctgtttgtgagtagctcagaaacaagaaaaaaaagaatataacatgggctgaaaaggtgtccgtatgtgttattcttgtttacattctttgtttttaattggaactcgctgtgattt

SEQ ID NO: 40845 - DNA, 3213 bp, Zea Mays
gctgccgtctgcacctaaagttttgcagtgaatttattgagtcactactgccagctacagagggacgacgacgagcattgggaccagagcgcgcggtaaaaaaaataaataaaagcgtgtactttagttgattttgggcctccattgctaggagactacgtactcgattcctttggcacctctccccttctccctctactcctctctaccagtgtacctatataaagatggcaatgggcatgccctctacagctgaaagagctaaactaccacacacacacacatcctacgcatcttctcgcagccatctttgtggaagcaaggcgggcaacatcgtgtggctagccagcaagagggagagaaacaagcacaagtatggcctcaaaacctggccctctgagtcgctggccatggcaagatcttggaaactacaaggaaacgcaattaattatggtggatgaacgaagaagaagaagaacaagaaatggctgcttcttgcactgcatgttaagttacgcgctggtggctccatgggcggtgcgcagcacgtacaggttcgtgaggagcgggagcggggagcgggacctgctcgccttcgccgtgctgccggtgctcctcctccgcctcctctacagccagctctggatcaccgtgtcccgccaccagacggcccggagcaggcacaggatcgtcaacaagagcctcgacttcgagcaggtcgacagggagaggaactgggacgaccagatcctgctgacggcgctgctcttctacgcggtgaacgcggcggtgccggtggcgcagtcggtgccgtggtgggactcgagggggctgctggtggcggcgctcctccacgtgggtcccgtggagttcctctactactggctccaccgcgcgctgcaccaccactacctctacgcccggtaccactcgcaccaccacgcctccatcgtcaccgagcccatcacatcggtgatccatccgttcgcggaggagctggtgtacttcaccctgttcgccatcccgctgctcaccatggtgggcaccggcaccgcctccgtggccgtggccaacggctacctcgcctacatcgacttcatgaactacctcggccactgcaacttcgagctcgtccccaggctgctcttcgacgtcttccctcccctcaagtacctcatgtacacgccatcgttccactcgctgcaccacacgcagttccgcagcaactactcgctcttcatgccgctctacgaccacctgtacggcacggcggacaagtcaagcgacgacctgtacgagcgcgcgctgcagggccgcgccggggaggacgcgcccgacgtcgtccacctcacgcacctcaccacgccggcctccctcctccgcctccgcctcggcttcgcgtccctcgccgccgcgccggcgccgcccgcgtcccgctacggcgccggcagcagcagcagcagcagcagcagcctggcggcggtggcgtgcccgctggccgcgctcctcggctggacccggaccgccttcaggtccgaggccaacaggctccacaagctcaagctcgagacgtgggtcgttccaagatacacctctcagtacctgtccaagcaaggcctgtacgcagtggggcgtgtggtggagaaggcggtggcggacgcggaggcgagtggcgcgagagtactcacgctgggtctactgaaccaggcaaacgagctgaacaaaaacggcgagctgtacgtcatcaggaagcccagcatgaggaccaagatcgtcgacgggacaagcctggccgccgccgccgtgctccacatgatccctgagggcaccgacgaggtgctcctcctgggagacgccggcggcaataagatggcgggcgtgctggcttcggcgctctgcgaacgcgagattcaggttcacgtggtcgacaaggacctgtacgagtccgtgaagcagcagctgcgcccagagacgcacgagcatctcctccacctcgctgagtggtggagtcacagcgccaagacgaccaaggtatggctcgtcggcgacaggctgacgggcgaggagcagaggagggcgcagggcggcgcccacttcgttccctactcgcagttccctcctggcgccgtcgtccgcgccgactgcgtctaccacagcaccccggcgctggtggtgccggacgccttcgaggacctccacgcatgcgagaactggctgccgcggagggtgatgagcgcgtggcgcgcggcgggcatcgtgcacgcgctcgaaggctgggacgcgcacgagtgcggcgccagggtcaccggcgtcgacaaggcctggcgcgccgcgctcgcccacggcttccgcccctacgaccgctatggcgccaactaatacgtgaagtgaccattacgaacgacgacgactacgaagcgtacctgtgcatggaatgatgagtagcatctatctatgaagacgaggaaaaaaacacttctttgtttatcgttcaagatgcaaaaagaaaaacaaagattcgtctttgacagttcacaccacggcccatactgctctttcacgtaaaccgggtgaattccgtgtacgtacggtacgtgtgtgtactaccctacaattaattactactagttgggccaggtccggcaaggcggcaacgatcacagagtcctcagcggcccatggtaaaacccaaaccgctggttccaaacaattcacggagcgggaaggacggggacggacacctggctcgcccgactggccccgaactgtctatcagtctctcgctcaaagtcaaaaccggcatctttgacccatcctccgtcccttccctttcgcgggaagacgtcgatatagtcgatcacagccattcgtgtgggagtggacgacgcagatggaccagtaccgcatgtctccaacccaactcgagacgctccgccgaaccagggtagtggtggtgagttgggtgtcgtgggcgattgtgttggaaatcatactctggtcagtaagtaagagtagtaattagatggttgtctgttgcggttcagctgtccaagagcagtgagtttgttgataggtggttgcatttatcctgacaggctgtttgtgagtagctcagaaacaagaaaaaaaagaatataacatgggctgaaaaggtgtccgtatgtgttattcttgtttacattctttgtttttaattggaactcgctgtgattt

SEQ ID NO: 40846 - DNA, 3135 bp, Zea Mays
gctgccgtctgcacctaaagttttgcagtgaatttattgagtcactactgccagctacagagggacgacgacgagcattgggaccagagcgcgcggtaaaaaaaataaataaaagcgtgtactttagttgattttgggcctccattgctaggagactacgtactcgattcctttggcacctctccccttctccctctactcctctctaccagtgtacctatataaagatggcaatgggcatgccctctacagctgaaagagctaaactaccacacacacacacatcctacgcatcttctcgcagccatctttgtggaagcaaggcgggcaacatcgtgtggctagccagcaagagggagagaaacaagcacaagtatggcctcaaaacctggccctctgagtcgctggccatggcaagatcttggaaactacaagtacgcgctggtggctccatgggcggtgcgcagcacgtacaggttcgtgaggagcgggagcggggagcgggacctgctcgccttcgccgtgctgccggtgctcctcctccgcctcctctacagccagctctggatcaccgtgtcccgccaccagacggcccggagcaggcacaggatcgtcaacaagagcctcgacttcgagcaggtcgacagggagaggaactgggacgaccagatcctgctgacggcgctgctcttctacgcggtgaacgcggcggtgccggtggcgcagtcggtgccgtggtgggactcgagggggctgctggtggcggcgctcctccacgtgggtcccgtggagttcctctactactggctccaccgcgcgctgcaccaccactacctctacgcccggtaccactcgcaccaccacgcctccatcgtcaccgagcccatcacatcggtgatccatccgttcgcggaggagctggtgtacttcaccctgttcgccatcccgctgctcaccatggtgggcaccggcaccgcctccgtggccgtggccaacggctacctcgcctacatcgacttcatgaactacctcggccactgcaacttcgagctcgtccccaggctgctcttcgacgtcttccctcccctcaagtacctcatgtacacgccatcgttccactcgctgcaccacacgcagttccgcagcaactactcgctcttcatgccgctctacgaccacctgtacggcacggcggacaagtcaagcgacgacctgtacgagcgcgcgctgcagggccgcgccggggaggacgcgcccgacgtcgtccacctcacgcacctcaccacgccggcctccctcctccgcctccgcctcggcttcgcgtccctcgccgccgcgccggcgccgcccgcgtcccgctacggcgccggcagcagcagcagcagcagcagcagcctggcggcggtggcgtgcccgctggccgcgctcctcggctggacccggaccgccttcaggtccgaggccaacaggctccacaagctcaagctcgagacgtgggtcgttccaagatacacctctcagtacctgtccaagcaaggcctgtacgcagtggggcgtgtggtggagaaggcggtggcggacgcggaggcgagtggcgcgagagtactcacgctgggtctactgaaccaggcaaacgagctgaacaaaaacggcgagctgtacgtcatcaggaagcccagcatgaggaccaagatcgtcgacgggacaagcctggccgccgccgccgtgctccacatgatccctgagggcaccgacgaggtgctcctcctgggagacgccggcggcaataagatggcgggcgtgctggcttcggcgctctgcgaacgcgagattcaggttcacgtggtcgacaaggacctgtacgagtccgtgaagcagcagctgcgcccagagacgcacgagcatctcctccacctcgctgagtggtggagtcacagcgccaagacgaccaaggtatggctcgtcggcgacaggctgacgggcgaggagcagaggagggcgcagggcggcgcccacttcgttccctactcgcagttccctcctggcgccgtcgtccgcgccgactgcgtctaccacagcaccccggcgctggtggtgccggacgccttcgaggacctccacgcatgcgagaactggctgccgcggagggtgatgagcgcgtggcgcgcggcgggcatcgtgcacgcgctcgaaggctgggacgcgcacgagtgcggcgccagggtcaccggcgtcgacaaggcctggcgcgccgcgctcgcccacggcttccgcccctacgaccgctatggcgccaactaatacgtgaagtgaccattacgaacgacgacgactacgaagcgtacctgtgcatggaatgatgagtagcatctatctatgaagacgaggaaaaaaacacttctttgtttatcgttcaagatgcaaaaagaaaaacaaagattcgtctttgacagttcacaccacggcccatactgctctttcacgtaaaccgggtgaattccgtgtacgtacggtacgtgtgtgtactaccctacaattaattactactagttgggccaggtccggcaaggcggcaacgatcacagagtcctcagcggcccatggtaaaacccaaaccgctggttccaaacaattcacggagcgggaaggacggggacggacacctggctcgcccgactggccccgaactgtctatcagtctctcgctcaaagtcaaaaccggcatctttgacccatcctccgtcccttccctttcgcgggaagacgtcgatatagtcgatcacagccattcgtgtgggagtggacgacgcagatggaccagtaccgcatgtctccaacccaactcgagacgctccgccgaaccagggtagtggtggtgagttgggtgtcgtgggcgattgtgttggaaatcatactctggtcagtaagtaagagtagtaattagatggttgtctgttgcggttcagctgtccaagagcagtgagtttgttgataggtggttgcatttatcctgacaggctgtttgtgagtagctcagaaacaagaaaaaaaagaatataacatgggctgaaaaggtgtccgtatgtgttattcttgtttacattctttgtttttaattggaactcgctgtgattt

SEQ ID NO: 40847 - DNA, 4138 bp, Zea Mays
caccatccatgtttggttacctttctacactgcctgtacctaatattgctattatcccctggctgggctaggtagctgccgttgtacgcagcacaggcgcactagccatctctctctccctctctgagcggcaaacggcaacggcaatcgacaaggcacgcttcctcttcctcttgctcctctctgtccatcaccatctccatgtccatctatataagccgcgcgcgcggcagccggcagagttgcttccgccaccactactcctgcctgtccctgtccccgactctctctctctccctctctcctgctagctacacccgctgctgtgctgacctcctccgatcctctgcccggcaacaggaatacagcaggggaggagagggggggcaaccggcggcggtcggtcgcggaggatggtgaagttctcgcgggagtacgaggccagcatcatccccgagtggaaggccgccttcgtcgactacaggtgcctcaagaagctcgtcaagaggatcaagatcgcccgccgcgacgccaccagggaagctgggggaggtagcagcagcgacgccaccagcagctacggcttctccgtcctcgaccccgtccgcgccctcgccgcccacttcgcctccgcaacgccgccggcggtctcaccagcgaacggcgacgaggaggaggaggacgacgacgcggagagcttggaaccggattcaggggagctcgtggtggtggccacggccaagcatgagcgagagtttttggagaaggcgggcgaggagctggagaaggtgaacaagttctacgcggcgcaggaggcggacatgctggcgcgcggcgccgcgctcgtcgagcagctccgcatcctggccgacgtcaagcgcatcctcgccaaccacgcggtggcgtcccggcgcagccggcccgccggagactcgccgccgcccccgccgtccgcggacgggcggtccaacagcggccgccacctcctctcctcctcctccccattcctgcaggcctcgccgcagtccatgttagatgggagcgcggagctgccgcaggcgcgcgtggcggaggaggtgatggcggcgctggagcgcaacggcgtgagcttcgtgggcagcgggctgggcagcaaggccaagaaggacggcggcgggaagcagctcacggggcgcgcggccgcgctgccggccacggtgcgcatcgacgtcccgcccaccagccccggccgggcggcgctcaaggtgtgggaggagctcgtcaacgtgctccgcaaggacggcgccgaccccgccgccgccttcgtccaccgcaagaaggtccagcacgccgagaagagcatccgcgacgccttcctcgccctctaccgcggcctcgacctcctcaacaagttcagctccctcaatgtgaaggctttcaccaaaatattgaagaaattcgtcaaggtgtcggagcagcagcggaagactgacctgttctcggagaaggtgaagaggtcgccgttcagcagctctgacaaggtgcttcagctggcagacgaggtggagtgcatcttctcgaggcacttcgcgggcaacgacaggaaggtggccatgaagtacctgaagccgcagcagcccaggaacacccacatgatcaccttcctcgtaggcctcttcacaggcacattcgtgtccctgttcatcatatactcggtcctagcccatgtcgccggcatcttctcttcgacaggaaacacagcctacatggagatcgtctaccacgtcttcagcatgtttgcactcatcagcctgcacgtcttcctgtacgggtgcaacctcctggcgtggaagagcagcaggattagccacaacttcatattcgacttctcccccagcaccgccctgacgcaccgcgacgccttcctcttgtcggcgtccatcatgtgcaccgtcgtcgcggcgctggtcgtcaacctcttcctcagcaacgccggggcgacctacgccaacgcgttgcccggcgcacttctgcttctgtcagcagcggctctcttctgcccattcaacgtcttctaccgctccacgcgctactgcttcatgcgcgtcatgcgcaacatcatgctgtcgccgttctacaaggttctgatggcggatttcttcatggctgaccagctaacaagccagatcgcactgctaagacacctcgagttcacggggtgctacttcatggctggaaccttcacgactcacgcgtatgggagctgcaccagcagctcccagtacaagaacctggcgtacgtgctttccttcctgccttactactggagagcaatgcagtgtctgagaaggtacctggaagaaggccatgacatcgaccagctcgccaacgcgggcaagtacatatcggcgatggtagcagctgctgtcaggttcaagtacgccgcggcaccgacgccgttctggatgtggatggtcatagtgtcgtccacaggcgccaccatctaccagctctactgggatttcgtcatggactggggcttcttagacctcagatctaagaaccgttggctccgagaccagctcatcctcaagaacaagccgatctactatgcttccatgatgctcaaccttgtgctgcgcctggcctgggccgagagcgtgatgaagctccgtctcggtatggtggagtctcgcctgctggatttctcactcgcttcactggaaatcatccggcgagggcactggaacttctacaggctggagaatgaacacttgaacaacgctggaaagttcagggcagtgaagaccgtcccgttaccattccgtgaacttgaaactgattgatcaagtcaaagataagaacttgccagcatgttcccaggaatttaaggaggggggcaagagttccaggaatggacacactgcccctgctagtgcttgcgcaaggattggtgttcaagtgggtaataaaacaaatcagagagcataactgcacaagagcaagacgctgcagatttttaaagatggaattagctcagacggtgccgtgtagttgaggcgccagggtcaggaaagatgatgtgcgtttactctttattggttgattgaggattgttgcatgctaatcgactaacaaatccttgacttcgtcgattcattaacctatgaatgtatctgggaactgatgactgaaaaatattgcatgaaaatacatggtggtcaaacagaatttgaaccatgtttccataaatagtgtttcaaccaagagatgagaaacagcatgaaaacatgcaaggcacaaaataagagagaagtacagaagactgaaaataatttataattgcaggggtaaaaactagataatattacagtgaaagcgcgagatggttgacacggcagatgacaccacatgtgaagcataaacaaagtgcatatattacatggcatgttgcacacaaaataaacaagaaatagctagctacagcctacaagtacctccaatgtgccgggcggtctcttgagacgagaagaacccttgatgatgagtagtcaaatgtaggacagtacagatcatcagggccaatagcttctctcgctgcaatggtgtttccacggtcaaagctgtaggttggctgcgtgtcttccttaaacgtgtcaaaggcgaacagccccataccacatgcagccaagacaaggtttgagtcgccccatacttgggttatcgcagagtgatggatatgagcgttgaattcgggtaactcataggtggcgacaagtttcccctttctcaacgagtattgctgaactcgtgatcttgaccctccttttatttgcagccttccttctgtgctaccaataaataccgagtccccacgtgaaaagattgagtttgctgtgccgccatgtcttgctattttaagcccaatgccagcaggtacacgaaaatcaaatacattgacactttcctgtgtgctgaaaacaccatcatttccttccacctcagatgaactaaccctgtcaaaaaaaccaagcaggtgtgttaaatgatttgaccagggcagatgtcacagaatatattttggtacatctctttcacacaatcagatatgtcatcaacagcatgacaagatatttgcttctgttgatactaaaaagaa

SEQ ID NO: 40848 - DNA, 3502 bp, Zea Mays
cgaacggcgacgaggaggaggaggacgacgacgcggagagcttggaaccggattcaggggagctcgtggtggtggccacggccaagcatgagcgagagtttttggagaaggcgggcgaggagctggagaaggtgaacaagttctacgcggcgcaggaggcggacatgctggcgcgcggcgccgcgctcgtcgagcagctccgcatcctggccgacgtcaagcgcatcctcgccaaccacgcggtggcgtcccggcgcagccggcccgccggagactcgccgccgcccccgccgtccgcggacgggcggtccaacagcggccgccacctcctctcctcctcctccccattcctgcaggcctcgccgcagtccatgttagatgggagcgcggagctgccgcaggcgcgcgtggcggaggaggtgatggcggcgctggagcgcaacggcgtgagcttcgtgggcagcgggctgggcagcaaggccaagaaggacggcggcgggaagcagctcacggggcgcgcggccgcgctgccggccacggtgcgcatcgacgtcccgcccaccagccccggccgggcggcgctcaaggtgtgggaggagctcgtcaacgtgctccgcaaggacggcgccgaccccgccgccgccttcgtccaccgcaagaaggtccagcacgccgagaagagcatccgcgacgccttcctcgccctctaccgcggcctcgacctcctcaacaagttcagctccctcaatgtgaaggctttcaccaaaatattgaagaaattcgtcaaggtgtcggagcagcagcggaagactgacctgttctcggagaaggtgaagaggtcgccgttcagcagctctgacaaggtgcttcagctggcagacgaggtggagtgcatcttctcgaggcacttcgcgggcaacgacaggaaggtggccatgaagtacctgaagccgcagcagcccaggaacacccacatgatcaccttcctcgtaggcctcttcacaggcacattcgtgtccctgttcatcatatactcggtcctagcccatgtcgccggcatcttctcttcgacaggaaacacagcctacatggagatcgtctaccacgtcttcagcatgtttgcactcatcagcctgcacgtcttcctgtacgggtgcaacctcctggcgtggaagagcagcaggattagccacaacttcatattcgacttctcccccagcaccgccctgacgcaccgcgacgccttcctcttgtcggcgtccatcatgtgcaccgtcgtcgcggcgctggtcgtcaacctcttcctcagcaacgccggggcgacctacgccaacgcgttgcccggcgcacttctgcttctgtcagcagcggctctcttctgcccattcaacgtcttctaccgctccacgcgctactgcttcatgcgcgtcatgcgcaacatcatgctgtcgccgttctacaaggatggatgccttgtgacgcaggttctgatggcggatttcttcatggctgaccagctaacaagccagatcgcactgctaagacacctcgagttcacggggtgctacttcatggctggaaccttcacgactcacgcgtatgggagctgcaccagcagctcccagtacaagaacctggcgtacgtgctttccttcctgccttactactggagagcaatgcagtgtctgagaaggtacctggaagaaggccatgacatcgaccagctcgccaacgcgggcaagtacatatcggcgatggtagcagctgctgtcaggttcaagtacgccgcggcaccgacgccgttctggatgtggatggtcatagtgtcgtccacaggcgccaccatctaccagctctactgggatttcgtcatggactggggcttcttagacctcagatctaagaaccgttggctccgagaccagctcatcctcaagaacaagccgatctactatgcttccatgatgctcaaccttgtgctgcgcctggcctgggccgagagcgtgatgaagctccgtctcggtatggtggagtctcgcctgctggatttctcactcgcttcactggaaatcatccggcgagggcactggaacttctacaggctggagaatgaacacttgaacaacgctggaaagttcagggcagtgaagaccgtcccgttaccattccgtgaacttgaaactgattgatcaagtcaaagataagaacttgccagcatgttcccaggaatttaaggaggggggcaagagttccaggaatggacacactgcccctgctagtgcttgcgcaaggattggtgttcaagtgggtaataaaacaaatcagagagcataactgcacaagagcaagacgctgcagatttttaaagatggaattagctcagacggtgccgtgtagttgaggcgccagggtcaggaaagatgatgtgcgtttactctttattggttgattgaggattgttgcatgctaatcgactaacaaatccttgacttcgtcgattcattaacctatgaatgtatctgggaactgatgactgaaaaatattgcatgaaaatacatggtggtcaaacagaatttgaaccatgtttccataaatagtgtttcaaccaagagatgagaaacagcatgaaaacatgcaaggcacaaaataagagagaagtacagaagactgaaaataatttataattgcaggggtaaaaactagataatattacagtgaaagcgcgagatggttgacacggcagatgacaccacatgtgaagcataaacaaagtgcatatattacatggcatgttgcacacaaaataaacaagaaatagctagctacagcctacaagtacctccaatgtgccgggcggtctcttgagacgagaagaacccttgatgatgagtagtcaaatgtaggacagtacagatcatcagggccaatagcttctctcgctgcaatggtgtttccacggtcaaagctgtaggttggctgcgtgtcttccttaaacgtgtcaaaggcgaacagccccataccacatgcagccaagacaaggtttgagtcgccccatacttgggttatcgcagagtgatggatatgagcgttgaattcgggtaactcataggtggcgacaagtttcccctttctcaacgagtattgctgaactcgtgatcttgaccctccttttatttgcagccttccttctgtgctaccaataaataccgagtccccacgtgaaaagattgagtttgctgtgccgccatgtcttgctattttaagcccaatgccagcaggtacacgaaaatcaaatacattgacactttcctgtgtgctgaaaacaccatcatttccttccacctcagatgaactaaccctgtcaaaaaaaccaagcaggtgtgttaaatgatttgaccagggcagatgtcacagaatatattttggtacatctctttcacacaatcagatatgtcatcaacagcatgacaagatatttgcttctgttgatactaaaaagaa

SEQ ID NO: 40849 - DNA, 3464 bp, Zea Mays
ggaggaggaggacgacgacgcggagagcttggaaccggattcaggggagctcgtggtggtggccacggccaagcatgagcgagagtttttggagaaggcgggcgaggagctggagaaggtgaacaagttctacgcggcgcaggaggcggacatgctggcgcgcggcgccgcgctcgtcgagcagctccgcatcctggccgacgtcaagcgcatcctcgccaaccacgcggtggcgtcccggcgcagccggcccgccggagactcgccgccgcccccgccgtccgcggacgggcggtccaacagcggccgccacctcctctcctcctcctccccattcctgcaggcctcgccgcagtccatgttagatgggagcgcggagctgccgcaggcgcgcgtggcggaggaggtgatggcggcgctggagcgcaacggcgtgagcttcgtgggcagcgggctgggcagcaaggccaagaaggacggcggcgggaagcagctcacggggcgcgcggccgcgctgccggccacggtgcgcatcgacgtcccgcccaccagccccggccgggcggcgctcaaggtgtgggaggagctcgtcaacgtgctccgcaaggacggcgccgaccccgccgccgccttcgtccaccgcaagaaggtccagcacgccgagaagagcatccgcgacgccttcctcgccctctaccgcggcctcgacctcctcaacaagttcagctccctcaatgtgaaggctttcaccaaaatattgaagaaattcgtcaaggtgtcggagcagcagcggaagactgacctgttctcggagaaggtgaagaggtcgccgttcagcagctctgacaaggtgcttcagctggcagacgaggtggagtgcatcttctcgaggcacttcgcgggcaacgacaggaaggtggccatgaagtacctgaagccgcagcagcccaggaacacccacatgatcaccttcctcgcctcttcacaggcacattcgtgtccctgttcatcatatactcggtcctagcccatgtcgccggcatcttctcttcgacaggaaacacagcctacatggagatcgtctaccacgtcttcagcatgtttgcactcatcagcctgcacgtcttcctgtacgggtgcaacctcctggcgtggaagagcagcaggattagccacaacttcatattcgacttctcccccagcaccgccctgacgcaccgcgacgccttcctcttgtcggcgtccatcatgtgcaccgtcgtcgcggcgctggtcgtcaacctcttcctcagcaacgccggggcgacctacgccaacgcgttgcccggcgcacttctgcttctgtcagcagcggctctcttctgcccattcaacgtcttctaccgctccacgcgctactgcttcatgcgcgtcatgcgcaacatcatgctgtcgccgttctacaaggttctgatggcggatttcttcatggctgaccagctaacaagccagatcgcactgctaagacacctcgagttcacggggtgctacttcatggctggaaccttcacgactcacgcgtatgggagctgcaccagcagctcccagtacaagaacctggcgtacgtgctttccttcctgccttactactggagagcaatgcagtgtctgagaaggtacctggaagaaggccatgacatcgaccagctcgccaacgcgggcaagtacatatcggcgatggtagcagctgctgtcaggttcaagtacgccgcggcaccgacgccgttctggatgtggatggtcatagtgtcgtccacaggcgccaccatctaccagctctactgggatttcgtcatggactggggcttcttagacctcagatctaagaaccgttggctccgagaccagctcatcctcaagaacaagccgatctactatgcttccatgatgctcaaccttgtgctgcgcctggcctgggccgagagcgtgatgaagctccgtctcggtatggtggagtctcgcctgctggatttctcactcgcttcactggaaatcatccggcgagggcactggaacttctacaggctggagaatgaacacttgaacaacgctggaaagttcagggcagtgaagaccgtcccgttaccattccgtgaacttgaaactgattgatcaagtcaaagataagaacttgccagcatgttcccaggaatttaaggaggggggcaagagttccaggaatggacacactgcccctgctagtgcttgcgcaaggattggtgttcaagtgggtaataaaacaaatcagagagcataactgcacaagagcaagacgctgcagatttttaaagatggaattagctcagacggtgccgtgtagttgaggcgccagggtcaggaaagatgatgtgcgtttactctttattggttgattgaggattgttgcatgctaatcgactaacaaatccttgacttcgtcgattcattaacctatgaatgtatctgggaactgatgactgaaaaatattgcatgaaaatacatggtggtcaaacagaatttgaaccatgtttccataaatagtgtttcaaccaagagatgagaaacagcatgaaaacatgcaaggcacaaaataagagagaagtacagaagactgaaaataatttataattgcaggggtaaaaactagataatattacagtgaaagcgcgagatggttgacacggcagatgacaccacatgtgaagcataaacaaagtgcatatattacatggcatgttgcacacaaaataaacaagaaatagctagctacagcctacaagtacctccaatgtgccgggcggtctcttgagacgagaagaacccttgatgatgagtagtcaaatgtaggacagtacagatcatcagggccaatagcttctctcgctgcaatggtgtttccacggtcaaagctgtaggttggctgcgtgtcttccttaaacgtgtcaaaggcgaacagccccataccacatgcagccaagacaaggtttgagtcgccccatacttgggttatcgcagagtgatggatatgagcgttgaattcgggtaactcataggtggcgacaagtttcccctttctcaacgagtattgctgaactcgtgatcttgaccctccttttatttgcagccttccttctgtgctaccaataaataccgagtccccacgtgaaaagattgagtttgctgtgccgccatgtcttgctattttaagcccaatgccagcaggtacacgaaaatcaaatacattgacactttcctgtgtgctgaaaacaccatcatttccttccacctcagatgaactaaccctgtcaaaaaaaccaagcaggtgtgttaaatgatttgaccagggcagatgtcacagaatatattttggtacatctctttcacacaatcagatatgtcatcaacagcatgacaagatatttgcttctgttgatactaaaaagaa

SEQ ID NO: 40850 - DNA, 2324 bp, Zea Mays
tatactttaaaatttggaggccatcgtcaccccactcgtgcgtgagcggtgagccgcggccgccccgcgaagagaggtgacgcggcgagcacacggccatagaggttactgctctcctgggctgtgaggctgtgaggctgtgaccaaacgctctacgctcccacttcccaccaactcccaaatcctccctgaaaataagaatacgagggtgagcgatcgagcggtcgagggggttgtgcttgtgcgtcagatcaaccgactggtggcgaggctgcgggaggagatggccggcgaagggaatggggatgaagggtggaggcggagcggcatcgaggtcagcgccctgcagttcggctacgacgggcagccgccgctcttcgcgcgcttcaacctctgcgtcgcacccggctcccgctgcctcctcgtcggcgccaacggatcaggcaagaccacactcttgaagattcttgcgggaaagcatatggttggaggaagagatgtggtccgtgtcctcaatggttccgcttttcatgatacacagctagtgtgcaatggtgacctttcgtacttgggtggttcttggagccgtactattggttcagctggggatgttccactgcaaggcgacttctctgctgagcacatgatttttggaggcgagagaagctggttgatctgctagacattgatctgcagtggcgcatgcataaagtttcagatgggcagcgccgcagggtgcaaatctgcatgggtcttcttcatccatacaaggtgcttttgctcgatgagatcacggttgatctggacgtggtgaccaggatggacctgcttggtttcttcaaggaagagtgcgagcagagggaagctaccatcgtgtacgccacccatatatttgacggactcgagacgtgggctaccgactttgcgtacatccaagaaggcgagctgagaaggtccgggagatactccgacatcgaggagctaaggagcgccaagaacttgctgtcggtagtcgagtcgtggctgaggtcagagaccaaacttccgaagaaggaacccccaccacgtcctgagacccaggccaggcgttcctcgccgttcgatgcttctcctttccgttcgtcacgccacatggcctactaccgttgatggtttcccaactcgtactacaccattgcctcttgttctgcgctatatatatatatttttgttgtcgctcatatcgtatagtagctgtggagtttaatatgtgtcctcttcacggcccttgtagacatcaatcaatatatagcaggcagcacagaaataaaagtttggttcggttggtcttgcgttgatgagcagttggtgacatgacttggtgcccagcacgttcttcttcatcgctcgtcacggcgctgctcgctgtttctgagaatcttatgccatagcctttagatattcagaaaacttttcccacgagaaagttgtgtcgacctttttaggctataaacttttcagctaaccctgtctggctggcggtcaactttggcaaccagcttgtaacctaacgtaattacactaccctaattgcttaggtaaatgatgcttctctttggctgtagtaactgtaatgcatgtgctagccagtgtgctatcctaaaccaaagggccccaccgcttggcagcttgcctgctttgctttgtttaccctttgctaacattatccgtaacgcgcttcacatgaccattaccgcgtacagtgggaaggaaacacgtcaacgtgcagggcttgtatctgtcggtatggccgtacttgccgtccacgcccgtctgctgcccccgtctgatgacgtacatgtgtctctctctctctctctctccgtctctctgtttgtgctatcatttgacttggtggcttcacgtgcccgtctcaccaacccgtgtgtccagtggtgaccggaatcacaaatcagtgcaagtactcgtgacgactggcgtggcctttttggcattccgtggcatggcagcggctcctctgtgtagtgtagcgtaggcaaagcggtgcgaagcatgcggaccggcgaagacgacgatcaggcggtggcaaaaggcggccagggccggatgcccgtcgcataccaagacgacgatggctgcgcggcctgcaggtcggatatgtggattccacggagagaaaaaagaaaagaaaagaaaaggtagacacgagtggtgggcgacacgtttcgatccaaaagcagacaagttaaggcgagggacgggtcgcgtttttttagtggggtagatttgtctttgcggagaatgaaaatgtgacacttttgtcg

SEQ ID NO: 40851 - DNA, 972 bp, Zea Mays
tggaggccatcgtcaccccactcgtgcgtgagcggtgagccgcggccgccccgcgaagagaggtgacgcggcgagcacacggccatagaggttactgctctcctgggctgtgaggctgtgaggctgtgaccaaacgctctacgctcccacttcccaccaactcccaaatcctccctgaaaataagaatacgagggtgagcgatcgagcggtcgagggggttgtgcttgtgcgtcagatcaaccgactggtggcgaggctgcgggaggagatggccggcgaagggaatggggatgaagggtggaggcggagcggcatcgaggtcagcgccctgcagttcggctacgacgggcagccgccgctcttcgcgcgcttcaacctctgcgtcgcacccggctcccgctgcctcctcgtcggcgccaacggatcaggcaagaccacactcttgaagattcttgcgggaaagcatatggttggaggaagagatgtggtccgtgtcctcaatggttccgcttttcatgatacacagctagtgtgcaatggtgacctttcgtacttgggtggttcttggagccgtactattggttcagctggggatgttccactgcaaggcgacttctctgctgagcacatgatttttggaggcgagagaagctggttgatctgctagacattgatctgcagtggcgcatgcataaagtttcagatgggcagcgccgcagggtgcaaatctgcatgggtcttcttcatccatacaaggataagaacagcccaggacactctaccgttagttatttttttttggtaatgtctgacaaagctgaactagtaatttatttatttattttggtatgctgaatactcatatgttacatgctgtgatcatttgctcactgctgagtgagcctgattagatagctgcgttgtccatgccagagaagaagaaaaaagtagctgttttgccttgattattc

SEQ ID NO: 40852 - DNA, 3250 bp, Zea Mays
cgcggccgccccgcgaagagaggtgacgcggcgagcacacggccatagaggttactgctctcctgggctgtgaggctgtgaggctgtgaccaaacgctctacgctcccacttcccaccaactcccaaatcctccctgaaaataagaatacgagggtgagcgatcgagcggtcgagggggttgtgcttgtgcgtcagatcaaccgactggtggcgaggctgcgggaggagatggccggcgaagggaatggggatgaagggtggaggcggagcggcatcgaggtcagcgccctgcagttcggctacgacgggcagccgccgctcttcgcgcgcttcaacctctgcgtcgcacccggctcccgctgcctcctcgtcggcgccaacggatcaggcaagaccacactcttgaagattcttgcgggaaagcatatggttggaggaagagatgtggtccgtgtcctcaatggttccgcttttcatgatacacagctagtgtgcaatggtgacctttcgtacttgggtggttcttggagccgtactattggttcagctggggatgttccactgcaaggcgacttctctgctgagcacatgatttttggaggtattctatcactctaatgcttatgattttggcatatcccatacttgggggttcttattgacagaagatatcatgaatctaacacaatgtttccaagtcgagtcgagttgtgcagctactggctggtacactagttgtgactaggacagactagtcgtgactagtcgaatataagtcgatgaatatagttttatcatctgattgtcccacctattatcaacaatagaaattacttcatccattaatcactctttatgttccgaagcttccttgatgctcttttttgcatggtccatggcagcccacatttcagccattgctggtctctaccatttcagcctaacaagatctctaccatttgtcttggtcctcatcaagtcttaaattcttccatgtccatagataaatctagttatcttctttgctttagcaatgcagccactaaactcttttatcttcccaataacctacatcatgagatccttgtggatagcacacggtgtccaaaataaggtaggaaacttgtccattagcatcctacctactagggttgagatggttgtgtgggctcacatttttatacctaggcccaaataagtcacccgactcaaatgctatgactagtcgatgagtcgaacgactagctgagaaagtcgagtcaccgtcgagtcgctctggtcgactatcacctctacaccgacttctcgactagtcgctcgactttaaaacctaacatactcctatatttgtcctttaacaatcagctctttagagattactttttccctggtcgcattagtttttgcttaaacaaatcctgctttcacatttgcggtttagtttttcctagtttaatcatgcctttagttagaagattggcactaaggccatcatttctgctggtagaaaacctactggcttatcacttgtttcgttctgtaccctgaaatatgagcagttgatggggttgatcctgtcaggcgagagaagctggttgatctgctagacattgatctgcagtggcgcatgcataaagtttcagatgggcagcgccgcagggtgcaaatctgcatgggtcttcttcatccatacaaggtgcttttgctcgatgagatcacggttgatctggacgtggtgaccaggatggacctgcttggtttcttcaaggaagagtgcgagcagagggaagctaccatcgtgtacgccacccatatatttgacggactcgagacgtgggctaccgactttgcgtacatccaagaaggcgagctgagaaggtccgggagatactccgacatcgaggagctaaggagcgccaagaacttgctgtcggtagtcgagtcgtggctgaggtcagagaccaaacttccgaagaaggaacccccaccacgtcctgagacccaggccaggcgttcctcgccgttcgatgcttctcctttccgttcgtcacgccacatggcctactaccgttgatggtttcccaactcgtactacaccattgcctcttgttctgcgctatatatatatatttttgttgtcgctcatatcgtatagtagctgtggagtttaatatgtgtcctcttcacggcccttgtagacatcaatcaatatatagcaggcagcacagaaataaaagtttggttcggttggtcttgcgttgatgagcagttggtgacatgacttggtgcccagcacgttcttcttcatcgctcgtcacggcgctgctcgctgtttctgagaatcttatgccatagcctttagatattcagaaaacttttcccacgagaaagttgtgtcgacctttttaggctataaacttttcagctaaccctgtctggctggcggtcaactttggcaaccagcttgtaacctaacgtaattacactaccctaattgcttaggtaaatgatgcttctctttggctgtagtaactgtaatgcatgtgctagccagtgtgctatcctaaaccaaagggccccaccgcttggcagcttgcctgctttgctttgtttaccctttgctaacattatccgtaacgcgcttcacatgaccattaccgcgtacagtgggaaggaaacacgtcaacgtgcagggcttgtatctgtcggtatggccgtacttgccgtccacgcccgtctgctgcccccgtctgatgacgtacatgtgtctctctctctctctctctccgtctctctgtttgtgctatcatttgacttggtggcttcacgtgcccgtctcaccaacccgtgtgtccagtggtgaccggaatcacaaatcagtgcaagtactcgtgacgactggcgtggcctttttggcattccgtggcatggcagcggctcctctgtgtagtgtagcgtaggcaaagcggtgcgaagcatgcggaccggcgaagacgacgatcaggcggtggcaaaaggcggccagggccggatgcccgtcgcataccaagacgacgatggctgcgcggcctgcaggtcggatatgtggattccacggagagaaaaaagaaaagaaaagaaaaggtagacacgagtggtgggcgacacgtttcgatccaaaagcagacaagttaaggcgagggacgggtcgcgtttttttagtggggtagatttgtctttgcggagaatgaaaatgtgacacttttgtcg

SEQ ID NO: 40853 - DNA, 1573 bp, Zea Mays
atgggacatctttggtgagggtgcttttgctcgatgagatcacggttgatctggacgtggtgaccaggatggacctgcttggtttcttcaaggaagagtgcgagcagagggaagctaccatcgtgtacgccacccatatatttgacggactcgagacgtgggctaccgactttgcgtacatccaagaaggcgagctgagaaggtccgggagatactccgacatcgaggagctaaggagcgccaagaacttgctgtcggtagtcgagtcgtggctgaggtcagagaccaaacttccgaagaaggaacccccaccacgtcctgagacccaggccaggcgttcctcgccgttcgatgcttctcctttccgttcgtcacgccacatggcctactaccgttgatggtttcccaactcgtactacaccattgcctcttgttctgcgctatatatatatatttttgttgtcgctcatatcgtatagtagctgtggagtttaatatgtgtcctcttcacggcccttgtagacatcaatcaatatatagcaggcagcacagaaataaaagtttggttcggttggtcttgcgttgatgagcagttggtgacatgacttggtgcccagcacgttcttcttcatcgctcgtcacggcgctgctcgctgtttctgagaatcttatgccatagcctttagatattcagaaaacttttcccacgagaaagttgtgtcgacctttttaggctataaacttttcagctaaccctgtctggctggcggtcaactttggcaaccagcttgtaacctaacgtaattacactaccctaattgcttaggtaaatgatgcttctctttggctgtagtaactgtaatgcatgtgctagccagtgtgctatcctaaaccaaagggccccaccgcttggcagcttgcctgctttgctttgtttaccctttgctaacattatccgtaacgcgcttcacatgaccattaccgcgtacagtgggaaggaaacacgtcaacgtgcagggcttgtatctgtcggtatggccgtacttgccgtccacgcccgtctgctgcccccgtctgatgacgtacatgtgtctctctctctctctctctccgtctctctgtttgtgctatcatttgacttggtggcttcacgtgcccgtctcaccaacccgtgtgtccagtggtgaccggaatcacaaatcagtgcaagtactcgtgacgactggcgtggcctttttggcattccgtggcatggcagcggctcctctgtgtagtgtagcgtaggcaaagcggtgcgaagcatgcggaccggcgaagacgacgatcaggcggtggcaaaaggcggccagggccggatgcccgtcgcataccaagacgacgatggctgcgcggcctgcaggtcggatatgtggattccacggagagaaaaaagaaaagaaaagaaaaggtagacacgagtggtgggcgacacgtttcgatccaaaagcagacaagttaaggcgagggacgggtcgcgtttttttagtggggtagatttgtctttgcggagaatgaaaatgtgacacttttgtcg

SEQ ID NO: 40854 - DNA, 2344 bp, Zea Mays
ggcttctcggataattgttcgcttaaccatacgagcaagagcaacagagcaaagcaagcgaaaggcggccacaggcgcagcgtagttgtccctgtccgtcgcttgcgccaacctgctgcccaccgttaatcagttttctttaaccccagctgctgcccgtttactaatcaaatcatcgtccccctccggcccctcctttcccttccgcgcctccctcgtcttcttctcgtctccactccccctctcccaagtcccacccgccgctcccgcccccgtgcgctcgccgacacggtcagtagttccactcggagaaaggaacgcttccccctgcctgtctcgccggatccgttgccccgctgcagtttcgcccgccgctttcactttcgctttcactcgatttagattccatttccgttcgttcgttcctgtttcccttgctcgttcgttcgattggagctagccgccgcctggatctggcctagccgagccccggctgctctgaatcccgattcggttcggctcccttgctctgcggtcgcttccgaggcgtgctcggatctcgtcggagtagagggcctcgcggctcgcttcgggggcgagatggatcatgtggtcgggggcaagttcaagctcggcaagaagatcgggagtggatcgttcggggagctcttcctcgccgtgaatgtgcagaccggggaggaggtcgccgtcaagctggaaaatgtcaagacaaagcacccgcagcttcattacgagtccaagctatacatgcttctccaaggaggaactggcattccgcacctcaagtggttcggcgtcgagggggactacaatgtgatggtgatcgaccttctcggccctagccttgaggacttgttcaactactgcagcagaaagttctctctgaagactgtgctcatgctcgctgaccaaatggtatatataatagactatggactagcgaaaaaatatagggaccttcaaactcataagcacatcccgtacagagagaacaagaacctcactggaactgcacgatatgcaagtgtcaacacccaccttggtgttgagcaaagcaggcgagatgatttagaatccctcggttatgttcttatgtacttccttaggggcagcctaccatggcaggggctgaaggcaggaaccaagaagcagaaatatgacaagatcagcgagaaaaagatgctcactcctgtggaggtactctgcaaatcgtacccatcagagttcatctcctacttccactactgccgttcgttgcggtttgaagacaagcctgactattcttacctgaagagactattccgcgatctctttatccgggaaggataccagttcgactacgtgtttgactggaccattctaaagtatcctcaaataggctccaacccacggaccagggccggtgaaagaactagtggcgctgctggaccctcaatggataggattgagaagaccccaggagaagcgtccggtagaaggaaccctagtggtcctgtgaatcagagcgacagttacgcgcaacggccacgcgagaccgtatccatgtcgctaaaggagattatgcatagcactgaccggtctggggaaaggactgtggagagaccacgcacgtcctcacgcacaggcagcgcatcccgcagagccgttgcgtcaagcagcaggccagcaacctcgtccatggaaccaagcgagcagcagtatagccgggcgagcagactgttctctagcaacagtggcagccggccatccagcgcccagagagtcaaccctgcgccgggcgagtctagggccacctccctttcgcgggcagcggtcgcgagaggctcccgcgacgagccactccaccgcagcctggagctcctttcccttggcagcggcaagaggaaatagcgggaaggaagccgatctgatagcggaagggaaaagaatgcctgttggcgactctgtaaatgacggggcatgtcacctgttcttcgccagcagttcttcccctggggcatcccgtaatttcatggtgcccgccccggccttttaccatggctccgtagatagcaataattcgttgttgaatgtgcgtgctgtgttgcagtcgcgttagggccaagtcctagcctttgtggtgattagatttagggggtggtcaagattcacatatttatgtttcttaaccctctcctggacttggcgactcttttttttaccccctcccgagacaagtgcccgtgcgtttcttgttgaactctgaatttgcttattcaacagaagttgataatgataataaaagaagaggcatcctgtgtaaatcgatgcctcattttcttac

SEQ ID NO: 40855 - DNA, 1699 bp, Zea Mays
ggcttctcggataattgttcgcttaaccatacgagcaagagcaacagagcaaagcaagcgaaaggcggccacaggcgcagcgtagttgtccctgtccgtcgcttgcgccaacctgctgcccaccgttaatcagttttctttaaccccagctgctgcccgtttactaatcaaatcatcgtccccctccggcccctcctttcccttccgcgcctccctcgtcttcttctcgtctccactccccctctcccaagtcccacccgccgctcccgcccccgtgcgctcgccgacacggtatatataatagactatggactagcgaaaaaatatagggaccttcaaactcataagcacatcccgtacagagagaacaagaacctcactggaactgcacgatatgcaagtgtcaacacccaccttggtgttgagcaaagcaggcgagatgatttagaatccctcggttatgttcttatgtacttccttaggggcagcctaccatggcaggggctgaaggcaggaaccaagaagcagaaatatgacaagatcagcgagaaaaagatgctcactcctgtggaggtactctgcaaatcgtacccatcagagttcatctcctacttccactactgccgttcgttgcggtttgaagacaagcctgactattcttacctgaagagactattccgcgatctctttatccgggaaggataccagttcgactacgtgtttgactggaccattctaaagtatcctcaaataggctccaacccacggaccagggccggtgaaagaactagtggcgctgctggaccctcaatggataggattgagaagaccccaggagaagcgtccggtagaaggaaccctagtggtcctgtgaatcagagcgacagttacgcgcaacggccacgcgagaccgtatccatgtcgctaaaggagattatgcatagcactgaccggtctggggaaaggactgtggagagaccacgcacgtcctcacgcacaggcagcgcatcccgcagagccgttgcgtcaagcagcaggccagcaacctcgtccatggaaccaagcgagcagcagtatagccgggcgagcagactgttctctagcaacagtggcagccggccatccagcgcccagagagtcaaccctgcgccgggcgagtctagggccacctccctttcgcgggcagcggtcgcgagaggctcccgcgacgagccactccaccgcagcctggagctcctttcccttggcagcggcaagaggaaatagcgggaaggaagccgatctgatagcggaagggaaaagaatgcctgttggcgactctgtaaatgacggggcatgtcacctgttcttcgccagcagttcttcccctggggcatcccgtaatttcatggtgcccgccccggccttttaccatggctccgtagatagcaataattcgttgttgaatgtgcgtgctgtgttgcagtcgcgttagggccaagtcctagcctttgtggtgattagatttagggggtggtcaagattcacatatttatgtttcttaaccctctcctggacttggcgactcttttttttaccccctcccgagacaagtgcccgtgcgtttcttgttgaactctgaatttgcttattcaacagaagttgataatgataataaaagaagaggcatcctgtgtaaatcgatgcctcattttcttac

SEQ ID NO: 40856 - DNA, 2430 bp, Zea Mays
ggcttctcggataattgttcgcttaaccatacgagcaagagcaacagagcaaagcaagcgaaaggcggccacaggcgcagcgtagttgtccctgtccgtcgcttgcgccaacctgctgcccaccgttaatcagttttctttaaccccagctgctgcccgtttactaatcaaatcatcgtccccctccggcccctcctttcccttccgcgcctccctcgtcttcttctcgtctccactccccctctcccaagtcccacccgccgctcccgcccccgtgcgctcgccgacacggtcagtagttccactcggagaaaggaacgcttccccctgcctgtctcgccggatccgttgccccgctgcagtttcgcccgccgctttcactttcgctttcactcgatttagattccatttccgttcgttcgttcctgtttcccttgctcgttcgttcgattggagctagccgccgcctggatctggcctagccgagccccggctgctctgaatcccgattcggttcggctcccttgctctgcggtcgcttccgaggcgtgctcggatctcgtcggagtagagggcctcgcggctcgcttcgggggcgagatggatcatgtggtcgggggcaagttcaagctcggcaagaagatcgggagtggatcgttcggggagctcttcctcgccgtgaatgtgcagaccggggaggaggtcgccgtcaagctggaaaatgtcaagacaaagcacccgcagcttcattacgagtccaagctatacatgcttctccaaggaggaactggcattccgcacctcaagtggttcggcgtcgagggggactacaatgtgatggtgatcgaccttctcggccctagccttgaggacttgttcaactactgcagcagaaagttctctctgaagactgtgctcatgctcgctgaccaaatgattaaccgggttgagtacatgcatcaaaaggggtttcttcaccgtgatataaagcctgataatttcctcatggggcttggtaggaaagccaatcaggtatatataatagactatggactagcgaaaaaatatagggaccttcaaactcataagcacatcccgtacagagagaacaagaacctcactggaactgcacgatatgcaagtgtcaacacccaccttggtgttggcgagatgatttagaatccctcggttatgttcttatgtacttccttaggggcagcctaccatggcaggggctgaaggcaggaaccaagaagcagaaatatgacaagatcagcgagaaaaagatgctcactcctgtggaggtactctgcaaatcgtacccatcagagttcatctcctacttccactactgccgttcgttgcggtttgaagacaagcctgactattcttacctgaagagactattccgcgatctctttatccgggaaggataccagttcgactacgtgtttgactggaccattctaaagtatcctcaaataggctccaacccacggaccagggccggtgaaagaactagtggcgctgctggaccctcaatggataggattgagaagaccccaggagaagcgtccggtagaaggaaccctagtggtcctgtgaatcagagcgacagttacgcgcaacggccacgcgagaccgtatccatgtcgctaaaggagattatgcatagcactgaccggtctggggaaaggactgtggagagaccacgcacgtcctcacgcacaggcagcgcatcccgcagagccgttgcgtcaagcagcaggccagcaacctcgtccatggaaccaagcgagcagcagtatagccgggcgagcagactgttctctagcaacagtggcagccggccatccagcgcccagagagtcaaccctgcgccgggcgagtctagggccacctccctttcgcgggcagcggtcgcgagaggctcccgcgacgagccactccaccgcagcctggagctcctttcccttggcagcggcaagaggaaatagcgggaaggaagccgatctgatagcggaagggaaaagaatgcctgttggcgactctgtaaatgacggggcatgtcacctgttcttcgccagcagttcttcccctggggcatcccgtaatttcatggtgcccgccccggccttttaccatggctccgtagatagcaataattcgttgttgaatgtgcgtgctgtgttgcagtcgcgttagggccaagtcctagcctttgtggtgattagatttagggggtggtcaagattcacatatttatgtttcttaaccctctcctggacttggcgactcttttttttaccccctcccgagacaagtgcccgtgcgtttcttgttgaactctgaatttgcttattcaacagaagttgataatgataataaaagaagaggcatcctgtgtaaatcgatgcctcattttcttac

SEQ ID NO: 40857 - DNA, 912 bp, Zea Mays
cagagtcagagatcggaccacctggatggctggaccggcctgctctgctcctgagcaacatcgtcaaggcggaggcggacctctggactctggaggcaagcgggagctagccatcaaaactcactgtactacactaactacaaaatacctctactacagtgcctcggtgcttcttttgcccataaggtgttcggtgaaatgcttgtgacagtttagcttgctcctttgggcccgctttcttcgatgcgtccgaccctcaacaaatataatatccctcttttcctaagcaaataggccagttgtgtgtgtgtgtgtgtgtctgtgtttttgttctctcaacaagcatggctagtttgcttttgtcacatggaatgaagtatatcaagaacgtgcctccttttggagactactacttgatcatcacatgaggtctcacgtagatgcatgatgtggtgaaaggcccaacaccaactgtgacgacgactttgcaactgttgatgatgactatggctaccctgaaggcgatggctgcattggaggcgtgatgacgatggcagcatacaccaaagagatgaacactctaatgacctcgacggtgcatgcatgaccatacaggccgatctacatattctatgccttaggatataatgggagtggcagagaagaaagactaaagccaccaattccatgttaactgcagggatggcatctaacttattttgggcccctttgatgacaggagactagccttttgctaaaatgtactggtacaatatagccccctgtggcatggtatatgtataggttgccaatatatatgaagaatggtgttgtaatgaacctatggatgctagactatatgatatactagctaggtcaatttgagcgtggctgttatcctctatatatgtt

SEQ ID NO: 40858 - DNA, 845 bp, Zea Mays
ctctgctcctgagcaacatcgtcaaggcggaggcggacctctggactctggaggcaagcgggagctagccatcaaaactcactctactacagtgcctcggtgcttcttttgcccataaggtgttcggtgaaatgcttgtgacagtttagcttgctcctttgggcccgctttcttcgatgcgtccgaccctcaacaaatataatatccctcttttcctaagcaaataggccagttgtgtgtgtgtgtgtgtgtctgtgtttttgttctctcaacaagcatggctagtttgcttttgtcacatggaatgaagtatatcaagaacgtgcctccttttggagactactacttgatcatcacatgaggtctcacgtagatgcatgatgtggtgaaaggcccaacaccaactgtgacgacgactttgcaactgttgatgatgactatggctaccctgaaggcgatggctgcattggaggcgtgatgacgatggcagcatacaccaaagagatgaacactctaatgacctcgacggtgcatgcatgaccatacaggccgatctacatattctatgccttaggatataatgggagtggcagagaagaaagactaaagccaccaattccatgttaactgcagggatggcatctaacttattttgggcccctttgatgacaggagactagccttttgctaaaatgtactggtacaatatagccccctgtggcatggtatatgtataggttgccaatatatatgaagaatggtgttgtaatgaacctatggatgctagactatatgatatactagctaggtcaatttgagcgtggctgttatcctctatatatgtt

SEQ ID NO: 40859 - DNA, 4307 bp, Zea Mays
ctcaagctcaatcgaaccagaagggtctccagaggataatccgttcccaatgatgggaacagagtgcatcatggccacactcggcggggatcctgaaccctcaattccacctggattcggaccttttgttgccctcgcgctacagggcatccaaaacaatgccaaatcagctgatgctcattctagttctgctcaagcagcacactgcatggagaaagatgttgaagttctggaacacggttcggcgcatggttggagtgacactcctgctagtacttcagggacccatagttgcaggaggtcacttcgtaacaggcctccaatagactatagccagttcgaccttatctcggacgaagaatctgatgttgaatcagcagaaaagggagtgggattagtgagacgcagacgacaattaccgaaaggagtacttcggggatgcgcacaatgtgctgattgtcaaaaggttgttgcaaggtggaatccatctggtgcaaggaggcctgttcttgaggaagctcctgttttctatccatccgaagaggaattcaaggacaccttaaaatacattgagagtatacggtctacagcagaaccatatggaatttgtcgtattgtcccgccgccttcatggaaacctccatgccttcttaaagagaagaacatatgggaatgctcaaaattttgtactcgggtacagaaggttgacaagctccaaaaccgtaaatcatccaagaagggcagaagaggtgggatgatgaagaagcggaggaagcttttagagctggaagataacaataatattaatcacaatcaaactggggtgcagcaaaaccaagagaggtttggatttgaacctggacctgagttcacacttcagacatttaagaagtatgcagatgatttccgtgaacaatattttaagaaagaagtgtccgcggactcaccaccatcagtagaagacattgaaggcgagtattggcgtatagtcgaaaagcctactgaagagatagaggtagtatatggtgctgatttggagactggaacttttggtagcggcttcccaaagtcttctcccgaagtaaaatctgatgttgagcataagtacttagagtctggttggaacctaaacaacttgcctagactacaaggttcagtactatcttttgaaggtggggacatctctggtgttttggtcccttggctgtatgttggaatgtgcttttcatcattctgctggcatgttgaagaccatcatttgtactcactgaactacatgcattggggtgctccaaagatgtggtatggagttccaggaaaggatgccgtaaatttggaggcagcaatgaggaaacatctacctgacttgtttgaggaacaacctgatttgcttcacaacctggttactcaattttcaacttcattgcttaaatctgaaggagtaccagtctaccgatgtgtgcagcatgagggagagtttgtcctaacattccctcgggcataccatgctggtttcaactgtggcttcaattgtgcagaagctgttaatgtggcaccaattgattggttaccaattggacaggatgcagtcgagctttatcgtaagcaagctcggaaaattactgtttcccatgataagctgttgctaggggctgcaagagaagcaataagagctcattgggatattctgttccttaagaaaaatactgctgataacttgaggtggaaaagcatgtgtggacttgacagtactatatgcaaatcgcttaaggcaagaatcgatttggagttggcgcaaagacaaaatatatgctctccatctcaatctagaaaaatggatgctgaatttgattcaactgatagagagtgtgcattgtgctattatgatctgcatctttctgcttctggctgtccatgttgcccagggaaatatacctgccttgtacatgcaaagcagctttgctcatgtgactgggacaaaagatttttccttttccgttatgatatcaatgagttaaatatgttggctgacgctttaggtgggaagttaagtgcaattcacagatggggtgtctctcatcttggattaagtttgagatcatgtgtcaaaagagaaaaagaccaagattcgaagactcctcgcagagtaactgatggccccagaaggtcctacatgtctcaggcgtcaacagtatcattggcaccttcgttggtttgcaatgaacagaacaacaatggtaataagatgctggaaaaagctagtttggaaacagatacttgtccttttgcagagcaaataaaatctggaactatttcactacaggaggcacacatgaagactgaggtatcctgtacactaaacaacagtgtcagtcctgaaggccacaaaagctcactaagcttgccagttccttctggccagtcactttcttccaatcttgccacaaggtctttaagtactgcaggagaatctgtgaaaaatgcatatgacttggtagtatttaaagggagtagagaatcttctcgggctggagactgtatatcttcgcttggtgtgcatcataacataccgccaataatgattgatcaaggaagcaacatgaatcctagtatggagagctcaaacaattcacataggttgatggcatctaacactaatgcaactaagttttactcttacaaggaccaaatgcatgtaacaccagaaagtcaagcttctgctgcatcaagtcagccctttgcgggaactgttttaagagcacaaagtgtatctcaggaagcttcacctagcgtctttacttcaaagcctctcatagattcttcacttttgaaaaatacttatgttggtttaagttcaggcggtgcccatattggacatccaaattttggtaaccagcaaccaagtgacgaatgccttcaaagaaaatctgaatctctatctggttcagaagcaaagggccattcagctgcattggtgcaacctgctctaggaaatcatcataatgggagtggaggtgcacacaagggccttcggatggctaacgttgtacatcgattcaagagcttagttgaatctttggaaattggtgttgtgctatctgggaggttgtggtcctcaagccaagcaatcttcccaaaagggttcaggagcagagtaaaatatttcagcatcgtggatccaacacaaatggcatactacatatctgaaatattagacgctggaccacagggacctctgtttatggtgactctggaaaactgtccaggcgaactttttatcaacgtctctcctgccaagtgctggagcatggtccgtgagaggctgaatatggaaatacggaggcaactcagtacgggaagagctaatcttcctgcactacagccaccgggatcagttgatggttttgaaatgttccggttgctgtcaccggcaattgttcaggcaatcgaggcacgggatagagatcgcatctgcacagagtactggagatccaggcctcatgttgtcactgaagatcgtgcgacggcgccacctcaggctcagggtcctctgcatgcgctgaggggtctattccagcgagccaaccgcaatgagctgctagccctacggagtctactggtgagcaacatcagcccggacgacttctccaggcggcaggctacccaaatcctcgacgaggagatcgccaagcagtggcgctgacaggcgtaaatacaactctgtaatctcttgatggcatgacgggaccaagcagttttcgaccttgacgaaagagcggctccttccgttgcccccgtgcccattctttgtattgttgtgtccatgctccatgccataagatcttgtccccatttggatgcgatcgaatgaccgacgacggctcatcaactgaccagcgtacataccgtctgcctggaaactcttgtggtgttgtaggtttagttatttttcttttaaacgaaatattttaccttcttttttagtgaggctgaaacgcaggctcatgagacgtgagtttttacatgaaaggttgtgtacatcagaaatgtgcggggcctgttgacactactagcagataggcgtgatttatgtgccgagttggtcagagtcgaacagtccatgagcttcaggtactcatcctgcatggttgactgggagttggtacttgcaagctgctgttacagaatacagaccagtagtccaatgaaccccaactgactggtcgctgccatgtgggccaacttttcactctgaccagtctgaatattctgcaaatacggatgatgaaatatctattttgtaaaat

SEQ ID NO: 40860 - DNA, 4376 bp, Zea Mays
ttctgctcggtgccccctctcctctacagctctactctcccctcccgcggaggcgtggacggcatggagttgggggagcccggggcccgtggatgccgtggtcccgtgcgattactcaatgatgggaacagagtgcatcatggccacactcggcggggatcctgaaccctcaattccacctggattcggaccttttgttgccctcgcgctacagggcatccaaaacaatgccaaatcagctgatgctcattctagttctgctcaagcagcacactgcatggagaaagatgttgaagttctggaacacggttcggcgcatggttggagtgacactcctgctagtacttcagggacccatagttgcaggaggtcacttcgtaacaggcctccaatagactatagccagttcgaccttatctcggacgaagaatctgatgttgaatcagcagaaaagggagtgggattagtgagacgcagacgacaattaccgaaaggagtacttcggggatgcgcacaatgtgctgattgtcaaaaggttgttgcaaggtggaatccatctggtgcaaggaggcctgttcttgaggaagctcctgttttctatccatccgaagaggaattcaaggacaccttaaaatacattgagagtatacggtctacagcagaaccatatggaatttgtcgtattgtcccgccgccttcatggaaacctccatgccttcttaaagagaagaacatatgggaatgctcaaaattttgtactcgggtacagaaggttgacaagctccaaaaccgtaaatcatccaagaagggcagaagaggtgggatgatgaagaagcggaggaagcttttagagctggaagataacaataatattaatcacaatcaaactggggtgcagcaaaaccaagagaggtttggatttgaacctggacctgagttcacacttcagacatttaagaagtatgcagatgatttccgtgaacaatattttaagaaagaagtgtccgcggactcaccaccatcagtagaagacattgaaggcgagtattggcgtatagtcgaaaagcctactgaagagatagaggtagtatatggtgctgatttggagactggaacttttggtagcggcttcccaaagtcttctcccgaagtaaaatctgatgttgagcataagtacttagagtctggttggaacctaaacaacttgcctagactacaaggttcagtactatcttttgaaggtggggacatctctggtgttttggtcccttggctgtatgttggaatgtgcttttcatcattctgctggcatgttgaagaccatcatttgtactcactgaactacatgcattggggtgctccaaagatgtggtatggagttccaggaaaggatgccgtaaatttggaggcagcaatgaggaaacatctacctgacttgtttgaggaacaacctgatttgcttcacaacctggttactcaattttcaacttcattgcttaaatctgaaggagtaccagtctaccgatgtgtgcagcatgagggagagtttgtcctaacattccctcgggcataccatgctggtttcaactgtggcttcaattgtgcagaagctgttaatgtggcaccaattgattggttaccaattggacaggatgcagtcgagctttatcgtaagcaagctcggaaaattactgtttcccatgataagctgttgctaggggctgcaagagaagcaataagagctcattgggatattctgttccttaagaaaaatactgctgataacttgaggtggaaaagcatgtgtggacttgacagtactatatgcaaatcgcttaaggcaagaatcgatttggagttggcgcaaagacaaaatatatgctctccatctcaatctagaaaaatggatgctgaatttgattcaactgatagagagtgtgcattgtgctattatgatctgcatctttctgcttctggctgtccatgttgcccagggaaatatacctgccttgtacatgcaaagcagctttgctcatgtgactgggacaaaagatttttccttttccgttatgatatcaatgagttaaatatgttggctgacgctttaggtgggaagttaagtgcaattcacagatggggtgtctctcatcttggattaagtttgagatcatgtgtcaaaagagaaaaagaccaagattcgaagactcctcgcagagtaactgatggccccagaaggtcctacatgtctcaggcgtcaacagtatcattggcaccttcgttggtttgcaatgaacagaacaacaatggtaataagatgctggaaaaagctagtttggaaacagatacttgtccttttgcagagcaaataaaatctggaactatttcactacaggaggcacacatgaagactgaggtatcctgtacactaaacaacagtgtcagtcctgaaggccacaaaagctcactaagcttgccagttccttctggccagtcactttcttccaatcttgccacaaggtctttaagtactgcaggagaatctgtgaaaaatgcatatgacttggtagtatttaaagggagtagagaatcttctcgggctggagactgtatatcttcgcttggtgtgcatcataacataccgccaataatgattgatcaaggaagcaacatgaatcctagtatggagagctcaaacaattcacataggttgatggcatctaacactaatgcaactaagttttactcttacaaggaccaaatgcatgtaacaccagaaagtcaagcttctgctgcatcaagtcagccctttgcgggaactgttttaagagcacaaagtgtatctcaggaagcttcacctagcgtctttacttcaaagcctctcatagattcttcacttttgaaaaatacttatgttggtttaagttcaggcggtgcccatattggacatccaaattttggtaaccagcaaccaagtgacgaatgccttcaaagaaaatctgaatctctatctggttcagaagcaaagggccattcagctgcattggtgcaacctgctctaggaaatcatcataatgggagtggaggtgcacacaagggccttcggatggctaacgttgtacatcgattcaagagcttagttgaatctttggaaattggtgttgtgctatctgggaggttgtggtcctcaagccaagcaatcttcccaaaagggttcaggagcagagtaaaatatttcagcatcgtggatccaacacaaatggcatactacatatctgaaatattagacgctggaccacagggacctctgtttatggtgactctggaaaactgtccaggcgaactttttatcaacgtctctcctgccaagtgctggagcatggtccgtgagaggctgaatatggaaatacggaggcaactcagtacgggaagagctaatcttcctgcactacagccaccgggatcagttgatggttttgaaatgttccggttgctgtcaccggcaattgttcaggcaatcgaggcacgggatagagatcgcatctgcacagagtactggagatccaggcctcatgttgtcactgaagatcgtgcgacggcgccacctcaggctcagggtcctctgcatgcgctgaggggtctattccagcgagccaaccgcaatgagctgctagccctacggagtctactggtgagcaacatcagcccggacgacttctccaggcggcaggctacccaaatcctcgacgaggagatcgccaagcagtggcgctgacaggcgtaaatacaactctgtaatctcttgatggcatgacgggaccaagcagttttcgaccttgacgaaagagcggctccttccgttgcccccgtgcccattctttgtattgttgtgtccatgctccatgccataagatcttgtccccatttggatgcgatcgaatgaccgacgacggctcatcaactgaccagcgtacataccgtctgcctggaaactcttgtggtgttgtaggtttagttatttttcttttaaacgaaatattttaccttcttttttagtgaggctgaaacgcaggctcatgagacgtgagtttttacatgaaaggttgtgtacatcagaaatgtgcggggcctgttgacactactagcagataggcgtgatttatgtgccgagttggtcagagtcgaacagtccatgagcttcaggtactcatcctgcatggttgactgggagttggtacttgcaagctgctgttacagaatacagaccagtagtccaatgaaccccaactgactggtcgctgccatgtgggccaacttttcactctgaccagtctgaatattctgcaaatacggatgatgaaatatctattttgtaaaat

SEQ ID NO: 40861 - DNA, 4610 bp, Zea Mays
ttctgctcggtgccccctctcctctacagctctactctcccctcccgcggaggcgtggacggcatggagttgggggagcccggggcccgtggatgccgtggtcccgtgcgattactgtgcgtggctggctgttcgctctcctccctccccgcgtgttttcaggggcggccttgctcagttgtaattctgtttcttcttcctcatccttaccccttctacacgttacgttacaagttgccactccagcgatttcctgcgtcagtcagtcagtgggaggcattgtatccacgcagggtaggacgcgttgggtgcgcttgtgctggagtttgtgccacgttgccgcttgcggacaatgatgggaacagagtgcatcatggccacactcggcggggatcctgaaccctcaattccacctggattcggaccttttgttgccctcgcgctacagggcatccaaaacaatgccaaatcagctgatgctcattctagttctgctcaagcagcacactgcatggagaaagatgttgaagttctggaacacggttcggcgcatggttggagtgacactcctgctagtacttcagggacccatagttgcaggaggtcacttcgtaacaggcctccaatagactatagccagttcgaccttatctcggacgaagaatctgatgttgaatcagcagaaaagggagtgggattagtgagacgcagacgacaattaccgaaaggagtacttcggggatgcgcacaatgtgctgattgtcaaaaggttgttgcaaggtggaatccatctggtgcaaggaggcctgttcttgaggaagctcctgttttctatccatccgaagaggaattcaaggacaccttaaaatacattgagagtatacggtctacagcagaaccatatggaatttgtcgtattgtcccgccgccttcatggaaacctccatgccttcttaaagagaagaacatatgggaatgctcaaaattttgtactcgggtacagaaggttgacaagctccaaaaccgtaaatcatccaagaagggcagaagaggtgggatgatgaagaagcggaggaagcttttagagctggaagataacaataatattaatcacaatcaaactggggtgcagcaaaaccaagagaggtttggatttgaacctggacctgagttcacacttcagacatttaagaagtatgcagatgatttccgtgaacaatattttaagaaagaagtgtccgcggactcaccaccatcagtagaagacattgaaggcgagtattggcgtatagtcgaaaagcctactgaagagatagaggtagtatatggtgctgatttggagactggaacttttggtagcggcttcccaaagtcttctcccgaagtaaaatctgatgttgagcataagtacttagagtctggttggaacctaaacaacttgcctagactacaaggttcagtactatcttttgaaggtggggacatctctggtgttttggtcccttggctgtatgttggaatgtgcttttcatcattctgctggcatgttgaagaccatcatttgtactcactgaactacatgcattggggtgctccaaagatgtggtatggagttccaggaaaggatgccgtaaatttggaggcagcaatgaggaaacatctacctgacttgtttgaggaacaacctgatttgcttcacaacctggttactcaattttcaacttcattgcttaaatctgaaggagtaccagtctaccgatgtgtgcagcatgagggagagtttgtcctaacattccctcgggcataccatgctggtttcaactgtggcttcaattgtgcagaagctgttaatgtggcaccaattgattggttaccaattggacaggatgcagtcgagctttatcgtaagcaagctcggaaaattactgtttcccatgataagctgttgctaggggctgcaagagaagcaataagagctcattgggatattctgttccttaagaaaaatactgctgataacttgaggtggaaaagcatgtgtggacttgacagtactatatgcaaatcgcttaaggcaagaatcgatttggagttggcgcaaagacaaaatatatgctctccatctcaatctagaaaaatggatgctgaatttgattcaactgatagagagtgtgcattgtgctattatgatctgcatctttctgcttctggctgtccatgttgcccagggaaatatacctgccttgtacatgcaaagcagctttgctcatgtgactgggacaaaagatttttccttttccgttatgatatcaatgagttaaatatgttggctgacgctttaggtgggaagttaagtgcaattcacagatggggtgtctctcatcttggattaagtttgagatcatgtgtcaaaagagaaaaagaccaagattcgaagactcctcgcagagtaactgatggccccagaaggtcctacatgtctcaggcgtcaacagtatcattggcaccttcgttggtttgcaatgaacagaacaacaatggtaataagatgctggaaaaagctagtttggaaacagatacttgtccttttgcagagcaaataaaatctggaactatttcactacaggaggcacacatgaagactgaggtatcctgtacactaaacaacagtgtcagtcctgaaggccacaaaagctcactaagcttgccagttccttctggccagtcactttcttccaatcttgccacaaggtctttaagtactgcaggagaatctgtgaaaaatgcatatgacttggtagtatttaaagggagtagagaatcttctcgggctggagactgtatatcttcgcttggtgtgcatcataacataccgccaataatgattgatcaaggaagcaacatgaatcctagtatggagagctcaaacaattcacataggttgatggcatctaacactaatgcaactaagttttactcttacaaggaccaaatgcatgtaacaccagaaagtcaagcttctgctgcatcaagtcagccctttgcgggaactgttttaagagcacaaagtgtatctcaggaagcttcacctagcgtctttacttcaaagcctctcatagattcttcacttttgaaaaatacttatgttggtttaagttcaggcggtgcccatattggacatccaaattttggtaaccagcaaccaagtgacgaatgccttcaaagaaaatctgaatctctatctggttcagaagcaaagggccattcagctgcattggtgcaacctgctctaggaaatcatcataatgggagtggaggtgcacacaagggccttcggatggctaacgttgtacatcgattcaagagcttagttgaatctttggaaattggtgttgtgctatctgggaggttgtggtcctcaagccaagcaatcttcccaaaagggttcaggagcagagtaaaatatttcagcatcgtggatccaacacaaatggcatactacatatctgaaatattagacgctggaccacagggacctctgtttatggtgactctggaaaactgtccaggcgaactttttatcaacgtctctcctgccaagtgctggagcatggtccgtgagaggctgaatatggaaatacggaggcaactcagtacgggaagagctaatcttcctgcactacagccaccgggatcagttgatggttttgaaatgttccggttgctgtcaccggcaattgttcaggcaatcgaggcacgggatagagatcgcatctgcacagagtactggagatccaggcctcatgttgtcactgaagatcgtgcgacggcgccacctcaggctcagggtcctctgcatgcgctgaggggtctattccagcgagccaaccgcaatgagctgctagccctacggagtctactggtgagcaacatcagcccggacgacttctccaggcggcaggctacccaaatcctcgacgaggagatcgccaagcagtggcgctgacaggcgtaaatacaactctgtaatctcttgatggcatgacgggaccaagcagttttcgaccttgacgaaagagcggctccttccgttgcccccgtgcccattctttgtattgttgtgtccatgctccatgccataagatcttgtccccatttggatgcgatcgaatgaccgacgacggctcatcaactgaccagcgtacataccgtctgcctggaaactcttgtggtgttgtaggtttagttatttttcttttaaacgaaatattttaccttcttttttagtgaggctgaaacgcaggctcatgagacgtgagtttttacatgaaaggttgtgtacatcagaaatgtgcggggcctgttgacactactagcagataggcgtgatttatgtgccgagttggtcagagtcgaacagtccatgagcttcaggtactcatcctgcatggttgactgggagttggtacttgcaagctgctgttacagaatacagaccagtagtccaatgaaccccaactgactggtcgctgccatgtgggccaacttttcactctgaccagtctgaatattctgcaaatacggatgatgaaatatctattttgtaaaat

SEQ ID NO: 40862 - DNA, 2562 bp, Zea Mays
gcctaatgggcctttacccagccgctgatccaacgcgcgcagccgctgatccatcactgccagacgccatcgcgcccagccgcccagacgtctgagctgccagccgccgtcgcgcgcgcccaggagctgccagccgccatcgcgcgcgcccaggagccgccagagctagacgtcgtcggccgtcctccaccgccctccagcgctggtggtttgtttggtaaatggggaatgggcaatactctgttggttccctgttaagtgttacattttcaatgcggtcatggaaatggaattagatgttgctgttgtgaagagagatgaccttggaaatgctcatggtcttaatcttgatgagttcgatgatggttactaatcatacatgaaagttgtaacttgtgttgtgtggttgaacttatgctaatgctatttggtttgtgaactcaacttatgtatgaacttattctatatttaaaattctatgtcaagtctgaaaagacgtttcaacgttcgcttaaacgtttaaacgttgaaaagttggttcataacgttttaacgttttaccgttttaataaccatgggaggcacacatgaagactgaggtatcctgtacactaaacaacagtgtcagtcctgaaggccacaaaagctcactaagcttgccagttccttctggccagtcactttcttccaatcttgccacaaggtctttaagtactgcaggagaatctgtgaaaaatgcatatgacttggtagtatttaaagggagtagagaatcttctcgggctggagactgtatatcttcgcttggtgtgcatcataacataccgccaataatgattgatcaaggaagcaacatgaatcctagtatggagagctcaaacaattcacataggttgatggcatctaacactaatgcaactaagttttactcttacaaggaccaaatgcatgtaacaccagaaagtcaagcttctgctgcatcaagtcagccctttgcgggaactgttttaagagcacaaagtgtatctcaggaagcttcacctagcgtctttacttcaaagcctctcatagattcttcacttttgaaaaatacttatgttggtttaagttcaggcggtgcccatattggacatccaaattttggtaaccagcaaccaagtgacgaatgccttcaaagaaaatctgaatctctatctggttcagaagcaaagggccattcagctgcattggtgcaacctgctctaggaaatcatcataatgggagtggaggtgcacacaagggccttcggatggctaacgttgtacatcgattcaagagcttagttgaatctttggaaattggtgttgtgctatctgggaggttgtggtcctcaagccaagcaatcttcccaaaagggttcaggagcagagtaaaatatttcagcatcgtggatccaacacaaatggcatactacatatctgaaatattagacgctggaccacagggacctctgtttatggtgactctggaaaactgtccaggcgaactttttatcaacgtctctcctgccaagtgctggagcatggtccgtgagaggctgaatatggaaatacggaggcaactcagtacgggaagagctaatcttcctgcactacagccaccgggatcagttgatggttttgaaatgttccggttgctgtcaccggcaattgttcaggcaatcgaggcacgggatagagatcgcatctgcacagagtactggagatccaggcctcatgttgtcactgaagatcgtgcgacggcgccacctcaggctcagggtcctctgcatgcgctgaggggtctattccagcgagccaaccgcaatgagctgctagccctacggagtctactggtgagcaacatcagcccggacgacttctccaggcggcaggctacccaaatcctcgacgaggagatcgccaagcagtggcgctgacaggcgtaaatacaactctgtaatctcttgatggcatgacgggaccaagcagttttcgaccttgacgaaagagcggctccttccgttgcccccgtgcccattctttgtattgttgtgtccatgctccatgccataagatcttgtccccatttggatgcgatcgaatgaccgacgacggctcatcaactgaccagcgtacataccgtctgcctggaaactcttgtggtgttgtaggtttagttatttttcttttaaacgaaatattttaccttcttttttagtgaggctgaaacgcaggctcatgagacgtgagtttttacatgaaaggttgtgtacatcagaaatgtgcggggcctgttgacactactagcagataggcgtgatttatgtgccgagttggtcagagtcgaacagtccatgagcttcaggtactcatcctgcatggttgactgggagttggtacttgcaagctgctgttacagaatacagaccagtagtccaatgaaccccaactgactggtcgctgccatgtgggccaacttttcactctgaccagtctgaatattctgcaaatacggatgatgaaatatctattttgtaaaat

SEQ ID NO: 40863 - DNA, 2449 bp, Zea Mays
ctctcccgtaccgccgccgccgtcgtacgagcaggccgtagggtttcgagtttggagttctgcctcttcctactgcctctccccaagcgctggtggtttgtttggtaaatggggaatgggcaatactctgttggttccctgttaagtgttacattttcaatgcggtcatggaaatggaattagatgttgctgttgtgaagagagatgaccttggaaatgctcatggtcttaatcttgatgagttcgatgatggttactaatcatacatgaaagttgtaacttgtgttgtgtggttgaacttatgctaatgctatttggtttgtgaactcaacttatgtatgaacttattctatatttaaaattctatgtcaagtctgaaaagacgtttcaacgttcgcttaaacgtttaaacgttgaaaagttggttcataacgttttaacgttttaccgttttaataaccatgggaggcacacatgaagactgaggtatcctgtacactaaacaacagtgtcagtcctgaaggccacaaaagctcactaagcttgccagttccttctggccagtcactttcttccaatcttgccacaaggtctttaagtactgcaggagaatctgtgaaaaatgcatatgacttggtagtatttaaagggagtagagaatcttctcgggctggagactgtatatcttcgcttggtgtgcatcataacataccgccaataatgattgatcaaggaagcaacatgaatcctagtatggagagctcaaacaattcacataggttgatggcatctaacactaatgcaactaagttttactcttacaaggaccaaatgcatgtaacaccagaaagtcaagcttctgctgcatcaagtcagccctttgcgggaactgttttaagagcacaaagtgtatctcaggaagcttcacctagcgtctttacttcaaagcctctcatagattcttcacttttgaaaaatacttatgttggtttaagttcaggcggtgcccatattggacatccaaattttggtaaccagcaaccaagtgacgaatgccttcaaagaaaatctgaatctctatctggttcagaagcaaagggccattcagctgcattggtgcaacctgctctaggaaatcatcataatgggagtggaggtgcacacaagggccttcggatggctaacgttgtacatcgattcaagagcttagttgaatctttggaaattggtgttgtgctatctgggaggttgtggtcctcaagccaagcaatcttcccaaaagggttcaggagcagagtaaaatatttcagcatcgtggatccaacacaaatggcatactacatatctgaaatattagacgctggaccacagggacctctgtttatggtgactctggaaaactgtccaggcgaactttttatcaacgtctctcctgccaagtgctggagcatggtccgtgagaggctgaatatggaaatacggaggcaactcagtacgggaagagctaatcttcctgcactacagccaccgggatcagttgatggttttgaaatgttccggttgctgtcaccggcaattgttcaggcaatcgaggcacgggatagagatcgcatctgcacagagtactggagatccaggcctcatgttgtcactgaagatcgtgcgacggcgccacctcaggctcagggtcctctgcatgcgctgaggggtctattccagcgagccaaccgcaatgagctgctagccctacggagtctactggtgagcaacatcagcccggacgacttctccaggcggcaggctacccaaatcctcgacgaggagatcgccaagcagtggcgctgacaggcgtaaatacaactctgtaatctcttgatggcatgacgggaccaagcagttttcgaccttgacgaaagagcggctccttccgttgcccccgtgcccattctttgtattgttgtgtccatgctccatgccataagatcttgtccccatttggatgcgatcgaatgaccgacgacggctcatcaactgaccagcgtacataccgtctgcctggaaactcttgtggtgttgtaggtttagttatttttcttttaaacgaaatattttaccttcttttttagtgaggctgaaacgcaggctcatgagacgtgagtttttacatgaaaggttgtgtacatcagaaatgtgcggggcctgttgacactactagcagataggcgtgatttatgtgccgagttggtcagagtcgaacagtccatgagcttcaggtactcatcctgcatggttgactgggagttggtacttgcaagctgctgttacagaatacagaccagtagtccaatgaaccccaactgactggtcgctgccatgtgggccaacttttcactctgaccagtctgaatattctgcaaatacggatgatgaaatatctattttgtaaaat

SEQ ID NO: 40864 - DNA, 1292 bp, Zea Mays
actcagcatggaattcagcttaatgtacaagatgaaccagcaaaagatcagcacagaccatgctgacaggtcgacaacatcacccacttatcaccatgccatgctgctgctcaagacttcaatcagctcgtttttcttcgtctttgagtagcctttgattcctcgggactttgcaagctccctcagctctgcaaccttcagagagcttagatctgaactttcgtgcaattcatctatatctgtaacatcagcgatttccaaagacagttctggatactcgttgtctggttcaccagcatcagattcttcgtcatcgtctgaaatgtcatcgaggtcgtccaacgaaatgttctctgcctcgattacagaatcaggttcatatggagacatgtagtcaggctcatctgtagcagtcctctcatcaagagctgtcttagccatctgtacagcatcggcaacattattgcgcatagacttgcgatcggcatctgtgtctacatccacattgataacaggctggaacttcactccaggaacaggagaccttcgcctgaaatttgaagctggccttttgaagggtgccggaggttgcttcttctgctcttcctggatgtcactttttgtgccaaagatggttgaacctcgtctatttccagaatcattgcttctcctcattacaccaaaattctgctctttctcgtcactgctcttccttctctggtcaacagagtgcttcctaagcaacttaataagtgaatcaacactgcccctttcgccatgcacttttgcaggagctgaagtgtcttgaggacgggaagtgcttgccaaagagataggtggtccattcctggagaacatgatatcgctatcatattcatcgatgttctcagagtcatctttatcctggtacgaccttcctttccctctggaggacccctccttttgtagttgcgatatatccgaaatccttggcctatggtggttggggctcgcgctacatactaaggataccctaattggccccaacataggtgacgtgaccatgaaacaagctcctggaggagctctgaattatctgattttatggggaagggagtagcacaggagatgaggcggaggggagtggggtgggtgggtgggggtcgcgtaccgcggtggtgaaagagagcaggggccgcaggaaactttccgctgccgggggcagccaactggagcgtccctccgacggcgccgacggtgaagcgactgttggagtgttggtggcgacgagaggtgataaagcgaaagcgaga

SEQ ID NO: 40865 - DNA, 3178 bp, Zea Mays
gcggcggcggcggagcgcggcgcgggagggcctgtgctcctgcttgctttcgtggtgttgctgctgcttttcctctttgttaaaaggctgctccctccgtctcctgtcatctcccctttctctcttctcaattctcatcgcgctggcttcgcttggctgctaaggtcaaatagccatccatctgtccatacgcctctttccctttctctttcctctttaacccccctacgaggctccggtctcagggcgcttcgcatggccatggcctccgcggtggctccggctcctccccttgccagcgacgaccaaaccgggcaaaagcgccgccaaatctgcatctgacctccccaccaccaaatacccaaccagcaccacccaccgccttctgctttctttctttctcgctccttacagcaacacatagcgctcagctcacacctcacagtcagctcaggctcatcttctcagcgagttagcagcagcagcttgaggcccagccgcggctgcctgcgcgcaagcataatggagagcagatggcggaaggccaagatgtcgctagggctcaacctctgcgtctacgtgccccggacgctggaaggcgacgacgcggccagctcgcccgacaccgcctcctccacggcggcgctcgtgtcgccggtggcctcctcctcgtccgccgcgacgagcaccaacaccacccccacggccgcttcggcggaccagagcagcgccagcggcaaggtgctcatgcccaccaccccgacgccgacgtccgccgggctccgcctctccaaatccggcagcaaatcattcaagaaaacatgtgccatatgcttgaccacaatgaagcctggtcagggccatgctctcttcacagcagagtgctcacacactttccacttccattgtatttcggcaaatgttaagcacggaagcagcagctgcccagtgtgtcgtatcaaatggaaggagctcccatttcgaggtcccttgcctgctgaattacctcaaggaaatgcgaggattaatccagttaatgggtaccaaaatggaggccatatgaacatattgcgtccacttcctcgtgcacgctcttctggccggcttcatcatctggccacgttgctgcctgacactgaccctagtactttcaacgatgatgaacccttggacttgtcgtctgaagaggctaatgacaatcatcagggctgtttgagaacagtagagataaaaacatatccagagttcactgaagtacctgaaaatacatcagaaagaaacttcactgttctgattcaccttaaggcaccggttgctcagcacctgcagccatccagcaatctcggagatggcaacgggctaagtacagcccgtgcccctgttgatctcatcacagttcttgatgtcagtggaagtatggctggtaccaaacttgcattgttgaagagggctatgggatttgtcattcagaatcttggatcctctgaccggctttccgtcatcgccttctcatcatccgcacgtaggctcttcccactccgtaggatgactgagtctggtcggcagcagagcttgctggctgttaattcactgacgtcaaatggagggaccaatattgcagaggccctcaggaagggctccaaggtgatcgaagagcgacaggccaagaatccagtctgcagcatcatcctcttgtcagatggtcaagatacctacacggtctcaccaactgctggcgtacacaaaggagcaccagagtattgtgcgctcttgccgtccactaacggtaaccagcaggtacctgttcatgtctttggattcggtgctgaccatgactccgtctcgctgcactccatctcacaaacttctggtggcaccttctcattcatcgagacagaggccgctatccaagatgcatttgctcagtgcattggtggacttttgagtgtggttgcacaaggtctgcatgtaaaggtggagagcctccaccccgacgtgcactttggctccatcagatcaggcagctattctagcagggtttcagatgataagaggaatgggtccatagatgttggggacctgtatgctgaagaagaaagggattttcttgtgtctgtaaacgtcccaccaggctacggggaaacagcactcctcaaggttggctgcgtctacaaagacccactgatgaaggagaccgtgaatatggctgatgtgcaagtgaagatctccaggccagcattcgtctcggtacaaagcgtgtcgatcgaggtggaccgccagaagaaccgcctccatgcagccgaggtgatggctgaagcaaggttttctgcagagcgcggtgacctgaccaccgctgtttctctactcgaggactgccggaggatgatcatggggtcggcgtcaggacagtctggtgaccgtctgtgccaggcactggatgccgagctgaaggagatgcaggatcggatggccaaccggcagaggtacgaggcgtccggtcgagcatatgtgctctcaggcttgagctcgcactcatggcagagggcaaccgcccgcggggactcgacggacagcgagagcctgatccaagcctaccagacttcgtccatggtggacatgctgcttcgctcgcagacaatgagccgctcatcgactcctcgaccaacgccacagatgaggcacgctaagtcattcccggcacgcccgcagccaaggtaactgctatttggtgtcaccaaggatttgcctgaagcctaatttgcttgccgatgggcgtagtagcgccctctaaattcttagttttgtggcgggaggacgggaccagggtatagtttgtgtgggtacaaggggatgtaatggtgtaaatttgatctggggtggtggaggtaaatggtgagaggggtaaggtattttataattgagggggtcggggatggtatacgtcctggggagaattgggcaggagggtggtgaactggtatactctagtattgtactagctccttcgtgtggtgatgtacataagggaagggtatacatttgtggactctttgaggagggatggatacctaatcctgatcccgatccttgcaatgtttgtttcctcagcctggaaaaggactaaggtttgttgcctctttctggaaatggaattgatgatgatcctgggtattttttc

SEQ ID NO: 40866 - DNA, 3523 bp, Zea Mays
acgcacaattcctctttccctcactgctcgccaacccagcgcacggcacaacccattcgcaccgcagcgcgtcgcggcgagcgggcgggcgggcgacaccgacagctcaggaagacaaggaggggagcgagggaggcggaagaaaaaggcacgaaagccaagggaagcgggcgcgaccaccgccacgccctacccccccccctcccccgccgcctagtccgagttgtggaatccccgtggactcccgccccccgtccatcccccgcgcgtcgccgcggcgcgccgggccgatctgctccgccgccccgcccgcctcctcaggtgtccagccgaggaggacgtagagctgggcatataacgagctagatttcaaaaaaaaaaaagggaaccatgaagaaagtgttcgatcagacggtccgggacctaaaaagagaggtgaacaagaaggtcctcaaggtgcctggaatagaacaaaagatccttgatgccacaagcaacgagccgtggggtccacatggatctctactggcagacattgctcaagcgacgaataactatcatgagtaccagatgatcatgcacattgtgtggaagagggtcagtgacactggtaaaaattggcgtcatgtttacaagggattgattgttttggattacctggtggcgcatggcactgaacgagttattgatgacatcagagaacatgcttatcagatatcagcactagctgatttccagtacattgattcttctgggagagatcaaggtagcaatgtacgaaggaaatctcagagccttgtcagtttagttaatgataaagaaaggatacaggaagttagagagaaagcactctctaccaaggacaagtacaggagtgcgtttgcccccagtggcaggagcccaggtggatatggtggtggttatgataatgaccgctatgaaggcagctatggcagtagatatgacaacagaaatggaaatgggaggggagactatggatacagggacgatgacagatatggtggacctggaggtacacccaatcgggaaggagatcgttattccagagattctaatgaacgctatggcagagattatagagaagatgaatacaaaggaagtcatagcaaccatgaatatgctgaaggagcaggtcgcaggagctatggtcaggaaagagattcatatggggatggtgaagcttattcatcccgtggtcgtggcagcaatgctgatgatcctactcaggatgataggcctatagagcgaaagctttctaaccagcaaatttcttcaccaccaccgaactacgaagatgtcacaagagatggccaggacaatcttcacgatgacagaaatggaggaagtgttcctgctgctgtatcaagggtgccctctccttcagttcctgcaacaactgttcctgcagtacaggtgaatggggttcatgacagcactgttgaagatgtacctgcaccaccaactgctcatgccgagcctaatggatttgatgagtttgatccacgtggatctgtaccagattcttcccctcctgtaaaccctgcatcagtagcgaatagcttggagatggatttgtttggatcagatcctattagttcgttggctttggtgtctgtgcctcaaccaacgactacatcaaatgttgaagcaccggcaaattcaggttttgaaacaaatagttttgtgggcatgcctcctgcttcaactggatttggcgagattgatgcttcaaatccttttggggatcctacacctttcaaggcagttcttgatgaaagtccagcactacctcagacacatgctgcaccagctggttctttccaacccactggacctggtacggatgtgaaccctttccagcctgcttcagccgcaagctttggttttggagacactcttggtgatctcacttttgcaccaaatgctgcacctgagctgcaagatatgtttgcaaacacagcctccttgccttcagaggcacctcaggctgcccctgcattttcttattcacaagggcctcatcctggtgctgccatccagtctcaatttccccagactgtcgccccatcatttcctccttcgcaggtgcctcaatctgtaacacccaatctgccaccaggccaatcgaacttttttttgcaatcagcatcagggtctggtattgacagcctgtctggggttcctacccagaatggagcaccatcctacattcccccacagaattctcagttcactgctccggcaaatcaacaaccattgcagccaagcttcatcccacaaactagcacaccagcactccagccggccttgatctctaggggggcatcccagccccttggtgtgccaaattcagtgcctactagtggcagcttcccgttgcagtcaagttcatcagctcccccagaaacaatcgtttctgctttgcaagtcaatcaaactgagccagtgaagaagtttgagcccagatctaaactgtggtctgatactttgagccgaggtctagtcaatctggacatttctggaccaaaagcgaatcctcatgctgatattggagttgactttgattcaatcaatcgcaaggagaaaaggcaggaaaagaaaatcaaccaagcacctgtggtgtctacagtcaccatgggcaaggccatgggagctggttccggcattggtcgggctggtgtaggtgcaatggcacctcctcctaaccaaatgggtgccgggaggggtatgggtcctggtgccggtgccggttatggtggtggaatgggaatgaaccggccaatgggcatggggatgggaatgaatcaacaacagatgaggatggggatgaaccaacaaccgatgggaatggggatggggatgaaccaacaaccgatgggaggaatgaacatggggatggggatgaaccaggggatgccgatgcgtcctccaatggggatgggtcctggtggaatgcccggtgctggctacaatcagatgggcgcggcgtacggtggccagcagccatacggtggatacaggtgaggaggggctatgcagtcccccacaccacagatttatgggggcgaggtgttgaagaaacggttttggaggcatctgtattttgctcacctggttttgctttgggtatgatttcttgtttcttttgggggtggaggtgagaagggtataattttcgtcactattcttttacagtctatgttggatactgtacctactttactaaatagcaaaaagcaaacatatgaacaagggcggtgctacaactactgcgttgtgttggatgtaaagccttgatatattatctctttcccatgtagttgtggctataggcggcttcttttcagtgaacatattgtctgttccagcgttcttgctggatggatagtaaatggctgtaccatttggttgaattatcatggtttttgctttgatgttagtttgcatgtgaaatttgacatgctttgttcacatcgttattcttgtatcagttactatcgag

SEQ ID NO: 40867 - DNA, 3517 bp, Zea Mays
acgcacaattcctctttccctcactgctcgccaacccagcgcacggcacaacccattcgcaccgcagcgcgtcgcggcgagcgggcgggcgggcgacaccgacagctcaggaagacaaggaggggagcgagggaggcggaagaaaaaggcacgaaagccaagggaagcgggcgcgaccaccgccacgccctacccccccccctcccccgccgcctagtccgagttgtggaatccccgtggactcccgccccccgtccatcccccgcgcgtcgccgcggcgcgccgggccgatctgctccgccgccccgcccgcctcctcaggtgtccagccgaggaggacgtagagctgggcatataacgagctagatttcaaaaaaaaaaaagggaaccatgaagaaagtgttcgatcagacggtccgggacctaaaaagagaggtgaacaagaaggtcctcaaggtgcctggaatagaacaaaagatccttgatgccacaagcaacgagccgtggggtccacatggatctctactggcagacattgctcaagcgacgaataactatcatgagtaccagatgatcatgcacattgtgtggaagagggtcagtgacactggtaaaaattggcgtcatgtttacaagggattgattgttttggattacctggtggcgcatggcactgaacgagttattgatgacatcagagaacatgcttatcagatatcagcactagctgatttccagtacattgattcttctgggagagatcaaggtagcaatgtacgaaggaaatctcagagccttgtcagtttagttaatgataaagaaaggatacaggaagttagagagaaagcactctctaccaaggacaagagtgcgtttgcccccagtggcaggagcccaggtggatatggtggtggttatgataatgaccgctatgaaggcagctatggcagtagatatgacaacagaaatggaaatgggaggggagactatggatacagggacgatgacagatatggtggacctggaggtacacccaatcgggaaggagatcgttattccagagattctaatgaacgctatggcagagattatagagaagatgaatacaaaggaagtcatagcaaccatgaatatgctgaaggagcaggtcgcaggagctatggtcaggaaagagattcatatggggatggtgaagcttattcatcccgtggtcgtggcagcaatgctgatgatcctactcaggatgataggcctatagagcgaaagctttctaaccagcaaatttcttcaccaccaccgaactacgaagatgtcacaagagatggccaggacaatcttcacgatgacagaaatggaggaagtgttcctgctgctgtatcaagggtgccctctccttcagttcctgcaacaactgttcctgcagtacaggtgaatggggttcatgacagcactgttgaagatgtacctgcaccaccaactgctcatgccgagcctaatggatttgatgagtttgatccacgtggatctgtaccagattcttcccctcctgtaaaccctgcatcagtagcgaatagcttggagatggatttgtttggatcagatcctattagttcgttggctttggtgtctgtgcctcaaccaacgactacatcaaatgttgaagcaccggcaaattcaggttttgaaacaaatagttttgtgggcatgcctcctgcttcaactggatttggcgagattgatgcttcaaatccttttggggatcctacacctttcaaggcagttcttgatgaaagtccagcactacctcagacacatgctgcaccagctggttctttccaacccactggacctggtacggatgtgaaccctttccagcctgcttcagccgcaagctttggttttggagacactcttggtgatctcacttttgcaccaaatgctgcacctgagctgcaagatatgtttgcaaacacagcctccttgccttcagaggcacctcaggctgcccctgcattttcttattcacaagggcctcatcctggtgctgccatccagtctcaatttccccagactgtcgccccatcatttcctccttcgcaggtgcctcaatctgtaacacccaatctgccaccaggccaatcgaacttttttttgcaatcagcatcagggtctggtattgacagcctgtctggggttcctacccagaatggagcaccatcctacattcccccacagaattctcagttcactgctccggcaaatcaacaaccattgcagccaagcttcatcccacaaactagcacaccagcactccagccggccttgatctctaggggggcatcccagccccttggtgtgccaaattcagtgcctactagtggcagcttcccgttgcagtcaagttcatcagctcccccagaaacaatcgtttctgctttgcaagtcaatcaaactgagccagtgaagaagtttgagcccagatctaaactgtggtctgatactttgagccgaggtctagtcaatctggacatttctggaccaaaagcgaatcctcatgctgatattggagttgactttgattcaatcaatcgcaaggagaaaaggcaggaaaagaaaatcaaccaagcacctgtggtgtctacagtcaccatgggcaaggccatgggagctggttccggcattggtcgggctggtgtaggtgcaatggcacctcctcctaaccaaatgggtgccgggaggggtatgggtcctggtgccggtgccggttatggtggtggaatgggaatgaaccggccaatgggcatggggatgggaatgaatcaacaacagatgaggatggggatgaaccaacaaccgatgggaatggggatggggatgaaccaacaaccgatgggaggaatgaacatggggatggggatgaaccaggggatgccgatgcgtcctccaatggggatgggtcctggtggaatgcccggtgctggctacaatcagatgggcgcggcgtacggtggccagcagccatacggtggatacaggtgaggaggggctatgcagtcccccacaccacagatttatgggggcgaggtgttgaagaaacggttttggaggcatctgtattttgctcacctggttttgctttgggtatgatttcttgtttcttttgggggtggaggtgagaagggtataattttcgtcactattcttttacagtctatgttggatactgtacctactttactaaatagcaaaaagcaaacatatgaacaagggcggtgctacaactactgcgttgtgttggatgtaaagccttgatatattatctctttcccatgtagttgtggctataggcggcttcttttcagtgaacatattgtctgttccagcgttcttgctggatggatagtaaatggctgtaccatttggttgaattatcatggtttttgctttgatgttagtttgcatgtgaaatttgacatgctttgttcacatcgttattcttgtatcagttactatcgag

SEQ ID NO: 40868 - DNA, 414 bp, Zea Mays
cgtctgtgagttgcttgctctgttcgccggaaacgatcggccaacacggagagcttggactggggttgttgcttggtgaacacagaaaaagaaggccgctttctctctctctctctctagctctgcccggcccgttgcactctctctagctgacgagtagctgttggtgatcacgaacgcctgtaaataagcaagggacagcggtgggtggaatcagggtggtgcactctctctctctctctctctctctctctctggctgtactcttactcctcctgcttggctagcttggtgacaagcaagctgctgtgtcgatggacggggcgggagggaggactggagaagatgaagaagaaggttgctgagcggcttgtgcaactccaattataaggaggactgtgtactcctaacgag

SEQ ID NO: 40869 - DNA, 874 bp, Zea Mays
aaaaatggaaggaatcaaagcggttttgctcggatttctgatcacgcgatgaacgatccaagtgtttcatctaatttctgaatttgatcaaccgatttcctgaactattcaccgagatgagattggagacttgctaaggaggcaatttgaacaagcaaacctagaagcgatggatgaatctgccgaatggaggatgaaatatgataaagaaatagagaaaaacaggcagttgcatgatgaactttcaaaggttaaggcctcattagctggtgcagccaggcatcttgagttgttgcagaaggataacgagttgcagaagcggcagaccgaatcactgaggcagcaatgcaattgcactctccattgaaaactaggcaaggttaagggcaaggaaggaatgccttttgtttgtccagcagcaccagagggaggaaaactagattgaggtctaggaattaggacgtacgaaaaggattgagaacatagctctggtagaccaagaccatagtgaccgtctgttataccaatggcgagctgcatatttccgtcccaagtgatcagttgcagtttcatgagtgccaatgcaaatcgcccaagtcaaaacgcaaaagatggcaccatggcagatatatagttcctgtttcagagcaaggattcagtttgtgggtaattttgcagtggcagtttgcattttccgagtacctgaccatctgtaaatatgcgttgtactcgggatcaaatttataacactttataacaacaaacaagttacagatcaaaccggataactgatccgaatacacatttagaatactgtaaaacatgtcctggtcctagttgacacaacaaaaggaaggggaattaatacagtaca

SEQ ID NO: 40870 - DNA, 2015 bp, Zea Mays
acagttctaatagagaaattagccgtgaggaatatgaaatcgggcctgggaaaagtgaaggaatcgggcctgggaaaagtgaaaacacggcaaagacagaggatggtgacacgggcgagggcccctgcagtcctgcacggctgcacccgcactcccgctggttcgcactcgtaatcgtggccgtgggcgccggcggcggctaacaaaagcgccgggaagtgggcaccgaccgaagcatcccggaacagacacagattaccgcttgtatttagatcggcccagaccatctgacgacgaggaggagggcggggaggcgaggccaaatccggtcggactcggaccggcgaactcccccgacctcgctatgggcagcctccgcgtcgtcggctgggcttggaccgccgccgccgcgccggagtggggcgtgcaccgccgctgctgccgcgggacgccgctggcccgcccccgcgcggcgacgtcctcccttggcgcggggcagctccgggtcgggacggagcacgggtggctctgggattgccgcggcggcggcggcgcgggggattacgccagggagatggaggtggcggtgcgcgtcgtgcaggtggcctgcaccctgtgccagcgcgtgcaggactcgctcctccgccccggccccgacgccgccggcggcgacgggcgcgtccacgccaagctcgaccgctcccccgtaaccgtcgctgattggggtgttcaagcgatagtaagctggctgctttccagttcctttcatgatgaggacatatcgatcattgccgaagaagatgatgagacactatctagtagtgacggtgtaactttgcttgaatctgttgttgaggctgtcaacggctgcctggttgaagctccaaactatgggctgagatcccctgagaaagagctcagagctcatgatgttattcaagccatacggaaatgcagctctactggaggcccgaaaggaagattttgggtgcttgatcctgtcgacggcacccttgggtttgtgagaggggaccaatatgctattgctctagccttgattgaagatggagaagttatacttggtgttcttgggtgcccaaattatccaatgaaaaaggagtggctcaattaccatcaaaagtactataggttgatgtctaaggttgctcctcctccattggggtcctggcataaaggttgtgtgatgtatgcccagaaaggatgtggccaagcttggatgcaaccactggttcacgacttcggtaagcttaattggcaccacccaagggagattcaagtatcatccatcagtgatccaatctcagctacgttctgtgaaccagttgagaaagctaactcaagccattccttcacagcaggacttgctcaaagtgtaggattaaggaatcaacctctgcgcgtgtacagcatggtgaaatatgctgcaatagcacgaggcgatgctgaaatcttcatgaaatttgcaagagctggatacaaagagaagatatgggatcatgctgcaggggtggttatcattcaggaggctggtggagtggtcacagatgctggtggccgcccattggacttctcaaggggtgtttacctggaaggtttggatcgaggcataatagcttgttccggagcattgcttcatcaaagaattttaaatgctgttgatgcgagctggaactcatcaacactatgaaccaaacaataaggtcttaggagagaatggcctcatgttggtcatagcatggtaagattgttttgtatggatcaaagtatcaaacagattcaccacaggagcacaagtctgtagatgagacacaatgcatgatgctgtgatcagaaaagtttcagaaccatgatgcatatgctgtgattggattggaagactgagactgtaattctgtaattacgattagttggagagctgcaccgtgcagcactggctgaacagctccttgccgccgtcctcggcgtcctcgtgactcatctcgggccggaagctg

SEQ ID NO: 40871 - DNA, 2010 bp, Zea Mays
acagttctaatagagaaattagccgtgaggaatatgaaatcgggcctgggaaaagtgaaggaatcgggcctgggaaaagtgaaaacacggcaaagacagaggatggtgacacgggcgagggcccctgcagtcctgcacggctgcacccgcactcccgctggttcgcactcgtaatcgtggccgtgggcgccggcggcggctaacaaaagcgccgggaagtgggcaccgaccgaagcatcccggaacagacacagattaccgcttgtatttagatcggcccagaccatctgacgacgaggaggagggcggggaggcgaggccaaatccggtcggactcggaccggcgaactcccccgacctcgctatgggcagcctccgcgtcgtcggctgggcttggaccgccgccgccgcgccggagtggggcgtgcaccgccgctgctgccgcgggacgccgctggcccgcccccgcgcggcgacgtcctcccttggcgcggggcagctccgggtcgggacggagcacgggtggctctgggattgccgcggcggcggcggcgcgggggattacgccagggagatggaggtggcggtgcgcgtcgtgcaggtggcctgcaccctgtgccagcgcgtgcaggactcgctcctccgccccggccccgacgccgccggcggcgacgggcgcgtccacgccaagctcgaccgctcccccgtaaccgtcgctgattggggtgttcaagcgatagtaagctggctgctttccagttcctttcatgatgaggacatatcgatcattgccgaagaagatgatgagacactatctagtagtgacggtgtaactttgcttgaatctgttgttgaggctgtcaacggctgcctggttgaagctccaaactatgggctgagatcccctgagaaagagctcagagctcatgatgttattcaagccatacggaaatgcagctctactggaggcccgaaaggaagattttgggtgcttgatcctgtcgacggcacccttgggtttgtgagaggggaccaatatgctattgctctagccttgattgaagatggagaagttatacttggtgttcttgggtgcccaaattatccaatgaaaaaggagtggctcaattaccatcaaaagtactataggttgatgtctaaggttgctcctcctccattggggtcctggcataaaggttgtgtgatgtatgcccagaaaggatgtggccaagcttggatgcaaccactggttcacgacttcggtaagcttaattggcaccacccaagggagattcaagtatcatccatcagtgatccaatctcagctacgttctgtgaaccagttgagaaagctaactcaagccattccttcacagcaggacttgctcaaagtgtaggattaaggaatcaacctctgcgcgtgtacagcatggtgaaatatgctgcaatagcacgaggcgatgctgaaatcttcatgaaatttgcaagagctggatacaaagagaagatatgggatcatgctgcaggggtggttatcattcaggaggctggtggagtggtcacagatgctggtggccgcccattggacttctcaaggggtgtttacctggaaggtttggatcgaggcataatagcttgttccggagcattgcttcatcaaagaattttaaatgctgttgatgcgagctggaactcatcaacactatgaaccaaacaataaggtcttaggagagaatggcctcatgttggtcatagcatgattgttttgtatggatcaaagtatcaaacagattcaccacaggagcacaagtctgtagatgagacacaatgcatgatgctgtgatcagaaaagtttcagaaccatgatgcatatgctgtgattggattggaagactgagactgtaattctgtaattacgattagttggagagctgcaccgtgcagcactggctgaacagctccttgccgccgtcctcggcgtcctcgtgactcatctcgggccggaagctg

SEQ ID NO: 40872 - DNA, 728 bp, Zea Mays
atattgtccaaaatgtgactcttgtatagttgctcaactaggtgttttgattgtactgtttatttacatcattttgctttgtatccaggaatcaacctctgcgcgtgtacagcatccaaaatgaatcaacctctgcgcgtgtacagcatggtgaaatatgctgcaatagcacgaggcgatgctgaaatcttcatgaaatttgcaagagctggatacaaagagaagatatgggatcatgctgcaggggtggttatcattcaggaggctggtggagtggtcacagatgctggtggccgcccattggacttctcaaggggtgtttacctggaaggtttggatcgaggcataatagcttgttccggagcattgcttcatcaaagaattttaaatgctgttgatgcgagctggaactcatcaacactatgaaccaaacaataaggtcttaggagagaatggcctcatgttggtcatagcatgattgttttgtatggatcaaagtatcaaacagattcaccacaggagcacaagtctgtagatgagacacaatgcatgatgctgtgatcagaaaagtttcagaaccatgatgcatatgctgtgattggattggaagactgagactgtaattctgtaattacgattagttggagagctgcaccgtgcagcactggctgaacagctccttgccgccgtcctcggcgtcctcgtgactcatctcgggccggaagctg

SEQ ID NO: 40873 - DNA, 743 bp, Zea Mays
tgtacagcatccaaaatgaatcaacctctgcgcgtgtacagcatggtgaaatatgctgcaatagcacgaggcgatgctgaaatcttcatgaaatttgcaagagctggatacaaagagaagatatgggatcatgctgcaggggtggttatcattcaggaggctggtggagtggtcacagatgctggtggccgcccattggacttctcaaggggtgtttacctggaaggtttggatcgaggcataatagcttgttccggagcattgcttcatcaaagaattttaaatgctgttgatgcgagctggaactcatcaacactatgaaccaaacaataaggtcttaggagagaatggcctcatgttggtcatagcatggtaaattggaaaactgatttaagtattcattgtggtgctgttgtgactatggggtaacaccgtaacagtgcagcatataggatagtaatagattgtctgctcatataaacaagaagtcgtctcttgaggctgacaaattgctggcttttgttcaacgatgccatatgtaattttgtataggtgtctgttgatgaaaagcatgtgtgcatgcttttgtttttactaattgacatgtttcttttcaacttgtgcctgtcaatcgtcaggtgtattggttaagacagtgcagcaccatttgctgacaatcataatgttaaaaccttcaactgattcatcaaatgagttattgtccgccagttttctgtcatcta

SEQ ID NO: 40874 - DNA, 2559 bp, Zea Mays
cgcagtacaaggagcccatggctctaaaccaggcctcggatgtgtcgaacagacctgaaggcctggcattattgacgagaattgctgaggacactgactgctgcgattctggacctccattgccagaccactcgccgttggagaaaagcctcatcagcaagatcctccgtctgagaggtgttttggatctgccatgtcgaagttcatgcgacgcgttggatcagttgcttctggataccctgggggttctgaaggttgcatatcccaaatgcttatcaggtgtatcaggaaaccatacatcttctgtacgggagggacttgttcacctccatcaggtcctcgtgttggttcaggattgctactcgaaaatcaagcagctgcctaactctggctctgagaagcaaacaatcatggagagcgagagcttagaccatgtaggtaagcgtgtcattgagatgcttgatcaggtgactccagtggtgaaagaaatgttcagttccatggaaagctccagttctgcacaggcggcggcggcagcagcagcttggccggaggatctcccagaaagaagaaccctccctcctgttctctgtcgcactacatcccatcatccatcagacggtgacgaggttgcgatgcacacaggacgttgcaaagttgaggcaccggcgcctgggcacgagacagatgagggcgtttgcaccagggaggaggatggccaaaccagcagccgtgaaccgctgtcagctcctattcctaccgctgagtttttaccgctgcagccgacgctgtcgtcggtgtccccacatctgctgtcggcgccgccgccgtccccgatgcccgtggttggcttgtccatgcttctgcagtcgtgggaggcaacgcaagatggccacgccaccgccgccgcagtggtgccacctgctggcgtcgcacagcctgctgaggcagcgccgacggcacacaaagacaccacgcccgtcggcaccagcatggaagtcgaaggctctacgtcctctgtgttacttgaagctggtcagcctgagccatgcgtggattcacccaatgggagcacgcaggcaccagcgcagggcggcaatgccgctgttccaaacgtgccgccgccgccgccgccagtaccggcgcacagaggcagatctcaagaggggccgtctatggacgagcccggtccggcagtgacagacacgccacctcgaccgccgtgtgaaatgcaaggagaaccacctgcactgccgccggccgccgccaaggttttgccgtcgccgtcgccgtcgccgtcgccgccgccactaccggcgcacagaggcagatttcaagagggggcgtctatggacgagcccggtcaggcagtgacagacacaccacctcggccgccgtgtgaagtgcagggaggaccgcctgcaccgccgccggccgccgccaaggtttcgccagcgccaccgccgccccctggaagcatctcggcagcggtgcgcggcaagaaagccgcgagcaagctgaaacgatcgacgcagatgggcagcctgtacagacgcctgcgagacagagtggaaggctctggcagcacgcacggcgacaggatgcggcagaaccgcaagaggccccggacggtaggcgcgtccaagagcgacgccggcggccagggcatggccgatgcattggccgagatggctaagagatcgacgtacttccgacaaatcgaagaggacgcggagaagtatgcagcggtgatcctggagctgaaggacgccatcggctcgttccagtccaaggacatgtccgagctggtgaggttccgtcagcacgtcgagcggcagctggtgtgcctgaccgacgagacacaggtgttagccaggttcgagggcttcccttccaagaagctggaggcgttgaggacggcggccgcgctctactccaagctggacggcaccgcctcgaggctccagtgctggaagcacaccgccggccccgtatcggcgcagctcgacagattggagagctacttcaacaaggtcaaagacgaggtggacatggtagagcggaacagagacgaggagatgaagcggctgcagtcccagggcgttcacttcgacttcggcgtgctggtccggatcaaggagggcatggtagacctgtcgtccgcctgcatggagctcgccttgaaggagagccaggacgccagagagacgccgacgccgacgcgtgcgaagtgggcgagcagccacggcgatggagagtcgaggatgctgtggcgggtgttccagctggccttccgggtgtacaacttcgccggaggccaggacgagcgggcggacaggctgacgagcatcctggcgcacgagatcgaggagcgagcgctcctgtaagcctttccgtgcgacgtgtacggtttttttttttttggtgtgtccgtgtgtgaaagcgagaaagtgtacgcatcatgtcatgtgcaatctccgagaggtgcaacttgcaagttctatatgtctccttcgaactttaaatagatttatttatggtatagttcaagtgaaaaaa

SEQ ID NO: 40875 - DNA, 2825 bp, Zea Mays
caaggagcccatggctctaaaccaggatcctcttggaccgccccccgcttcccgcacacgccatccaacagcataacaaacacacaggattgctccgcctctcggaatcagatagttcttggccgcctttgttgtgatcgtggccacaaggccccaagggatgcaggtcgcgtcgattgaatgagaagtaggtgagggagatagagcatggttgaggatggcgccgatcatacttcaccgtgcgttgtccttctccatcccgttgcttcatcgccgtgatgtgtcgtcgcccttacaggcctcggatgtgtcgaacagacctgaaggcctggcattattgacgagaattgctgaggacactgactgctgcgattctggacctccattgccagaccactcgccgttggagaaaagcctcatcagcaagatcctccgtctgagaggtgttttggatctgccatgtcgaagttcatgcgacgcgttggatcagttgcttctggataccctgggggttctgaaggttgcatatcccaaatgcttatcaggtgtatcaggaaaccatacatcttctgtacgggagggacttgttcacctccatcaggtcctcgtgttggttcaggattgctactcgaaaatcaagcagctgcctaactctggctctgagaagcaaacaatcatggagagcgagagcttagaccatgtaggtaagcgtgtcattgagatgcttgatcaggtgactccagtggtgaaagaaatgttcagttccatggaaagctccagttctgcacaggcggcggcggcagcagcagcttggccggaggatctcccagaaagaagaaccctccctcctgttctctgtcgcactacatcccatcatccatcagacggtgacgaggttgcgatgcacacaggacgttgcaaagttgaggcaccggcgcctgggcacgagacagatgagggcgtttgcaccagggaggaggatggccaaaccagcagccgtgaaccgctgtcagctcctattcctaccgctgagtttttaccgctgcagccgacgctgtcgtcggtgtccccacatctgctgtcggcgccgccgccgtccccgatgcccgtggttggcttgtccatgcttctgcagtcgtgggaggcaacgcaagatggccacgccaccgccgccgcagtggtgccacctgctggcgtcgcacagcctgctgaggcagcgccgacggcacacaaagacaccacgcccgtcggcaccagcatggaagtcgaaggctctacgtcctctgtgttacttgaagctggtcagcctgagccatgcgtggattcacccaatgggagcacgcaggcaccagcgcagggcggcaatgccgctgttccaaacgtgccgccgccgccgccgccagtaccggcgcacagaggcagatctcaagaggggccgtctatggacgagcccggtccggcagtgacagacacgccacctcgaccgccgtgtgaaatgcaaggagaaccacctgcactgccgccggccgccgccaaggttttgccgtcgccgtcgccgtcgccgtcgccgccgccactaccggcgcacagaggcagatttcaagagggggcgtctatggacgagcccggtcaggcagtgacagacacaccacctcggccgccgtgtgaagtgcagggaggaccgcctgcaccgccgccggccgccgccaaggtttcgccagcgccaccgccgccccctggaagcatctcggcagcggtgcgcggcaagaaagccgcgagcaagctgaaacgatcgacgcagatgggcagcctgtacagacgcctgcgagacagagtggaaggctctggcagcacgcacggcgacaggatgcggcagaaccgcaagaggccccggacggtaggcgcgtccaagagcgacgccggcggccagggcatggccgatgcattggccgagatggctaagagatcgacgtacttccgacaaatcgaagaggacgcggagaagtatgcagcggtgatcctggagctgaaggacgccatcggctcgttccagtccaaggacatgtccgagctggtgaggttccgtcagcacgtcgagcggcagctggtgtgcctgaccgacgagacacaggtgttagccaggttcgagggcttcccttccaagaagctggaggcgttgaggacggcggccgcgctctactccaagctggacggcaccgcctcgaggctccagtgctggaagcacaccgccggccccgtatcggcgcagctcgacagattggagagctacttcaacaaggtcaaagacgaggtggacatggtagagcggaacagagacgaggagatgaagcggctgcagtcccagggcgttcacttcgacttcggcgtgctggtccggatcaaggagggcatggtagacctgtcgtccgcctgcatggagctcgccttgaaggagagccaggacgccagagagacgccgacgccgacgcgtgcgaagtgggcgagcagccacggcgatggagagtcgaggatgctgtggcgggtgttccagctggccttccgggtgtacaacttcgccggaggccaggacgagcgggcggacaggctgacgagcatcctggcgcacgagatcgaggagcgagcgctcctgtaagcctttccgtgcgacgtgtacggtttttttttttttggtgtgtccgtgtgtgaaagcgagaaagtgtacgcatcatgtcatgtgcaatctccgagaggtgcaacttgcaagttctatatgtctccttcgaactttaaatagatttatttatggtatagttcaagtgaaaaaa

SEQ ID NO: 40876 - DNA, 492 bp, Zea Mays
ctgggcatggccgcatggcccatctcttgtcacactggcttctatgagcccaagagccgcttcggccttccgctctccgtgttgccgagctgcggcgggcgttgcgcctccctcgcctcgccagtcccctcgcctctttctcgtttgcggcggcgtccacagcatctgcggctcctgccaccacgtttcggctgcgaccccttcgcccgaaatacgaatgatgagagcaggataagataagcaaagcaaattatgcgctgcagaagtcctttgcattgcagttttccactggaaggttgtgatgcaaggtgaaagatcccgcgccatttcagcagagcagatgttcccaagagcacacaatgcaaggcccacgatgaactggttcgtgtggttgagatctctgcccccaaattaagcactaaacattactcaaaactcagcactgcatttgaggaaacaacactcccggagcgatattgcagagacagcgtg

SEQ ID NO: 40877 - DNA, 927 bp, Zea Mays
aaacaaccacccttcgtctcttgttctcttcccaaacacctcacccatgacccatctctctcttatcttcaagacatgtccacccatctctcttctcggaaatccatcctccccgcccctccccacgccacccccgaccgatctattcgtagacggggacgggttgaataattccatgtgtacgctggtgatgagccgacgagacatggccctccttgccgtcttccacagctttcttgaactgcatgccgccggctggtggatgctgcgcgcttgaattccggtcgatcccaagaggcgcagttcaataaagctgtgggaaactgcagagagaggccaccagccgatccgatcgatcggatcggatcgcggcaccagatctcgaccaccgccggaactgggcgggggcgaagcagatgatgcggcgattaattaaccggcgtagcagcggctggggatctacctgcatcacgtcgatccacccgcggtagatcgatgggaccgtcacaacaaggacaaggagtatatgcatggctaacatgaagctatgtcatgagtacatgcctaatcttttcaggttctatttacgttcctcagaaatatacgcagacaagcttggggggtgatgaaaagggagaaagtcacgcgcatatataggtagcagatgcagaagaagaaagcaaaaccgatctacattgctcgacgaaatcaaaccaagatgcacgagcagatagcgatactcacagaagcacgacggattcagaggagtaacttacatttgcagaaacatatagatagatactccctccgtttctttttagttgtcgctggatagttcaattttgcactattcagcgacaactaaaacgaaacggagtgagtagtagatagggccaatttaacttcacatctcactgcagcattaca

SEQ ID NO: 40878 - DNA, 4215 bp, Zea Mays
aaccacccttcgtctcttgttctcttcccaaacacctcacccatgacccatctctctcttatcttcaagacatgtccacccatctctcttctcggaaatccatcctccccgcccctccccacgccacccccgaccgatctattcgtagacggggacgggttgaataattccatgtgtacgctggtgatgagccgacgagacatggccctccttgccgtcttccacagctttcttgaactgcatgccgccggctggtggatgctgcgcgcttgaattccggtcgatcccaagaggcgcagttcaataaagctgtgggaaactgcagagagaggccaccagccgatccgatcgatcggatcggatcgcggcaccagatctcgaccaccgccggaactgggcgggggcgaagcagatgatgcggcgattaattaaccggcgtagcagcggctggggatctacctgcatcacgtcgatccacccgcggtagatcgatgggaccgtcacaacaaggacaaggtacggattaggtttcttgtactggtaggaatggatggtggttatgaatgcatgtgttgaattccgtacacgtgtgtgtgagagagagagagtgatggtgcgtagggctggttaatttcgtcgtctcagcttctttcccgtgcaatttaatctcaacctatgtatatactacaagaaaagggttgttgttaattaccagtgtctgaaattgtggtttttctgaactccaagtggcagtatacacatacctttgtttcttaatccttgccgcacttgactagcggtggtaataaatcatgatccaaattgctttcacaaaatgatagaaaactaaataaattttagaattatgtttcgatcttaatctgattcgatacttaaattttataatataaaatttagagctcattgtcactatctctgcaatgttctgcatacgtttttttttaaaaaaatagatagatagagtatagtaatatttagccagggtccgttagtttcttccggctggtcatgctttaataattgagctgcatgttttttaagcgatatccatttttttttctcatcattgcgtgcacagttagcgcagatatatatttttttttatttttttgcatgcttttattctctgaaagggcgatgggcattttccaggaacgaataaaaagagcagtgcgatttggcctgtcgttctgtcgtagactgtggggcgatgtttttctggaagcgtgcaatctggtagatcttttggttgtgtaaagggagaaaaaagatggcgctgcttgctcctgcagcagaatatgcatgcatgcatgaggcctcaaatcacacccacccactgacccaccccaccccaccccacccagtacctggtcgatctctctctcacctctagactgccggcacaggcgatgacctagctactactactacagtactagtagactactagtgctcactttccctctcctctctctctctctggaacagtagtacctgttgtgcttgcgtttgccatcgctgctgcatgcgttgtgtctgtgactctgtgtgccgtgtaacgctgggcaagcaagcaacactgacatgatggcttcttcttcctcttaccactgaacagtcctggttcttggactatctacatgtctcgaggtgtgttgtacggtctggcggaggagatggatggatgcatatgcatgctgctgcatcttgtcacccagaccggaagtacaaacattttgctgtaaaataaaaatatatatacctcgaaaagggacatgtagtagcaagtgctagctagtaggaagacaaacagaaagtagtgtgtgtgtgtgtggggtgcagtttcgggggccgtagaaggcatgcatgggctggcgttccctccctcgtgtcgccatgcctgcactctgcagccttgagattccagggaatttttactggattccttgctggagcagccactgcgctttgcttgcttgcagtgaaatcctccgtattccattattattcctggcgctggcagcagccagcagctagtagcaggctggctggctttctctctctctctcacgtccggtccaccgtggcagtggcaccgtccatccatgacgtgagcgagaaggcgagtgagatcagatgcccagatctgcagagaggggggaggggactggagaggccggggacgagcctcatgggtctgattggtgggtcccactcccgcatgcatcatgtatgcaccggccggccggccggcctacctgtcaccgcctctcgctgcgggggctacaggcctgcctgcctgcctgtcagtggccctcccttgttgccttgtcccgacctattaattgatgcatgacagatcgatccatggatggatgggtagattagatcaatcatcggtgtgggtgtggagcgacggcttgagacgtgtgtttttcggctgtaatcgggagaaagaaaaagagaatggttgaactttcaattctattgttttcatacttttgtttttaaaattatcacaaagacttcgtttgtttgtaagctgatttctctagtcggttgtgattcatgaggacacagcaacttagagaaatatgttttagttatactgttctttttttatatagcctgtctccatctatgtaatacaagcagcattatcttcgcagttaatcgtggatgatttggtgggaaccaattccactaaattggtgtatgtgattaatcattttttgcgaagcaatacacattcacgttatgtttcatatagtgcatcatttttggaataatacatagcggttgttacaatagtctgtttattagaaaatttccaatagataatagatggtcgtgcctccatataaaaaaattacaaagccacagatatttacaaatataagtgctccaacaacactaagatataaaactaaaggtcctagtgtctcttcttcatcatccccttgactgaatggatctttctcaatgtctagagaacgaataactgtgatatagcaagctagccacaaatatttacaagactgctatataatttataacacacattattaaccctaaatattattttgactggactcaagtatctgtgaccaaggactatgagagtctaactgagatctccaaatatgttggaggaaaactccacaagcatcttgtttgtccattaaatcttgtttatgcggtagagtcgggttgcttatttgtacaatccttgttgtttatgttctaagtgttggcatatacttaaagtaacagggcaacgttcaaggaaagtttatttgtgttccaaacaaagatcttattgtgcccttcggcttaaaatagactattaattaaactcagaatatactttaaaatttttctcatggtattaacgaggaaggattctgtacacagttgtcgtcaatgtagaagaagtcttatctattctatatgcatcagttggttcttttccataacttttgagttttgcacaaagtttataaagtgcatgattgtatccccctacagacttgaagtcttgtaggcgaagatggttccattcatgtgtagctgttgttgttcataccgttgttggagagcgatccaaaaaaaaacacgtgaaggctaggtctgtggtatatatatgaggcgtatgatgtacttggttttattgttgggtactgagtaccctattaccgttgaacaatgacctcccaaaaaaatttgtaaagagagactgactttgagatctattgaccatgtgggaaaattatgtccatcaaaagcaagtgattcaaattcttttatggtgtcaacatttgacatgttgcctctttgacgggagttctgcatcctttgtattctccagctccttgacctggagcagtgttaataatgcattttagaatgattgtaatcaagagaaataaaaatggtttaatttcaattggtcgtatatttatatgtgctgaactattgctaataaatcgactgttgtccattcaagggcgcacttgcgatttgtgaattgatgtgatgggtctatcaggatattggtcattctacgctcgatttatgtctgtagaataaatgaccatatggctcgtttggatcattggaattgaatttcattctaatactataatttagacatatatgaattaagctaattcggttttatacaaaatatatttg

SEQ ID NO: 40879 - DNA, 845 bp, Zea Mays
ctcttcccaaacacctcacccatgacccatctctctcttatcttcaagacatgtccacccatctctcttctcggaaatccatcctccccgcccctccccacgccacccccgaccgatctattcgtagacggggacgggttgaataattccatgtgtacgctggtgatgagccgacgagacatggccctccttgccgtcttccacagctttcttgaactgcatgccgccggctggtggatgctgcgcgcttgaattccggtcgatcccaagaggcgcagttcaataaagctgtgggaaactgcagagagaggccaccagccgatccgatcgatcggatcggatcgcggcaccagatctcgaccaccgccggaactgggcgggggcgaagcagatgatgcggcgattaattaaccggcgtagcagcggctggggatctacctgcatcacgtcgatccacccgcggtagatcgatgggaccgtcacaacaaggacaaggttctatttacgttcctcagaaatatacgcagacaagcttggggggtgatgaaaagggagaaagtcacgcgcatatataggtagcagatgcagaagaagaaagcaaaaccgatctacattgctcgacgaaatcaaaccaagatgcacgagcagatagcgatactcacagaagcacgacggattcagaggagtaacttacatttgcagaaacatatagatagatactccctccgtttctttttagttgtcgctggatagttcaattttgcactattcagcgacaactaaaacgaaacggagtgagtagtagatagggccaatttaacttcacatctcactgcagcattaca

SEQ ID NO: 40880 - DNA, 743 bp, Zea Mays
ttttactaatgcataaaatcatttcctatcctccaccttatgaatttgagatatgcttatatttgaactttggaaagtggtggaatgtcaaattccaaactaaataagttactttatcgagtgaattttaattcctttaaaatgaagggatccaaacgccccgatagaataaatgacaaatactttctccgtctaaaaaaaacaacttctaggtatagtgaggatacatttatcttttactaaatcataaagctcacctaatttacctttcttttcagagtgattagttggagttcgcttctaaactcacacatccaaactctcatttcaatgtaggagtatatgcatggctaacatgaagctatgtcatgagtacatgcctaatcttttcaggttctatttacgttcctcagaaatatacgcagacaagcttggggggtgatgaaaagggagaaagtcacgcgcatatataggtagcagatgcagaagaagaaagcaaaaccgatctacattgctcgacgaaatcaaaccaagatgcacgagcagatagcgatactcacagaagcacgacggattcagaggagtaacttacatttgcagaaacatatagatagatactccctccgtttctttttagttgtcgctggatagttcaattttgcactattcagcgacaactaaaacgaaacggagtgagtagtagatagggccaatttaacttcacatctcactgcagcattaca

SEQ ID NO: 40881 - DNA, 897 bp, Zea Mays
atccatcgcaccgcttggtgggccgtccacatcaccaaaccttctggcttctgcactgctctcctccacccctcaacgaagcctctggtgcctcggccaccgcagcagcctggccctgccccggcccccgggcgtggtgtcaggtctcaggtgtggtggcgctttctcctctccggcacggtggccgcgtcatcccagctctcccgcgcggcggcggcggccgtttcctctcctgcgctcctcctgccgcacacagccagaaaattccagctgaagtttgtttgaggataggcgacagctttgcgagtccttcgtgttgaaggagaaattgtagctgaagtgaaaaaacagcagggaacgatggcactatcacgaagtatgagagcatgtttgcacagtggaagacttgcacttcttgccatattggtctctggtggaattgtattgcaaatcttggcttgtgctctctataacaactggtggccaatgctaacagctgggtgaacttcacgaaattcttgacgggcgcatcaatagtagggagcatcgccattccgtcgatcctgaagcatgcgggcgtcattggatggggagccctgacgatggagctgtcatcctttgtggtctttggcgtggcaatcctgtggttcctccagatgaacggtgaagacgagtacagcggagtgttctaatccaaacctgctgctgctggttctcttgccagcgtggcactctgtgcatggtagttgtgaactgggctgtactgctacaacaggggaagcattgccctgggacctgatttactgacaccagtacatgtttggtctgcgatttttgtttgtcctcgtaggtttgcctgacttccagaattttgtttacgtggccgtggtatctaga

SEQ ID NO: 40882 - DNA, 857 bp, Zea Mays
atccatcgcaccgcttggtgggccgtccacatcaccaaaccttctggcttctgcactgctctcctccacccctcaacgaagcctctggtgcctcggccaccgcagcagcctggccctgccccggcccccgggcgtggtgtcaggtctcaggtgtggtggcgctttctcctctccggcacggtggccgcgtcatcccagctctcccgcgcggcggcggcggccgtttcctctcctgcgctcctcctgccgcacacagccagaaaattccagctgaagtttgtttgaggataggcgacagctttgcgagtccttcgtgttgaaggagaaattgtagctgaagtgaaaaaacagcagggaacgatggcactatcacgaagtatgagagcatgtttgcacagtggaagacttgcacttcttgccatattggtctctggtggaattgtattgcaaatcttgctgggtgaacttcacgaaattcttgacgggcgcatcaatagtagggagcatcgccattccgtcgatcctgaagcatgcgggcgtcattggatggggagccctgacgatggagctgtcatcctttgtggtctttggcgtggcaatcctgtggttcctccagatgaacggtgaagacgagtacagcggagtgttctaatccaaacctgctgctgctggttctcttgccagcgtggcactctgtgcatggtagttgtgaactgggctgtactgctacaacaggggaagcattgccctgggacctgatttactgacaccagtacatgtttggtctgcgatttttgtttgtcctcgtaggtttgcctgacttccagaattttgtttacgtggccgtggtatctaga

SEQ ID NO: 40883 - DNA, 745 bp, Zea Mays
ttgaacactgtctgttgcctgatgaaattccagctgaagtttgtttgaggataggcgacagctttgcgagtccttcgtgttgaaggagaaattgtagctgaagtgaaaaaacagcagggaacgatggcactatcacgaagtatgagagcatgtttgcacagtggaagacttgcacttcttgccatattggtctctggtggaattgtattgcaaatcttggcttgtgctctctataacaactggtggccaatgctaacagttctcatgtaccttatcctaccaatgcccctcatatttttcctgggttctgatacttcctccatgatgtccaatgggggagacggctgggtgaacttcacgaaattcttgacgggcgcatcaatagtagggagcatcgccattccgtcgatcctgaagcatgcgggcgtcattggatggggagccctgacgatggagctgtcatcctttgtggtctttggcgtggcaatcctgtggttcctccagatgaacggtgaagacgagtacagcggagtgttctaatccaaacctgctgctgctggttctcttgccagcgtggcactctgtgcatggtagttgtgaactgggctgtactgctacaacaggggaagcattgccctgggacctgatttactgacaccagtacatgtttggtctgcgatttttgtttgtcctcgtaggtttgcctgacttccagaattttgtttacgtggccgtggtatctaga

SEQ ID NO: 40884 - DNA, 1914 bp, Zea Mays
ctgcttccttcctccctctcgttgccatatactagcttccccggctcgtcgagcctgcggccactaaatgtcctcgaaactgaaccaccacgaactgtctatctgcatccatctcttggccacacccactgaccgcgccacaccacacctgtggctctccgcctcgagatgctttacacggtgtagctggcaagaagccaggaaccttccctgttccctcccgggcgcaaaggggctcacttttaatttcctcgagaggggactgcctcctttctccggcggcaagccttctcctgccttgttgcctgccactcgggctgtcctccttcttgattcttggcaccgtcggtttaatttcgcgaaatggcggcaggggtgtcgctcaagatggccggcttctgcgtcgtctgggcgctattctggctcgccggctccgccaccgtgagcacgagcaccaccgccttcgccggcggcgaggcggtggtcatggacgcgcggtccgtcgtcgccgtcaccgacaacgacttcgtttgcgccacattggactggtggctgccggagaagtaggactacgacacctgcagctgggggctggcctccctgctcaacctgcgttctcccccttgaagctccgcctgggcggctctctgcaagacatgtacgacaccggcgacgctcgccagccctcctgcgccccgttcgcgaagaacgcgtcggccatgttcggtttctcgcaaggctgcctgccgctgcgtagatgggacgagctcaacgccttcttccagagaaccggggcaaagattgttttcgggctgaatgctctgaatggccgggtccccatgcctgatggctctctaggggggccatggaactgaactaccacgaacgcggcttctttcattggctacaccgtgagcagaggatacgatgtacatggatgggagctcggaaacgaactgagcggcagcggagtcggagctcgggtcgacgcagaccagtacgcagcagacgtgatcgcgctgaaacgcatcatcgacagcacctaccaccagagcagcagcccggcaaagcctctggtgctcgcgccaggaggcttcttcgacgcggcctggttcacggagctcgtcggcaagacgaagccggagcagatggacgtgatcactcaccacatctacaatctaggccccggggtcgacgatcatctggtccagaagatccttgacccttcttacctcgacggcgaggccagcacgttcagcgatcttgaggggatactgaggtctgcaggtacgtccaccgtcgcctgggttggcgaggccggaggggcttacaacagcggtcgccaccttccacatgattggttggtgtactaagaagcgtatggcgcgagccagcctcgtcgagcagagaagctcgctctctggatctccacgtatgcaggctgaagggtcaacgcatctggtgagtctggacgcgcagcaaccaaacacgcggcttgtgactgatgcgtttgtgttcagcttctggtaagccacagccacccaagagtttatcatccgaggaagaagaagaagcgtgtaactatcgactggtgtctggtggtgctgcaggtacctggatcagcttgggatgtcgtccaagtacggtacgaagagttactgcagacagaccttggttggagggaactatggcctgctcaacacgactacgtttgaaccgaaccctgactactacaagtggactagccatgcataagtttctctctctcttctctcacaaagctgggatactgagtgataagagagggagaaattgtgtgctcaatcccgccatgaaaacctagcatctttctgctttagggggtttttggttagggggactaaagattagtctctagtttttagtctcatttag

SEQ ID NO: 40885 - DNA, 2674 bp, Zea Mays
ctgcttccttcctccctctcgttgccatatactagcttccccggctcgtcgagcctgcggccactaaatgtcctcgaaactgaaccaccacgaactgtctatctgcatccatctcttggccacacccactgaccgcgccacaccacacctgtggctctccgcctcgagatgctttacacggtgtagctggcaagaagccaggaaccttccctgttccctcccgggcgcaaaggggctcacttttaatttcctcgagaggggactgcctcctttctccggcggcaagccttctcctgccttgttgcctgccactcgggctgtcctccttcttgattcttggcaccgtcggtttaatttcgcgaaatggcggcaggggtgtcgctcaagatggccggcttctgcgtcgtctgggcgctattctggctcgccggctccgccaccgtgagcacgagcaccaccgccttcgccggcggcgaggcggtggtcatggacgcgcggtccgtcgtcgccgtcaccgacaacgacttcgtttgcgccacattggactggtggctgccggagaagtaggactacgacacctgcagctgggggctggcctccctgctcaacctgcgttctcccccttgaagctccgcctgggcggctctctgcaagacatgtacgacaccggcgacgctcgccagccctcctgcgccccgttcgcgaagaacgcgtcggccatgttcggtttctcgcaaggctgcctgccgctgcgtagatgggacgagctcaacgccttcttccagagaaccggggcaaagattgttttcgggctgaatgctctgaatggccgggtccccatgcctgatggctctctaggggggccatggaactgaactaccacgaacgcggcttctttcattggctacaccgtgagcagaggatacgatgtacatggatgggagctcggaaacgaactgagcggcagcggagtcggagctcgggtcgacgcagaccagtacgcagcagacgtgatcgcgctgaaacgcatcatcgacagcacctaccaccagagcagcagcccggcaaagcctctggtgctcgcgccaggaggcttcttcgacgcggcctggttcacggagctcgtcggcaagacgaagccggagcagatggacgtgatcactcaccacatctacaatctaggccccggggtcgacgatcatctggtccagaagatccttgacccttcttacctcgacggcgaggccagcacgttcagcgatcttgaggggatactgaggtctgcaggtacgtccaccgtcgcctgggttggcgaggccggaggggcttacaacagcggtcgccaccttccacatgattggttggtgtactaagaagcgtatggcgcgagccagcctcgtcgagcagagaagctcgctctctggatctccacgtatgcaggctgaaggtgagaaatataactgagttgtatgtgtgtgtacgaactcgggtcattacatgcaggtaatcaatcacaagcacatacggcgtgattggttgctttctcgaagcagcctgcccgctcgggccagcttccgttgagcctggccgcccagagacggaaatgaatcatgtttcccacgggcctggctcggagcgttctgctgcatctctcgggccaaatcagcacacttacccaccaaccaaacagacgtactttggatacgtagatgcagcagatggtcaacgcatctggtgagtctggacgcgcagcaaccaaacacgcggcttgtgactgatgcgtttgtgttcagcttctggtacctggatcagcttgggatgtcgtccaagtacggtacgaagagttactgcagacagaccttggttggagggaactatggcctgctcaacacgactaccgctctactgtggcaccgcctcatgggcaccaaggtcctctctgcgacgttcaacggcacgaacaagatccgcgcctacgcacactgcgcgaagagatcgggaagggtcctctgctcctgatcaaccttgacggcaacagcacgaaccgcatccacgtcacgagccaaggcgcacaggcacagagtgcgcggagggagagagcggggggacgcctggtcgcttccctttccctgcgcttggcggagcagccgagctgctcgcaacaagagaggagtaccacctcgctcccaaggacggcgatctgcagagccagcaggtgctgctgaacggccatgttctggcaactgacgccgacggggacatcccagagctggagcccgtgcgggtggatggaacgcagccggtaaccgtggtccgtgggcccttactcgatcgtgttcgctcacatccccggcttctacgctcctgcctgtagctagaatttttacaccccagccttttccttcctggtgtgtatcataggttcggataaatccgggcgaacggcgaagcttgttcgcctgtccgtgcgtgaagtaaagctgcgaggctgaaaggtgtgcgatttgtcattgtttgggaaacaagtgttcggataatgtgtgagcaaaggggaggaaagtggagatgaaaataataaaaggaaaaaaaaggtttcgaatttttctctatgtctctgtcgttttggttgagaaagcagaaaaggcgacagttgcctcgcaaattcgcaatggaa

SEQ ID NO: 40886 - DNA, 3071 bp, Zea Mays
ctgcttccttcctccctctcgttgccatatactagcttccccggctcgtcgagcctgcggccactaaatgtcctcgaaactgaaccaccacgaactgtctatctgcatccatctcttggccacacccactgaccgcgccacaccacacctgtggctctccgcctcgagatgctttacacggtgtagctggcaagaagccaggaaccttccctgttccctcccgggcgcaaaggggctcacttttaatttcctcgagaggggactgcctcctttctccggcggcaagccttctcctgccttgttgcctgccactcgggctgtcctccttcttgattcttggcaccgtcggtttaatttcgcgaaatggcggcaggggtgtcgctcaagatggccggcttctgcgtcgtctgggcgctattctggctcgccggctccgccaccgtgagcacgagcaccaccgccttcgccggcggcgaggcggtggtcatggacgcgcggtccgtcgtcgccgtcaccgacaacgacttcgtttgcgccacattggactggtggctgccggagaagtaggactacgacacctgcagctgggggctggcctccctgctcaacctgcgttctcccccttgaagctccgcctgggcggctctctgcaagacatgtacgacaccggcgacgctcgccagccctcctgcgccccgttcgcgaagaacgcgtcggccatgttcggtttctcgcaaggctgcctgccgctgcgtagatgggacgagctcaacgccttcttccagagaaccggggcaaagattgttttcgggctgaatgctctgaatggccgggtccccatgcctgatggctctctaggggggccatggaactgaactaccacgaacgcggcttctttcattggctacaccgtgagcagaggatacgatgtacatggatgggagctcggaaacgaactgagcggcagcggagtcggagctcgggtcgacgcagaccagtacgcagcagacgtgatcgcgctgaaacgcatcatcgacagcacctaccaccagagcagcagcccggcaaagcctctggtgctcgcgccaggaggcttcttcgacgcggcctggttcacggagctcgtcggcaagacgaagccggagcagatggacgtgatcactcaccacatctacaatctaggccccggggtcgacgatcatctggtccagaagatccttgacccttcttacctcgacggcgaggccagcacgttcagcgatcttgaggggatactgaggtctgcaggtacgtccaccgtcgcctgggttggcgaggccggaggggcttacaacagcggtcgccaccttccacatgattggttggtgtactaagaagcgtatggcgcgagccagcctcgtcgagcagagaagctcgctctctggatctccacgtatgcaggctgaaggtgagaaatataactgagttgtatgtgtgtgtacgaactcgggtcattacatgcaggtaatcaatcacaagcacatacggcgtgattggttgctttctcgaagcagcctgcccgctcgggccagcttccgttgagcctggccgcccagagacggaaatgaatcatgtttcccacgggcctggctcggagcgttctgctgcatctctcgggccaaatcagcacacttacccaccaaccaaacagacgtactttggatacgtagatgcagcagatggtcaacgcatctggtgagtctggacgcgcagcaaccaaacacgcggcttgtgactgatgcgtttgtgttcagcttctggtacctggatcagcttgggatgtcgtccaagtacggtacgaagagttactgcagacagaccttggttggagggaactatggcctgctcaacacgactacgtttgaaccgaaccctgactactacaagtggactagccatgcataagtttctctctctcttctctcacaaagctgggatactgagtgataagagagggagaaattgtgtgctcaatcccgccatgaaaacctagcatctttctgctttagggggtttttggttagggggactaaagattagtctctagtttttagtctcatttagtccattttttgccaaacactatgactaaaatatagactaaaatgatttagtctttagtccttcacatatgtgctaaaagagattaaatcatattaatttcacttttacccctcatttagttcaattgtactaatagtaggagaatgttaaaggtcattttagtcttcttacgagtcatttagtatattcttactatttttatcccatagaatcaaaaatgttagggactaaactttagtcccctaactaaactttagtccctagactaaagaaaccaaacatgaccttaattttctctgtagcgctctactgtggcaccgcctcatgggcaccaaggtcctctctgcgacgttcaacggcacgaacaagatccgcgcctacgcacactgcgcgaagagatcgggaagggtcctctgctcctgatcaaccttgacggcaacagcacgaaccgcatccacgtcacgagccaaggcgcacaggcacagagtgcgcggagggagagagcggggggacgcctggtcgcttccctttccctgcgcttggcggagcagccgagctgctcgcaacaagagaggagtaccacctcgctcccaaggacggcgatctgcagagccagcaggtgctgctgaacggccatgttctggcaactgacgccgacggggacatcccagagctggagcccgtgcgggtggatggaacgcagccggtaaccgtggttcggataaatccgggcgaacggcgaagcttgttcgcctgtccgtgcgtgaagtaaagctgcgaggctgaaaggtgtgcgatttgtcattgtttgggaaacaagtgttcggataatgtgtgagcaaaggggaggaaagtggagatgaaaataataaaaggaaaaaaaaggtttcgaatttttctctatgtctctgtcgttttggttgagaaagcagaaaaggcgacagttgcctcgcaaattcgcaatggaa

SEQ ID NO: 40887 - DNA, 2223 bp, Zea Mays
ctgcttccttcctccctctcgttgccatatactagcttccccggctcgtcgagcctgcggccactaaatgtcctcgaaactgaaccaccacgaactgtctatctgcatccatctcttggccacacccactgaccgcgccacaccacacctgtggctctccgcctcgagatgctttacacggtgtagctggcaagaagccaggaaccttccctgttccctcccgggcgcaaaggggctcacttttaatttcctcgagaggggactgcctcctttctccggcggcaagccttctcctgccttgttgcctgccactcgggctgtcctccttcttgattcttggcaccgtcggtttaatttcgcgaaatggcggcaggggtgtcgctcaagatggccggcttctgcgtcgtctgggcgctattctggctcgccggctccgccaccgtgagcacgagcaccaccgccttcgccggcggcgaggcggtggtcatggacgcgcggtccgtcgtcgccgtcaccgacaacgacttcgtttgcgccacattggactggtggctgccggagaagtaggactacgacacctgcagctgggggctggcctccctgctcaacctgcgttctcccccttgaagctccgcctgggcggctctctgcaagacatgtacgacaccggcgacgctcgccagccctcctgcgccccgttcgcgaagaacgcgtcggccatgttcggtttctcgcaaggctgcctgccgctgcgtagatgggacgagctcaacgccttcttccagagaaccggggcaaagattgttttcgggctgaatgctctgaatggccgggtccccatgcctgatggctctctaggggggccatggaactgaactaccacgaacgcggcttctttcattggctacaccgtgagcagaggatacgatgtacatggatgggagctcggaaacgaactgagcggcagcggagtcggagctcgggtcgacgcagaccagtacgcagcagacgtgatcgcgctgaaacgcatcatcgacagcacctaccaccagagcagcagcccggcaaagcctctggtgctcgcgccaggaggcttcttcgacgcggcctggttcacggagctcgtcggcaagacgaagccggagcagatggacgtgatcactcaccacatctacaatctaggccccggggtcgacgatcatctggtccagaagatccttgacccttcttacctcgacggcgaggccagcacgttcagcgatcttgaggggatactgaggtctgcaggtacgtccaccgtcgcctgggttggcgaggccggaggggcttacaacagcggtcgccaccttccacatgattggttggtgtactaagaagcgtatggcgcgagccagcctcgtcgagcagagaagctcgctctctggatctccacgtatgcaggctgaagcgctctactgtggcaccgcctcatgggcaccaaggtcctctctgcgacgttcaacggcacgaacaagatccgcgcctacgcacactgcgcgaagagatcgggaagggtcctctgctcctgatcaaccttgacggcaacagcacgaaccgcatccacgtcacgagccaaggcgcacaggcacagagtgcgcggagggagagagcggggggacgcctggtcgcttccctttccctgcgcttggcggagcagccgagctgctcgcaacaagagaggagtaccacctcgctcccaaggacggcgatctgcagagccagcaggtgctgctgaacggccatgttctggcaactgacgccgacggggacatcccagagctggagcccgtgcgggtggatggaacgcagccggtaaccgtggtccgtgggcccttactcgatcgtgttcgctcacatccccggcttctacgctcctgcctgtagctagaatttttacaccccagccttttccttcctggtgtgtatcataggttcggataaatccgggcgaacggcgaagcttgttcgcctgtccgtgcgtgaagtaaagctgcgaggctgaaaggtgtgcgatttgtcattgtttgggaaacaagtgttcggataatgtgtgagcaaaggggaggaaagtggagatgaaaataataaaaggaaaaaaaaggtttcgaatttttctctatgtctctgtcgttttggttgagaaagcagaaaaggcgacagttgcctcgcaaattcgcaatggaa

SEQ ID NO: 40888 - DNA, 1465 bp, Zea Mays
atgaatgaccctgttaggtcccgtaaaacctctagcagatccttgaagacaaagaaaaacgttgaggaagtgagtaatcatgagaacttcatcatgcaacacctacgtgcttttgatataagtaggaagaaaacaacgaaatgcaaacgctatggcagtcaggtattacactcgatcttctgacgaaggctggcttttgcactgaatgtagaaagaaacgcaacgaaatccttgaagttcaacccatcaaccatacggagcaacctctgaagaaaaaaaaagatactcaaaaccatcactcgagatgagcaagacgttggttgaatcaactggagcagtacaccgtttgtcctggcagagctttgtcatgtaacttatggtatctagagacagtagcatgcctagtgttgtagccgtgtatcctatcggtcaagttgttatggcaagcacaactgacgctgttcttcagcaaggcagcagatacagaggaaacccaaccaagctttgcccagacccagatagtgcgactgatgtggatgaggccatgtttggcagagtttctagcaacttttgcttcccaagagagctcaaaatgcagaaggtccccaaacaggattgcttcttcaagcagacaaaagcaccaaaacctcaactgtatactgaaagtatagaagctcactcggagcagctttcccatgatgcatctccaggagatgatgcttatggaaaggctacagctcccctaaccatggccttaagctataattaaagtggcgagcagcttgtttgattagatgttttatttaccttccctttttttcgtttggtttcagattcacaagaggacaaaatggtttatattcagtagctctccgagggaatgttgtaaattggcagctctccgaggccagatatgcaaacaaaaaggaaaaggagggaagtacaataatctgtagcaacagcaccaatcccagaacagttgtactgtacataactgccagcataaattgacaatgaaatggaaaggtaatgggacatacaaaaaacaatcagctcagcctgaaaaaataaaaccacatgaaacttagcatgaacgagagggagcgggtagtgggaggcaccttggagagcgggttgagggagaactcggggatggagaggaactcgtcctcggagatgaagcccttggcgctgcggtccaactggcagaagcgctcgtacagcgacacgatctcctgctgcgagactgctcgagaatcaaatgaaacaccaacgattaattatctacacaatatgtatatatagtagatgtagagagaagaaaccaaattgtgggagagagagagaaacagaagggggccaaggatcggatcgtccatggggcgcgcggcgaggtagttacagaggtagctgcagtgctcctgcacctcctcgatgtcgtactgggtcagcatggacgacgcgt

SEQ ID NO: 40889 - DNA, 2320 bp, Zea Mays
ccgcacgcacggcacttcccagcgatttcctcgtcctctctctctctctctctctcgcgctccctctcccactcgacggaggagaaaggggggaaagcaatcggaagcgcgagccggcgagcgagatgggcgccgggagcagccgcgcggacgcgccgtcgcggcgccgggcgcgcctcggcctcggagggtgcttcgggacccgatcctcctcctccccagccgccgccgccgaagcgcacgacggcgggagcttcaccttggccgggtcctcctcctccagcgctatcgaggtacaatcagggcgaccagtacgtgccctgaattttcaggcttctctagctgctaaggatctccagatttccaccgcgtcaagtccaaggctgcattcctcttcaagtaccataagccatcacctcagattcaatcacctcaattgccatgaaaacaaggaagatggcctggggactgaaaatgctgaaacaagtggccttgaaagctcatctaggaaggctgtcatggttaggggaagtttcagtaatgaagctgttaatagtgatatgtcaggagaagggataagttttataggatcagagctggaaaatattcctagcacagtctccactaatgaaactggtggctcagccgctgaatctggtttgggcccctcattgatggcatctgaaaggatcatgtctgacttagaaggagaggtatctccgcaagggacctcatccacaactgccatgacaagtgaaagatcagatgtatctcaagctagcttaacatctatgtttcctaactcttcaattgcatcatctgtgattgtggaaccaatgccagatccaatctctaccagggcagatgtccccatattcagtgggccacatggtgagcctggagggagtatattacatgatgacatgatgagcattttctcaaatgacggtctaggacgctctagggattctagcagcagtgaaacaaggaggagtcacagaaggattctatgggacacgttttccaggcgtggctcaagaggttatccagaatttgatgctgatgacctcggattttacagcacatggctagaccttggtgatgacatttttgaagagttgggggaatcaagatattttcatcgcaggcgacatggttcgatcagaattagggagcatcgccgtgctgtttttgatagtggtaatgaacaaggcactgctgcatgtcctttggggattcatcaaactggccgatgcacatgtgattctttcttggttgctgaagaatctagtgcccgagcaagtatatcaagaattgtcatgttaactgaagcgttatttgaggtgttggatgaaattcaccgtcaacctgcatcactttcactttccatggtctctgttcaggctcctgaatctgtagtcaattcgttgccgtgcaagagctacaaaaagctagaggcaccccaacgcagtgatgatatggaacagtgccatatctgcctaactgaatatgaggatggagaccagatacgaattcttccttgcaagcacgagttccacctgcaatgtgttgacaaatggctgaaagaaatacacagggtgtgccctctgtgccgcggagacgtctgcgaagtcgcctcgtgaagaccttggcgctgccatcccttcctcacggcaccggcagatagcgcatcccccgcctgctccgttgttgaagctggtttggtcaggcaacggcgatcacgtcccgtcaatctgggcgtccctgccgaagagcgtggccagatcctgcgaccaatgcgtcgctgttcctgccatcaactttttaagataccgagactgtatatagctcttgtagcctctccgtgtatgacaacctgtacatatatatgtaaattctagattccaatgtccattattttgtcctacattcagatcttattctcgcagccctgatgctcaaactagctttaccagaatctgtcaacacctcttcaactataaaaaggtataattattgcagaatgaccccaaatatcagacgcttccgattaagagaattcgattcaaatctagaaaggcaacagctgaatcttttccaaataacagaattttatccaaatctagaaaggaacaaactgaaacatttgggtcacaaaaatactgatttattttggcaggggccgcgcggacgcgtaccccctcaatcacaaattatgacatccactctcccagttggggagatggtagatcagcgcatccaccaagtgcaatgtggaccactaatctagaccatgggtcttcttgaacacccatcgatc

SEQ ID NO: 40890 - DNA, 2629 bp, Zea Mays
gcacggcacttcccagcgatttcctcgtcctctctctctctctctctctcgcgctccctctcccactcgacggaggagaaaggggggaaagcaatcggaagcgcgagccggcgagcgagatgggcgccgggagcagccgcgcggacgcgccgtcgcggcgccgggcgcgcctcggcctcggagggtgcttcgggacccgatcctcctcctccccagccgccgccgccgaagcgcacgacggcgggagcttcaccttggccgggtcctcctcctccagcgctatcgaggtacaatcagggcgaccagtacgtgccctgaattttcaggcttctctagctgctaaggatctccagatttccaccgcgtcaagtccaaggctgcattcctcttcaagtaccataagccatcacctcagattcaatcacctcaattgccatgaaaacaaggaagatggcctggggactgaaaatgctgaaacaagtggccttgaaagctcatctaggaaggctgtcatggttaggggaagtttcagtaatgaagctgttaatagtgatatgtcaggagaagggataagttttataggatcagagctggaaaatattcctagcacagtctccactaatgaaactggtggctcagccgctgaatctggtttgggcccctcattgatggcatctgaaaggatcatgtctgacttagaaggagaggtatctccgcaagggacctcatccacaactgccatgacaagtgaaagatcagatgtatctcaagctagcttaacatctatgtttcctaactcttcaattgcatcatctgtgattgtggaaccaatgccagatccaatctctaccagggcagatgtccccatattcagtgggccacatggtgagcctggagggagtatattacatgatgacatgatgagcattttctcaaatgacggtctaggacgctctagggattctagcagcagtgaaacaaggaggagtcacagaaggattctatgggacacgttttccaggcgtggctcaagaggttatccagaatttgatgctgatgacctcggattttacagcacatggctagaccttggtgatgacatttttgaagagttgggggaatcaagatattttcatcgcaggcgacatggttcgatcagaattagggagcatcgccgtgctgtttttgatagtggtaatgaacaaggcactgctgcatgtcctttggggattcatcaaactggccgatgcacatgtgattctttcttggttgctgaagaatctagtgcccgagcaagtatatcaagaattgtcatgttaactgaagcgttatttgaggtgttggatgaaattcaccgtcaacctgcatcactttcactttccatggtctctgttcaggctcctgaatctgtagtcaattcgttgccgtgcaagagctacaaaaagctagaggcaccccaacgcagtgatgatatggaacagtgagcttctcatcattataacctctataaatttcctaagacgtatatattttgcagaagaaaacagatccataccgataagatttgtatcgtacattcttcattataattgtgagagttgatttgaaaggaaaacactttcctctaggatattttggtatctcaacagctgcgaccaccacgcacagtgtagctgcctgctggctagccctgttccttttgttttccactccccccaccccaccccacacacacagagacttttgggggtttctgagatgctgaatgtagcatatcattgttctttctcgtcaggtgccatatctgcctaactgaatatgaggatggagaccagatacgaattcttccttgcaagcacgagttccacctgcaatgtgttgacaaatggctgaaagaaatacacagggtgtgccctctgtgccgcggagacgtctgcgaagtcgcctcgtgaagaccttggcgctgccatcccttcctcacggcaccggcagatagcgcatcccccgcctgctccgttgttgaagctggtttggtcaggcaacggcgatcacgtcccgtcaatctgggcgtccctgccgaagagcgtggccagatcctgcgaccaatgcgtcgctgttcctgccatcaactttttaagataccgagactgtatatagctcttgtagcctctccgtgtatgacaacctgtacatatatatgtaaattctagattccaatgtccattattttgtcctacattcagatcttattctcgcagccctgatgctcaaactagctttaccagaatctgtcaacacctcttcaactataaaaaggtataattattgcagaatgaccccaaatatcagacgcttccgattaagagaattcgattcaaatctagaaaggcaacagctgaatcttttccaaataacagaattttatccaaatctagaaaggaacaaactgaaacatttgggtcacaaaaatactgatttattttggcaggggccgcgcggacgcgtaccccctcaatcacaaattatgacatccactctcccagttggggagatggtagatcagcgcatccaccaagtgcaatgtggaccactaatctagaccatgggtcttcttgaacacccatcgatc

SEQ ID NO: 40891 - DNA, 2171 bp, Zea Mays
gcacggcacttcccagcgatttcctcgtcctctctctctctctctctctcgcgctccctctcccactcgacggaggagaaaggggggaaagcaatcggaagcgcgagccggcgagcgagatgggcgccgggagcagccgcgcggacgcgccgtcgcggcgccgggcgcgcctcggcctcggagggtgcttcgggacccgatcctcctcctccccagccgccgccgccgaagcgcacgacggcgggagcttcaccttggccgggtcctcctcctccagcgctatcgaggtacaatcagggcgaccagtacgtgccctgaattttcaggcttctctagctgctaaggatctccagatttccaccgcgtcaagtccaaggctgcattcctcttcaagtaccataagccatcacctcagattcaatcacctcaattgccatgaaaacaaggaagatggcctggggactgaaaatgctgaaacaagtggccttgaaagctcatctaggaaggctgtcatggttaggggaagtttcagtaatgaagctgttaatagtgatatgtcaggagaagggataagttttataggatcagagctggaaaatattcctagcacagtctccactaatgaaactggtggctcagccgctgaatctggtttgggcccctcattgatggcatctgaaaggatcatgtctgacttagaaggagaggtatctccgcaagggacctcatccacaactgccatgacaagtgaaagatcagatgtatctcaagctagcttaacatctatgtttcctaactcttcaattgcatcatctgtgattgtggaaccaatgccagatccaatctctaccagggcagatgtccccatattcagtgggccacatggtgagcctggagggagtatattacatgatgacatgatgagcattttctcaaatgacggtctaggacgctctagggattctagcagcagtgaaacaaggaggagtcacagaaggattctatgggacacgttttccaggcgtggctcaagaggttatccagaatttgatgctgatgacctcggattttacagcacatggctagaccttggtgatgacatttttgaagagttgggggaatcaagatattttcatcgcaggcgacatggttcgatcagaattagggagcatcgccgtgctgtttttgatagtggtaatgaacaaggcactgctgcatgtcctttggggattcatcaaactggccgatgcacatgtgattctttcttggttgctgaagaatctagtgcccgagcaagtatatcaagaattgtcatgttaactgaagcgttatttgaggtgccatatctgcctaactgaatatgaggatggagaccagatacgaattcttccttgcaagcacgagttccacctgcaatgtgttgacaaatggctgaaagaaatacacagggtgtgccctctgtgccgcggagacgtctgcgaagtcgcctcgtgaagaccttggcgctgccatcccttcctcacggcaccggcagatagcgcatcccccgcctgctccgttgttgaagctggtttggtcaggcaacggcgatcacgtcccgtcaatctgggcgtccctgccgaagagcgtggccagatcctgcgaccaatgcgtcgctgttcctgccatcaactttttaagataccgagactgtatatagctcttgtagcctctccgtgtatgacaacctgtacatatatatgtaaattctagattccaatgtccattattttgtcctacattcagatcttattctcgcagccctgatgctcaaactagctttaccagaatctgtcaacacctcttcaactataaaaaggtataattattgcagaatgaccccaaatatcagacgcttccgattaagagaattcgattcaaatctagaaaggcaacagctgaatcttttccaaataacagaattttatccaaatctagaaaggaacaaactgaaacatttgggtcacaaaaatactgatttattttggcaggggccgcgcggacgcgtaccccctcaatcacaaattatgacatccactctcccagttggggagatggtagatcagcgcatccaccaagtgcaatgtggaccactaatctagaccatgggtcttcttgaacacccatcgatc

SEQ ID NO: 40892 - DNA, 2278 bp, Zea Mays
gcacggcacttcccagcgatttcctcgtcctctctctctctctctctctcgcgctccctctcccactcgacggaggagaaaggggggaaagcaatcggaagcgcgagccggcgagcgagatgggcgccgggagcagccgcgcggacgcgccgtcgcggcgccgggcgcgcctcggcctcggagggtgcttcgggacccgatcctcctcctccccagccgccgccgccgaagcgcacgacggcgggagcttcaccttggccgggtcctcctcctccagcgctatcgaggtacaatcagggcgaccagtacgtgccctgaattttcaggcttctctagctgctaaggatctccagatttccaccgcgtcaagtccaaggctgcattcctcttcaagtaccataagccatcacctcagattcaatcacctcaattgccatgaaaacaaggaagatggcctggggactgaaaatgctgaaacaagtggccttgaaagctcatctaggaaggctgtcatggttaggggaagtttcagtaatgaagctgttaatagtgatatgtcaggagaagggataagttttataggatcagagctggaaaatattcctagcacagtctccactaatgaaactggtggctcagccgctgaatctggtttgggcccctcattgatggcatctgaaaggatcatgtctgacttagaaggagaggtatctccgcaagggacctcatccacaactgccatgacaagtgaaagatcagatgtatctcaagctagcttaacatctatgtttcctaactcttcaattgcatcatctgtgattgtggaaccaatgccagatccaatctctaccagggcagatgtccccatattcagtgggccacatggtgagcctggagggagtatattacatgatgacatgatgagcattttctcaaatgacggtctaggacgctctagggattctagcagcagtgaaacaaggaggagtcacagaaggattctatgggacacgttttccaggcgtggctcaagaggttatccagaatttgatgctgatgacctcggattttacagcacatggctagaccttggtgatgacatttttgaagagttgggggaatcaagatattttcatcgcaggcgacatggttcgatcagagtaagccagtattcaagatcccggattagggagcatcgccgtgctgtttttgatagtggtaatgaacaaggcactgctgcatgtcctttggggattcatcaaactggccgatgcacatgtgattctttcttggttgctgaagaatctagtgcccgagcaagtatatcaagaattgtcatgttaactgaagcgttatttgaggctcctgaatctgtagtcaattcgttgccgtgcaagagctacaaaaagctagaggcaccccaacgcagtgatgatatggaacagtgccatatctgcctaactgaatatgaggatggagaccagatacgaattcttccttgcaagcacgagttccacctgcaatgtgttgacaaatggctgaaagaaatacacagggtgtgccctctgtgccgcggagacgtctgcgaagtcgcctcgtgaagaccttggcgctgccatcccttcctcacggcaccggcagatagcgcatcccccgcctgctccgttgttgaagctggtttggtcaggcaacggcgatcacgtcccgtcaatctgggcgtccctgccgaagagcgtggccagatcctgcgaccaatgcgtcgctgttcctgccatcaactttttaagataccgagactgtatatagctcttgtagcctctccgtgtatgacaacctgtacatatatatgtaaattctagattccaatgtccattattttgtcctacattcagatcttattctcgcagccctgatgctcaaactagctttaccagaatctgtcaacacctcttcaactataaaaaggtataattattgcagaatgaccccaaatatcagacgcttccgattaagagaattcgattcaaatctagaaaggcaacagctgaatcttttccaaataacagaattttatccaaatctagaaaggaacaaactgaaacatttgggtcacaaaaatactgatttattttggcaggggccgcgcggacgcgtaccccctcaatcacaaattatgacatccactctcccagttggggagatggtagatcagcgcatccaccaagtgcaatgtggaccactaatctagaccatgggtcttcttgaacacccatcgatc

SEQ ID NO: 40893 - DNA, 2107 bp, Zea Mays
gacagcttcccgctaggtggtgagattggagagcgtggggattagtctctgacgaggtacaatcagggcgaccagtacgtgccctgaattttcaggcttctctagctgctaaggatctccagatttccaccgcgtcaagtccaaggctgcattcctcttcaagtaccataagccatcacctcagattcaatcacctcaattgccatgaaaacaaggaagatggcctggggactgaaaatgctgaaacaagtggccttgaaagctcatctaggaaggctgtcatggttaggggaagtttcagtaatgaagctgttaatagtgatatgtcaggagaagggataagttttataggatcagagctggaaaatattcctagcacagtctccactaatgaaactggtggctcagccgctgaatctggtttgggcccctcattgatggcatctgaaaggatcatgtctgacttagaaggagaggtatctccgcaagggacctcatccacaactgccatgacaagtgaaagatcagatgtatctcaagctagcttaacatctatgtttcctaactcttcaattgcatcatctgtgattgtggaaccaatgccagatccaatctctaccagggcagatgtccccatattcagtgggccacatggtgagcctggagggagtatattacatgatgacatgatgagcattttctcaaatgacggtctaggacgctctagggattctagcagcagtgaaacaaggaggagtcacagaaggattctatgggacacgttttccaggcgtggctcaagaggttatccagaatttgatgctgatgacctcggattttacagcacatggctagaccttggtgatgacatttttgaagagttgggggaatcaagatattttcatcgcaggcgacatggttcgatcagagtaagccagtattcaagatcccggattagggagcatcgccgtgctgtttttgatagtggtaatgaacaaggcactgctgcatgtcctttggggattcatcaaactggccgatgcacatgtgattctttcttggttgctgaagaatctagtgcccgagcaagtatatcaagaattgtcatgttaactgaagcgttatttgaggtgttggatgaaattcaccgtcaacctgcatcactttcactttccatggtctctgttcaggctcctgaatctgtagtcaattcgttgccgtgcaagagctacaaaaagctagaggcaccccaacgcagtgatgatatggaacagtgccatatctgcctaactgaatatgaggatggagaccagatacgaattcttccttgcaagcacgagttccacctgcaatgtgttgacaaatggctgaaagaaatacacagggtgtgccctctgtgccgcggagacgtctgcgaagtcgcctcgtgaagaccttggcgctgccatcccttcctcacggcaccggcagatagcgcatcccccgcctgctccgttgttgaagctggtttggtcaggcaacggcgatcacgtcccgtcaatctgggcgtccctgccgaagagcgtggccagatcctgcgaccaatgcgtcgctgttcctgccatcaactttttaagataccgagactgtatatagctcttgtagcctctccgtgtatgacaacctgtacatatatatgtaaattctagattccaatgtccattattttgtcctacattcagatcttattctcgcagccctgatgctcaaactagctttaccagaatctgtcaacacctcttcaactataaaaaggtataattattgcagaatgaccccaaatatcagacgcttccgattaagagaattcgattcaaatctagaaaggcaacagctgaatcttttccaaataacagaattttatccaaatctagaaaggaacaaactgaaacatttgggtcacaaaaatactgatttattttggcaggggccgcgcggacgcgtaccccctcaatcacaaattatgacatccactctcccagttggggagatggtagatcagcgcatccaccaagtgcaatgtggaccactaatctagaccatgggtcttcttgaacacccatcgatc

SEQ ID NO: 40894 - DNA, 332 bp, Zea Mays
cgccaagatcgcaagattaagtaaacacaaatcacacaccaacatttgcagcggaaataaattctttattgcaaaatgattacatgttacaataagtttacattatacaattatcggagtgattacaaaagaaaatgattaaatagaattacaatttaaaatgtataaaatatttataagttttaaaatacatgttaacttaagtgacaatcctcaatagagaaactaaagacgggatatacttatagaagaaggccgagcccaccggcacttagcaccatccacaacagaacaaaattacaacctgaaaaacaacaaggaataaaaccctg

SEQ ID NO: 40895 - DNA, 812 bp, Zea Mays
tctccaaccacacgacatatgtagcacttaacccttgcatatgtcaactcgccaccaggtttctcaagaccagaacgggtccccgccaaccgagagctcagtaccccaccatccagcctcttgccaggtggatacacgatactctcgccatctctccactcccattgcgggccggtctttctggtattggtccagtcgaggctaagcttacccatgacgaggcatgtggccagttaaagggtcctagatcagcaggccaacaatcggaacggtccttaagcgacacagacgggcgacctttcctgctcaaagtttggtctcatattaagttatttctgaaaacctggtacctgccagaggtaccctactgaaatgatgaagtcatcaaggcctttgataccttcatcactctagcctcttttctttataaaaacatgattcatagatcaaaacattttgttcttagtctatgagcatactaagcacatctagctttttaaaacaggtatcaaggatggtaatcaatatttcaagaaagttatgcaacaaaggtttaatcattcaactcctaccacctaatgcatcatataagtgataaaagtttaaaaacagtaaggaggtggcaaatgcaccggggcttgcctgagataacactaagttagtgttgttagatgacatccgattagggagcatctctcgtcctggtacttgaccagatcatccaagcttcaggttcgttcaccagcatcattttgggatcaactcggctcttgtcgtccacatcacgtgatcaattagcgaatctgaatgat

SEQ ID NO: 40896 - DNA, 647 bp, Zea Mays
  misc_feature (646)..(647): n is a, c, g, or t
aaactctatcctttatgattaaataacacaatcatatcaatgcatatatattcaccaagcatatttcatacaatatatcatcacacctatcactagacaagagaatcatcgatcatatcctaatcaatccaccatacacgctaactagtgaggatagcctaagagctcaccatgactaaagttgactcgatcggcactaaacgaccacgacagccgattcaatcctttcacccagcagctagtaagcgacggacgtgctatgtttcttcttcacccagattccacggatttcgctccgagggtcgatggtgtcgtggatgggctgcacaaaataccaaacatcccacgacgctaatagggttgtccatgacacggtactccacttggacattttatcaaacaccatacgggtgcggatggtgcgggatatggtgcgggattaccggaggatgtccggcagcgaggggctgctacagataagtgcgcaaccgtgggaaaaacagagaggcgctgacctgctgcaggaaaggaggcggtctgcaggcacgaccaagttgaaaccgagcaaaggatgggcgagctcggactgacgacgaactccatgacagggggataggaacggcgagaagggagggcgctggacagnn

SEQ ID NO: 40897 - DNA, 5984 bp, Zea Mays
ctctattacgcccttcccaccacacttgacccatcgccgtcatcccagtccacgcccacgcccacgcccacgcccacgccgacccacccgcatccctccctcgcctccaccgcagcgatgtcgggctgggacgagggcgccgtgttctacagcgaccaggcgcagttcccccgcggcggccccggcggcgacccagccgccgacctcacccgccactccgcccttcgcaagttcaaggagttcctccgcggtttcaccggccccaccggcgacttcccttaccgcgagagcctagtacacaaccgcgaccatgtcaccgtcgccactgaggacctcgacgccttcgatgccgagctctctgacaagatccgcaagtcgcctgccgattatcttcctttgttcgagacggctgcgtccgaggttctcgcaagcctccgttcgaaagtcgccggcgagaccggggagatggaggagccagtcccaggagatgtccagatctttctctcctccaaggagaactgcctgtccatgagatctgtcggggcggattacatgtcgaagctggttaagattgcgggaatcacaattgctgcatcgagagtaaaagccaaagccactcatgtaactcttatatgcaagaattgccggagtgtgaggacagtgccttgcaggccaggcctcggcggggctatcgttccacgttcgtgtgaccatgttcctcagcctggagaagagccatgccccctggatccttggattgctgtcccggataagagcaagtatgtggatctccagaccctcaaattgcaagaaaatcctgaggatgttccaacaggtgagcttccaaggaatatgctgctttctgtagatagacacctagttcagactatcgttccagggaccagattaactgtcgttggcatctacagcgtgtaccaagcttccacaacccagaagggtgcagttggtgttaaacagccttacattagagttgtgggtttggagcaatctcgagacaataactcaaacggtccctcaaattttactctcgatgaggaaatggaattcaaagaatttgcacagaggccagatgcatatgccaagctctgctcaatgattggtccttcaatttatggtcattctgatgtcaagaaagctattgcatgcttgttatttggggggtctaagaagaggctacctgatggtgtacgtttgagaggggacattcatgtcttgcttctgggtgacccatccacagcaaaatcacagagaagactgcccctattgcagtctatacatctggcaaaggttcatctgcagctggtcttacagcatctgtaactcgggatagtagctcgcgcgagttttatttggaaggaggagccatggttttggctgatggtggagtagtttgtatcgatgaatttgacaagatgcgacctgaagacagagtggcgattcatgaggccatggagcagcagacaatatctattgccaaagctggcattacaacagtactcaattcaaggacttcagttcttgcagctgccaatccaattgcaggacgctatgatgatcttaagactgcacaagataatattgatctacagaccaccattctttctagatttgatcaaatctttattgtcaaagatatcagaatgtatgaccaagataagcgaatagcaagccacattatcaaggtgcatgccagtggtgcagcagcgtcatccgcaaacacagagggaagtgaaggagagaattggcttaaaaggtacattcagtactgccgtgcaacatgcaaaccacggctttcagaaaaagcagctgagatgctgcagaacaaatatatcgagattagacagaaaatgaggcagcaagctcacgagacagggagggctgcagcaatacccatcactgtgaggcagcttgaagccatcatacgtttgagtgaatctcttgcaaagatgagattgacaagcgtggctacaccagagcatgtcgaagaggcattcagactgttcaatgtctccaccgtcgacgctgcgagatccggaatcaacgagcatttgaacctgtcgccggagatcgcaaatgaaatcaagcaagcggaagcacagataaagcgaagaatgggcattggaagccacatatctgagcgacggctgattgatggactaaacaggatgggaatgaacgaatccattgtgagaagagctcttctgattatgcatcaaagagacgaggtggagtacaagagagagcgccatgtgatcgtccggaaggcttgatgtggagagtccagtcagactcattcatggcatacaacgaacgttcatggcgtcctctcctcagacgcgtccataccttcactgagactgcacatctgtccgtcctgaggggacgagacacgccttagttggtctctgacatgactgactgttgtaatcagcaaacggcttgagcatgtaggctctgtttttgaagtgaccaaaggttctgattgaacctgtagtgtgccgtgtaactggtcaatcaattctgaaatgcaaaatttgtgttcttcgtcaccgggagcaggacatgcaatgtgtggagctgagtagtaacatatactccaatattcatacatacatgctttcaccaagacacgctgtgggcattcacagggaggaagtggtgattgctacaacgacacgccatgaattcaggaagagtttacaggagcaacttacaaggagggaggaggacagttacaaatcttcccggtgaaaatgaaaatacgaacgaatctttacaaatatatatatgtgtgtggtttgtatttgtctgcaaaaaaaagcaaataaaaaaactgagtcgagtttacacggtgtagctctgctgaatggtgtcaatgtcgaggcccttgagcttgacgacggactcgacgtgtcccttgagcgtgtgcagctccctgagcctggccacctcggcgcgcttggccgcctgctcggcgagctccgacagctcgcggtagccctggttgtcgccgaagaggtcggaggtggcggtggcctggttgaggccgtgcagcgtcctctgtgccgtggcccactgcgcctctcgctcgcccttgccgtagtcggtgcggttggtgaaggccgtcttgttgttgatgttgttccaggccttgccggagagcgcgtagcggatggcgaacttgagcacgtccagcgggaagtaggtgacgacgctgaacgcccagatggcgccgccccagccccagccgatgccctgcatcttgcagaactcccagttggcgtacacggcgatgcacgtcgccaccagctgcgccgccaggaaggcgatcaccagcagcgcgccgggccgctccacgaaggaccagctccgggaccgggtcacgaagatgagcgcctggctgatgatgctcacttgcaggtacagcgccgccatcagctccttgtcgttctccttgatggaccgcacgccgaaggcgttggtgaagaagtcggtgtcgtgcgccaggtagaagaagagcgccgtggcgagcgccatgtaggtccctagcacgatgcccgtggcgaagatctccttgagcttccacgagtcgggcgtcggcgacggcttcacgcggtccttggagatggtcatgatggtgccgtcgttgaggatggcaatgatgagcaccatgaagggcgcgaagtcgaacttccagaccagcgcgacgagcaggaagcccagcacgatgcggatggtgatggacacggcgtagatggtgtagttcttcatgcgctggaagatggcgcggctggtgagcacggcgctcacgatcacgctcagcccgggctccgtcagcacgatgtccgacgcgctccgggccgcgtccgtcgcgtcgtccaccgcgatgccgatgtccgccttcttcagcgccggcgcgtcgttcacgccgtccccggtcatgccgcagatgtgcttccggtcctgcagccgcttcacgatctcgtacttgtgctccgggaacacccccgcgaacccgtcggccttctcgatcagctcgtcgatgttcaggccgcccatctcgccggtcttgttgtcgcccagcagggtggtggacgggtacatgttgctgcccatgcccaggcgccgcgccgtctccttgccgatggccagctggtcgccggtgatcatcttcacgttcacgcccaggtggagcgcgcggcggatggtctccgcgctgtcgtgccgcggcgggtcgaacagcgggaggagaccgatgaactgccacggctcgccggcgctctccttgctcttctcggggaccagctggtacgacacgcccagggagcggaggccgcggtcggcgtagccgtcgatgagggcgtggatcttcttctcggcatccttgctcatccggcacagctcgatgatctgctcgggggcgcccttgctgaccctgtgccagtcgccgttgccgtcgatgtaggtgatggccgtgcgcttctcaaccgggttgaaggggaggaagtggacctccttgatgccggcgcgggcctccttggggtcggcgagcatgccgacgatgcaggtgtcgatggcgtcctggttctcgacgcgggaggccctggcggcgtagaggagcaccatgtccttgtcgacgcccttgccgcacacctcgatgagggtcttgtcgacggtgagcttgttgagggtgagggtgccggtcttgtcgctgcagagcacgtccatgccggccatctcctcgatggcggtcatgcgcttggtgatggcgccctgctgggacaggcggtgggagccgatggccatggtgacggagagcacggtgggcatggcgatggggatgccgccgatgagcaggacgaggaggttgtcgatgccatcgcggtacgcgcggtgctgaatcgggtacatgacgatgatctcgatgaccatcccgacggcaatggagatgatgcagaagttgccgatggccgtgagcacgagctggaagtggcccacgttgttggtgctgtccaccaggtgcgccgccttgccgaagaaggtgtgcacgccggtggcgatgacgacggcctcgatctcgccctgcttgactgtggagcccgagaagaccccctggcccgggtgcttgttcacgggcagcgactcgcccgtgagcgccgcctggtcaaccttgagcgggtcgccctccagcagcctggcgtcggcgggaatgatgtcacccagcttgatgctgatgatgtccccgggcacgaggatggacgcctcctcttccttccacttgccgtccctgagcaccttggttttgggcgcgaggcccgccatgagcgcggccgccgcgttgccggcgttgttctcctcgatgaagctgatggtggagttgatgaagaggaggacgacgatgccgacgaagtcctgccagtcgggcggcttgcccccgccgttggcgagcacgatggccatgatggcggcggcctccatgacccaggagagcgggttccacatgaagcccaggaacttgagcagcttgctctccgacttctcctccagcttgttgggcccgaagatcttgagccgattgtctccctcggcgctggagagcccctccttgctgcatttcaggtgctggaacacctcctgcaccgggacggtctcctgcacgcgtggcggacggcgggtggtggtgatagcagcagcaagcagtcagaggaagacatatatacacagcaaagaaggggggaaataaaggagcgctagctgccacgaattaatccaaggcaacccatggcggctcgagatgcgggcgggtaggcgtacgaggtcgacggtctcgttgcggacgtcctcgagggagatggacgccattgtcgtttattagtcgacgccgctgctagctaattgtggtggtcggcgtcgtgcggtggtggcggccggcgcgcgcgcggcggacccgaggaccggggagg

SEQ ID NO: 40898 - DNA, 5990 bp, Zea Mays
ctctattacgcccttcccaccacacttgacccatcgccgtcatcccagtccacgcccacgcccacgcccacgcccacgccgacccacccgcatccctccctcgcctccaccgcagcgatgtcgggctgggacgagggcgccgtgttctacagcgaccaggcgcagttcccccgcggcggccccggcggcgacccagccgccgacctcacccgccactccgcccttcgcaagttcaaggagttcctccgcggtttcaccggccccaccggcgacttcccttaccgcgagagcctagtacacaaccgcgaccatgtcaccgtcgccactgaggacctcgacgccttcgatgccgagctctctgacaagatccgcaagtcgcctgccgattatcttcctttgttcgagacggctgcgtccgaggttctcgcaagcctccgttcgaaagtcgccggcgagaccggggagatggaggagccagtcccaggagatgtccagatctttctctcctccaaggagaactgcctgtccatgagatctgtcggggcggattacatgtcgaagctggttaagattgcgggaatcacaattgctgcatcgagagtaaaagccaaagccactcatgtaactcttatatgcaagaattgccggagtgtgaggacagtgccttgcaggccaggcctcggcggggctatcgttccacgttcgtgtgaccatgttcctcagcctggagaagagccatgccccctggatccttggattgctgtcccggataagagcaagtatgtggatctccagaccctcaaattgcaagaaaatcctgaggatgttccaacaggtgagcttccaaggaatatgctgctttctgtagatagacacctagttcagactatcgttccagggaccagattaactgtcgttggcatctacagcgtgtaccaagcttccacaacccagaagggtgcagttggtgttaaacagccttacattagagttgtgggtttggagcaatctcgagacaataactcaaacggtccctcaaattttactctcgatgaggaaatggaattcaaagaatttgcacagaggccagatgcatatgccaagctctgctcaatgattggtccttcaatttatggtcattctgatgtcaagaaagctattgcatgcttgttatttggggggtctaagaagaggctacctgatggtgtacgtttgagaggggacattcatgtcttgcttctgggtgacccatccacagcaaaatcacagttcctcaaatttgtagagaagactgcccctattgcagtctatacatctggcaaaggttcatctgcagctggtcttacagcatctgtaactcgggatagtagctcgcgcgagttttatttggaaggaggagccatggttttggctgatggtggagtagtttgtatcgatgaatttgacaagatgcgacctgaagacagagtggcgattcatgaggccatggagcagcagacaatatctattgccaaagctggcattacaacagtactcaattcaaggacttcagttcttgcagctgccaatccaattgcaggacgctatgatgatcttaagactgcacaagataatattgatctacagaccaccattctttctagatttgatcaaatctttattgtcaaagatatcagaatgtatgaccaagataagcgaatagcaagccacattatcaaggtgcatgccagtggtgcagcagcgtcatccgcaaacacagagggaagtgaaggagagaattggcttaaaagtactgccgtgcaacatgcaaaccacggctttcagaaaaagcagctgagatgctgcagaacaaatatatcgagattagacagaaaatgaggcagcaagctcacgagacagggagggctgcagcaatacccatcactgtgaggcagcttgaagccatcatacgtttgagtgaatctcttgcaaagatgagattgacaagcgtggctacaccagagcatgtcgaagaggcattcagactgttcaatgtctccaccgtcgacgctgcgagatccggaatcaacgagcatttgaacctgtcgccggagatcgcaaatgaaatcaagcaagcggaagcacagataaagcgaagaatgggcattggaagccacatatctgagcgacggctgattgatggactaaacaggatgggaatgaacgaatccattgtgagaagagctcttctgattatgcatcaaagagacgaggtggagtacaagagagagcgccatgtgatcgtccggaaggcttgatgtggagagtccagtcagactcattcatggcatacaacgaacgttcatggcgtcctctcctcagacgcgtccataccttcactgagactgcacatctgtccgtcctgaggggacgagacacgccttagttggtctctgacatgactgactgttgtaatcagcaaacggcttgagcatgtaggctctgtttttgaagtgaccaaaggttctgattgaacctgtagtgtgccgtgtaactggtcaatcaattctgaaatgcaaaatttgtgttcttcgtcaccgggagcaggacatgcaatgtgtggagctgagtagtaacatatactccaatattcatacatacatgctttcaccaagacacgctgtgggcattcacagggaggaagtggtgattgctacaacgacacgccatgaattcaggaagagtttacaggagcaacttacaaggagggaggaggacagttacaaatcttcccggtgaaaatgaaaatacgaacgaatctttacaaatatatatatgtgtgtggtttgtatttgtctgcaaaaaaaagcaaataaaaaaactgagtcgagtttacacggtgtagctctgctgaatggtgtcaatgtcgaggcccttgagcttgacgacggactcgacgtgtcccttgagcgtgtgcagctccctgagcctggccacctcggcgcgcttggccgcctgctcggcgagctccgacagctcgcggtagccctggttgtcgccgaagaggtcggaggtggcggtggcctggttgaggccgtgcagcgtcctctgtgccgtggcccactgcgcctctcgctcgcccttgccgtagtcggtgcggttggtgaaggccgtcttgttgttgatgttgttccaggccttgccggagagcgcgtagcggatggcgaacttgagcacgtccagcgggaagtaggtgacgacgctgaacgcccagatggcgccgccccagccccagccgatgccctgcatcttgcagaactcccagttggcgtacacggcgatgcacgtcgccaccagctgcgccgccaggaaggcgatcaccagcagcgcgccgggccgctccacgaaggaccagctccgggaccgggtcacgaagatgagcgcctggctgatgatgctcacttgcaggtacagcgccgccatcagctccttgtcgttctccttgatggaccgcacgccgaaggcgttggtgaagaagtcggtgtcgtgcgccaggtagaagaagagcgccgtggcgagcgccatgtaggtccctagcacgatgcccgtggcgaagatctccttgagcttccacgagtcgggcgtcggcgacggcttcacgcggtccttggagatggtcatgatggtgccgtcgttgaggatggcaatgatgagcaccatgaagggcgcgaagtcgaacttccagaccagcgcgacgagcaggaagcccagcacgatgcggatggtgatggacacggcgtagatggtgtagttcttcatgcgctggaagatggcgcggctggtgagcacggcgctcacgatcacgctcagcccgggctccgtcagcacgatgtccgacgcgctccgggccgcgtccgtcgcgtcgtccaccgcgatgccgatgtccgccttcttcagcgccggcgcgtcgttcacgccgtccccggtcatgccgcagatgtgcttccggtcctgcagccgcttcacgatctcgtacttgtgctccgggaacacccccgcgaacccgtcggccttctcgatcagctcgtcgatgttcaggccgcccatctcgccggtcttgttgtcgcccagcagggtggtggacgggtacatgttgctgcccatgcccaggcgccgcgccgtctccttgccgatggccagctggtcgccggtgatcatcttcacgttcacgcccaggtggagcgcgcggcggatggtctccgcgctgtcgtgccgcggcgggtcgaacagcgggaggagaccgatgaactgccacggctcgccggcgctctccttgctcttctcggggaccagctggtacgacacgcccagggagcggaggccgcggtcggcgtagccgtcgatgagggcgtggatcttcttctcggcatccttgctcatccggcacagctcgatgatctgctcgggggcgcccttgctgaccctgtgccagtcgccgttgccgtcgatgtaggtgatggccgtgcgcttctcaaccgggttgaaggggaggaagtggacctccttgatgccggcgcgggcctccttggggtcggcgagcatgccgacgatgcaggtgtcgatggcgtcctggttctcgacgcgggaggccctggcggcgtagaggagcaccatgtccttgtcgacgcccttgccgcacacctcgatgagggtcttgtcgacggtgagcttgttgagggtgagggtgccggtcttgtcgctgcagagcacgtccatgccggccatctcctcgatggcggtcatgcgcttggtgatggcgccctgctgggacaggcggtgggagccgatggccatggtgacggagagcacggtgggcatggcgatggggatgccgccgatgagcaggacgaggaggttgtcgatgccatcgcggtacgcgcggtgctgaatcgggtacatgacgatgatctcgatgaccatcccgacggcaatggagatgatgcagaagttgccgatggccgtgagcacgagctggaagtggcccacgttgttggtgctgtccaccaggtgcgccgccttgccgaagaaggtgtgcacgccggtggcgatgacgacggcctcgatctcgccctgcttgactgtggagcccgagaagaccccctggcccgggtgcttgttcacgggcagcgactcgcccgtgagcgccgcctggtcaaccttgagcgggtcgccctccagcagcctggcgtcggcgggaatgatgtcacccagcttgatgctgatgatgtccccgggcacgaggatggacgcctcctcttccttccacttgccgtccctgagcaccttggttttgggcgcgaggcccgccatgagcgcggccgccgcgttgccggcgttgttctcctcgatgaagctgatggtggagttgatgaagaggaggacgacgatgccgacgaagtcctgccagtcgggcggcttgcccccgccgttggcgagcacgatggccatgatggcggcggcctccatgacccaggagagcgggttccacatgaagcccaggaacttgagcagcttgctctccgacttctcctccagcttgttgggcccgaagatcttgagccgattgtctccctcggcgctggagagcccctccttgctgcatttcaggtgctggaacacctcctgcaccgggacggtctcctgcacgcgtggcggacggcgggtggtggtgatagcagcagcaagcagtcagaggaagacatatatacacagcaaagaaggggggaaataaaggagcgctagctgccacgaattaatccaaggcaacccatggcggctcgagatgcgggcgggtaggcgtacgaggtcgacggtctcgttgcggacgtcctcgagggagatggacgccattgtcgtttattagtcgacgccgctgctagctaattgtggtggtcggcgtcgtgcggtggtggcggccggcgcgcgcgcggcggacccgaggaccggggagg

SEQ ID NO: 40899 - DNA, 5959 bp, Zea Mays
ctctattacgcccttcccaccacacttgacccatcgccgtcatcccagtccacgcccacgcccacgcccacgcccacgccgacccacccgcatccctccctcgcctccaccgcagcgatgtcgggctgggacgagggcgccgtgttctacagcgaccaggcgcagttcccccgcggcggccccggcggcgacccagccgccgacctcacccgccactccgcccttcgcaagttcaaggagttcctccgcggtttcaccggccccaccggcgacttcccttaccgcgagagcctagtacacaaccgcgaccatgtcaccgtcgccactgaggacctcgacgccttcgatgccgagctctctgacaagatccgcaagtcgcctgccgattatcttcctttgttcgagacggctgcgtccgaggttctcgcaagcctccgttcgaaagtcgccggcgagaccggggagatggaggagccagtcccaggagatgtccagatctttctctcctccaaggagaactgcctgtccatgagatctgtcggggcggattacatgtcgaagctggttaagattgcgggaatcacaattgctgcatcgagagtaaaagccaaagccactcatgtaactcttatatgcaagaattgccggagtgtgaggacagtgccttgcaggccaggcctcggcggggctatcgttccacgttcgtgtgaccatgttcctcagcctggagaagagccatgccccctggatccttggattgctgtcccggataagagcaagtatgtggatctccagaccctcaaattgcaagaaaatcctgaggtgagcttccaaggaatatgctgctttctgtagatagacacctagttcagactatcgttccagggaccagattaactgtcgttggcatctacagcgtgtaccaagcttccacaacccagaagggtgcagttggtgttaaacagccttacattagagttgtgggtttggagcaatctcgagacaataactcaaacggtccctcaaattttactctcgatgaggaaatggaattcaaagaatttgcacagaggccagatgcatatgccaagctctgctcaatgattggtccttcaatttatggtcattctgatgtcaagaaagctattgcatgcttgttatttggggggtctaagaagaggctacctgatggtgtacgtttgagaggggacattcatgtcttgcttctgggtgacccatccacagcaaaatcacagttcctcaaatttgtagagaagactgcccctattgcagtctatacatctggcaaaggttcatctgcagctggtcttacagcatctgtaactcgggatagtagctcgcgcgagttttatttggaaggaggagccatggttttggctgatggtggagtagtttgtatcgatgaatttgacaagatgcgacctgaagacagagtggcgattcatgaggccatggagcagcagacaatatctattgccaaagctggcattacaacagtactcaattcaaggacttcagttcttgcagctgccaatccaattgcaggacgctatgatgatcttaagactgcacaagataatattgatctacagaccaccattctttctagatttgatcaaatctttattgtcaaagatatcagaatgtatgaccaagataagcgaatagcaagccacattatcaaggtgcatgccagtggtgcagcagcgtcatccgcaaacacagagggaagtgaaggagagaattggcttaaaaggtacattcagtactgccgtgcaacatgcaaaccacggctttcagaaaaagcagctgagatgctgcagaacaaatatatcgagattagacagggagggctgcagcaatacccatcactgtgaggcagcttgaagccatcatacgtttgagtgaatctcttgcaaagatgagattgacaagcgtggctacaccagagcatgtcgaagaggcattcagactgttcaatgtctccaccgtcgacgctgcgagatccggaatcaacgagcatttgaacctgtcgccggagatcgcaaatgaaatcaagcaagcggaagcacagataaagcgaagaatgggcattggaagccacatatctgagcgacggctgattgatggactaaacaggatgggaatgaacgaatccattgtgagaagagctcttctgattatgcatcaaagagacgaggtggagtacaagagagagcgccatgtgatcgtccggaaggcttgatgtggagagtccagtcagactcattcatggcatacaacgaacgttcatggcgtcctctcctcagacgcgtccataccttcactgagactgcacatctgtccgtcctgaggggacgagacacgccttagttggtctctgacatgactgactgttgtaatcagcaaacggcttgagcatgtaggctctgtttttgaagtgaccaaaggttctgattgaacctgtagtgtgccgtgtaactggtcaatcaattctgaaatgcaaaatttgtgttcttcgtcaccgggagcaggacatgcaatgtgtggagctgagtagtaacatatactccaatattcatacatacatgctttcaccaagacacgctgtgggcattcacagggaggaagtggtgattgctacaacgacacgccatgaattcaggaagagtttacaggagcaacttacaaggagggaggaggacagttacaaatcttcccggtgaaaatgaaaatacgaacgaatctttacaaatatatatatgtgtgtggtttgtatttgtctgcaaaaaaaagcaaataaaaaaactgagtcgagtttacacggtgtagctctgctgaatggtgtcaatgtcgaggcccttgagcttgacgacggactcgacgtgtcccttgagcgtgtgcagctccctgagcctggccacctcggcgcgcttggccgcctgctcggcgagctccgacagctcgcggtagccctggttgtcgccgaagaggtcggaggtggcggtggcctggttgaggccgtgcagcgtcctctgtgccgtggcccactgcgcctctcgctcgcccttgccgtagtcggtgcggttggtgaaggccgtcttgttgttgatgttgttccaggccttgccggagagcgcgtagcggatggcgaacttgagcacgtccagcgggaagtaggtgacgacgctgaacgcccagatggcgccgccccagccccagccgatgccctgcatcttgcagaactcccagttggcgtacacggcgatgcacgtcgccaccagctgcgccgccaggaaggcgatcaccagcagcgcgccgggccgctccacgaaggaccagctccgggaccgggtcacgaagatgagcgcctggctgatgatgctcacttgcaggtacagcgccgccatcagctccttgtcgttctccttgatggaccgcacgccgaaggcgttggtgaagaagtcggtgtcgtgcgccaggtagaagaagagcgccgtggcgagcgccatgtaggtccctagcacgatgcccgtggcgaagatctccttgagcttccacgagtcgggcgtcggcgacggcttcacgcggtccttggagatggtcatgatggtgccgtcgttgaggatggcaatgatgagcaccatgaagggcgcgaagtcgaacttccagaccagcgcgacgagcaggaagcccagcacgatgcggatggtgatggacacggcgtagatggtgtagttcttcatgcgctggaagatggcgcggctggtgagcacggcgctcacgatcacgctcagcccgggctccgtcagcacgatgtccgacgcgctccgggccgcgtccgtcgcgtcgtccaccgcgatgccgatgtccgccttcttcagcgccggcgcgtcgttcacgccgtccccggtcatgccgcagatgtgcttccggtcctgcagccgcttcacgatctcgtacttgtgctccgggaacacccccgcgaacccgtcggccttctcgatcagctcgtcgatgttcaggccgcccatctcgccggtcttgttgtcgcccagcagggtggtggacgggtacatgttgctgcccatgcccaggcgccgcgccgtctccttgccgatggccagctggtcgccggtgatcatcttcacgttcacgcccaggtggagcgcgcggcggatggtctccgcgctgtcgtgccgcggcgggtcgaacagcgggaggagaccgatgaactgccacggctcgccggcgctctccttgctcttctcggggaccagctggtacgacacgcccagggagcggaggccgcggtcggcgtagccgtcgatgagggcgtggatcttcttctcggcatccttgctcatccggcacagctcgatgatctgctcgggggcgcccttgctgaccctgtgccagtcgccgttgccgtcgatgtaggtgatggccgtgcgcttctcaaccgggttgaaggggaggaagtggacctccttgatgccggcgcgggcctccttggggtcggcgagcatgccgacgatgcaggtgtcgatggcgtcctggttctcgacgcgggaggccctggcggcgtagaggagcaccatgtccttgtcgacgcccttgccgcacacctcgatgagggtcttgtcgacggtgagcttgttgagggtgagggtgccggtcttgtcgctgcagagcacgtccatgccggccatctcctcgatggcggtcatgcgcttggtgatggcgccctgctgggacaggcggtgggagccgatggccatggtgacggagagcacggtgggcatggcgatggggatgccgccgatgagcaggacgaggaggttgtcgatgccatcgcggtacgcgcggtgctgaatcgggtacatgacgatgatctcgatgaccatcccgacggcaatggagatgatgcagaagttgccgatggccgtgagcacgagctggaagtggcccacgttgttggtgctgtccaccaggtgcgccgccttgccgaagaaggtgtgcacgccggtggcgatgacgacggcctcgatctcgccctgcttgactgtggagcccgagaagaccccctggcccgggtgcttgttcacgggcagcgactcgcccgtgagcgccgcctggtcaaccttgagcgggtcgccctccagcagcctggcgtcggcgggaatgatgtcacccagcttgatgctgatgatgtccccgggcacgaggatggacgcctcctcttccttccacttgccgtccctgagcaccttggttttgggcgcgaggcccgccatgagcgcggccgccgcgttgccggcgttgttctcctcgatgaagctgatggtggagttgatgaagaggaggacgacgatgccgacgaagtcctgccagtcgggcggcttgcccccgccgttggcgagcacgatggccatgatggcggcggcctccatgacccaggagagcgggttccacatgaagcccaggaacttgagcagcttgctctccgacttctcctccagcttgttgggcccgaagatcttgagccgattgtctccctcggcgctggagagcccctccttgctgcatttcaggtgctggaacacctcctgcaccgggacggtctcctgcacgcgtggcggacggcgggtggtggtgatagcagcagcaagcagtcagaggaagacatatatacacagcaaagaaggggggaaataaaggagcgctagctgccacgaattaatccaaggcaacccatggcggctcgagatgcgggcgggtaggcgtacgaggtcgacggtctcgttgcggacgtcctcgagggagatggacgccattgtcgtttattagtcgacgccgctgctagctaattgtggtggtcggcgtcgtgcggtggtggcggccggcgcgcgcgcggcggacccgaggaccggggagg

SEQ ID NO: 40900 - DNA, 6207 bp, Zea Mays
ctctattacgcccttcccaccacacttgacccatcgccgtcatcccagtccacgcccacgcccacgcccacgcccacgccgacccacccgcatccctccctcgcctccaccgcagcgatgtcgggctgggacgagggcgccgtgttctacagcgaccaggcgcagttcccccgcggcggccccggcggcgacccagccgccgacctcacccgccactccgcccttcgcaagttcaaggagttcctccgcggtttcaccggccccaccggcgacttcccttaccgcgagagcctagtacacaaccgcgaccatgtcaccgtcgccactgaggacctcgacgccttcgatgccgagctctctgacaagatccgcaagtcgcctgccgattatcttcctttgttcgagacggctgcgtccgaggttctcgcaagcctccgttcgaaagtcgccggcgagaccggggagatggaggagccagtcccaggagatgtccagatctttctctcctccaaggagaactgcctgtccatgagatctgtcggggcggattacatgtcgaagctggttaagattgcgggaatcacaattgctgcatcgagagtaaaagccaaagccactcatgtaactcttatatgcaagaattgccggagtgtgaggacagtgccttgcaggccaggcctcggcggggctatcgttccacgttcgtgtgaccatgttcctcagcctggagaagagccatgccccctggatccttggattgctgtcccggataagagcaagtatgtggatctccagaccctcaaattgcaagaaaatcctgaggatgttccaacaggtgagcttccaaggaatatgctgctttctgtagatagacacctagttcagactatcgttccagggaccagattaactgtcgttggcatctacagcgtgtaccaagcttccacaacccagaagggtgcagttggtgttaaacagccttacattagagttgtgggtttggagcaatctcgagacaataactcaaacggtccctcaaattttactctcgatgaggaaatggaattcaaagaatttgcacagaggccagatgcatatgccaagctctgctcaatgattggtccttcaatttatggtcattctgatgtcaagaaagctattgcatgcttgttatttggggggtctaagaagaggctacctgatggtgtacgtttgagaggggacattcatgtcttgcttctgggtgacccatccacagcaaaatcacaggcaagtattgtttggcgttatcatagcattcagtttgatggaaaaataatgtgccaataagacttatgtcatataacttgtgcattgggatcatgtgaattgtactgtaagtcagtttgagtattttgacactattgtacaacaatcatttttttctatttaaaaccaaggtctctggttcagtggcactaatgcgtgtttcaacagttcctcaaatttgtagagaagactgcccctattgcagtctatacatctggcaaaggttcatctgcagctggtcttacagcatctgtaactcgggatagtagctcgcgcgagttttatttggaaggaggagccatggttttggctgatggtggagtagtttgtatcgatgaatttgacaagatgcgacctgaagacagagtggcgattcatgaggccatggagcagcagacaatatctattgccaaagctggcattacaacagtactcaattcaaggacttcagttcttgcagctgccaatccaattgcaggacgctatgatgatcttaagactgcacaagataatattgatctacagaccaccattctttctagatttgatcaaatctttattgtcaaagatatcagaatgtatgaccaagataagcgaatagcaagccacattatcaaggtgcatgccagtggtgcagcagcgtcatccgcaaacacagagggaagtgaaggagagaattggcttaaaaggtacattcagtactgccgtgcaacatgcaaaccacggctttcagaaaaagcagctgagatgctgcagaacaaatatatcgagattagacagaaaatgaggcagcaagctcacgagacagggagggctgcagcaatacccatcactgtgaggcagcttgaagccatcatacgtttgagtgaatctcttgcaaagatgagattgacaagcgtggctacaccagagcatgtcgaagaggcattcagactgttcaatgtctccaccgtcgacgctgcgagatccggaatcaacgagcatttgaacctgtcgccggagatcgcaaatgaaatcaagcaagcggaagcacagataaagcgaagaatgggcattggaagccacatatctgagcgacggctgattgatggactaaacaggatgggaatgaacgaatccattgtgagaagagctcttctgattatgcatcaaagagacgaggtggagtacaagagagagcgccatgtgatcgtccggaaggcttgatgtggagagtccagtcagactcattcatggcatacaacgaacgttcatggcgtcctctcctcagacgcgtccataccttcactgagactgcacatctgtccgtcctgaggggacgagacacgccttagttggtctctgacatgactgactgttgtaatcagcaaacggcttgagcatgtaggctctgtttttgaagtgaccaaaggttctgattgaacctgtagtgtgccgtgtaactggtcaatcaattctgaaatgcaaaatttgtgttcttcgtcaccgggagcaggacatgcaatgtgtggagctgagtagtaacatatactccaatattcatacatacatgctttcaccaagacacgctgtgggcattcacagggaggaagtggtgattgctacaacgacacgccatgaattcaggaagagtttacaggagcaacttacaaggagggaggaggacagttacaaatcttcccggtgaaaatgaaaatacgaacgaatctttacaaatatatatatgtgtgtggtttgtatttgtctgcaaaaaaaagcaaataaaaaaactgagtcgagtttacacggtgtagctctgctgaatggtgtcaatgtcgaggcccttgagcttgacgacggactcgacgtgtcccttgagcgtgtgcagctccctgagcctggccacctcggcgcgcttggccgcctgctcggcgagctccgacagctcgcggtagccctggttgtcgccgaagaggtcggaggtggcggtggcctggttgaggccgtgcagcgtcctctgtgccgtggcccactgcgcctctcgctcgcccttgccgtagtcggtgcggttggtgaaggccgtcttgttgttgatgttgttccaggccttgccggagagcgcgtagcggatggcgaacttgagcacgtccagcgggaagtaggtgacgacgctgaacgcccagatggcgccgccccagccccagccgatgccctgcatcttgcagaactcccagttggcgtacacggcgatgcacgtcgccaccagctgcgccgccaggaaggcgatcaccagcagcgcgccgggccgctccacgaaggaccagctccgggaccgggtcacgaagatgagcgcctggctgatgatgctcacttgcaggtacagcgccgccatcagctccttgtcgttctccttgatggaccgcacgccgaaggcgttggtgaagaagtcggtgtcgtgcgccaggtagaagaagagcgccgtggcgagcgccatgtaggtccctagcacgatgcccgtggcgaagatctccttgagcttccacgagtcgggcgtcggcgacggcttcacgcggtccttggagatggtcatgatggtgccgtcgttgaggatggcaatgatgagcaccatgaagggcgcgaagtcgaacttccagaccagcgcgacgagcaggaagcccagcacgatgcggatggtgatggacacggcgtagatggtgtagttcttcatgcgctggaagatggcgcggctggtgagcacggcgctcacgatcacgctcagcccgggctccgtcagcacgatgtccgacgcgctccgggccgcgtccgtcgcgtcgtccaccgcgatgccgatgtccgccttcttcagcgccggcgcgtcgttcacgccgtccccggtcatgccgcagatgtgcttccggtcctgcagccgcttcacgatctcgtacttgtgctccgggaacacccccgcgaacccgtcggccttctcgatcagctcgtcgatgttcaggccgcccatctcgccggtcttgttgtcgcccagcagggtggtggacgggtacatgttgctgcccatgcccaggcgccgcgccgtctccttgccgatggccagctggtcgccggtgatcatcttcacgttcacgcccaggtggagcgcgcggcggatggtctccgcgctgtcgtgccgcggcgggtcgaacagcgggaggagaccgatgaactgccacggctcgccggcgctctccttgctcttctcggggaccagctggtacgacacgcccagggagcggaggccgcggtcggcgtagccgtcgatgagggcgtggatcttcttctcggcatccttgctcatccggcacagctcgatgatctgctcgggggcgcccttgctgaccctgtgccagtcgccgttgccgtcgatgtaggtgatggccgtgcgcttctcaaccgggttgaaggggaggaagtggacctccttgatgccggcgcgggcctccttggggtcggcgagcatgccgacgatgcaggtgtcgatggcgtcctggttctcgacgcgggaggccctggcggcgtagaggagcaccatgtccttgtcgacgcccttgccgcacacctcgatgagggtcttgtcgacggtgagcttgttgagggtgagggtgccggtcttgtcgctgcagagcacgtccatgccggccatctcctcgatggcggtcatgcgcttggtgatggcgccctgctgggacaggcggtgggagccgatggccatggtgacggagagcacggtgggcatggcgatggggatgccgccgatgagcaggacgaggaggttgtcgatgccatcgcggtacgcgcggtgctgaatcgggtacatgacgatgatctcgatgaccatcccgacggcaatggagatgatgcagaagttgccgatggccgtgagcacgagctggaagtggcccacgttgttggtgctgtccaccaggtgcgccgccttgccgaagaaggtgtgcacgccggtggcgatgacgacggcctcgatctcgccctgcttgactgtggagcccgagaagaccccctggcccgggtgcttgttcacgggcagcgactcgcccgtgagcgccgcctggtcaaccttgagcgggtcgccctccagcagcctggcgtcggcgggaatgatgtcacccagcttgatgctgatgatgtccccgggcacgaggatggacgcctcctcttccttccacttgccgtccctgagcaccttggttttgggcgcgaggcccgccatgagcgcggccgccgcgttgccggcgttgttctcctcgatgaagctgatggtggagttgatgaagaggaggacgacgatgccgacgaagtcctgccagtcgggcggcttgcccccgccgttggcgagcacgatggccatgatggcggcggcctccatgacccaggagagcgggttccacatgaagcccaggaacttgagcagcttgctctccgacttctcctccagcttgttgggcccgaagatcttgagccgattgtctccctcggcgctggagagcccctccttgctgcatttcaggtgctggaacacctcctgcaccgggacggtctcctgcacgcgtggcggacggcgggtggtggtgatagcagcagcaagcagtcagaggaagacatatatacacagcaaagaaggggggaaataaaggagcgctagctgccacgaattaatccaaggcaacccatggcggctcgagatgcgggcgggtaggcgtacgaggtcgacggtctcgttgcggacgtcctcgagggagatggacgccattgtcgtttattagtcgacgccgctgctagctaattgtggtggtcggcgtcgtgcggtggtggcggccggcgcgcgcgcggcggacccgaggaccggggagg

SEQ ID NO: 40901 - DNA, 1326 bp, Zea Mays
ctactctgctgccatcgtctatgttcctcccttctcttcaggcgagcgccggattactgccatcaaagccataaaagacgcggaggctgggaacatacattaccagttgcaattggcacggtcctattattccgaggagcaattggagggaaacgccatgcagtattttcaggagaacttgcacaatctgtcggttgttccgaacgaggaatatgatgtgcttgagctgaaatggaataacggcggcgaatggatgattggagactttgcagatgacaggactctacgggcttcgattgcatcattcacagctgctgatggacttcagttcccaagggattcagacttctatacgcgcactagcaatttcagtgactttgcttggagtgagcagcctgaaggccaaatggcaggagcatcagaagcttttcagacacctggggctgtgagtaaccggctatcctgtggcatgacacccaaaactgtgaggctacccaagaatggtgagatgctcctatctgtgcatggttcacctcttggggtctataaagaagaaaatttagcagccattgaagaatctggtaacggaagtgaagatgctccctgataactcactgatatcacctgatggtgccagcctttgacaataacagtaatgcactttgaaattagtgtttaggtcactctgtattttgatgaaccctattgtagcatgccgacttttattcagctgacattattgtgctttgaacagtgttgttagctttgctgccaaggaggtcggcagaatcacttggctccggcctccgtgccatttccaccagacgagtttatttacgaactgagccgaagtttttctctacacaaccctcgttacaggcattactgaaatagatcattagaacaagtccattgttgaccacggccaccaaaatctagcttgaattcaaattgattataattgggtgacagctttagacgacgggatagataaacacaattgactcagagctgaagcagtttcgatgcaaaagtccaaaaacctatctgtgggcctgtttggttcagctttttctgaccatggagagaatctgactttagagagaatctgagtatcgttatgattatatacgacggaagataaaggtgtccacatggctcaggatctagagagtgacgaattcatactattacaacgacttaaccgattatgtgtttatattgatttttaatggtttttagtaaaacaaattttatagaagctgattggaaagctgattgtttaacagtctgcaacagcttttggtggcaagaagctaaaaaaac

SEQ ID NO: 40902 - DNA, 1449 bp, Zea Mays
aggcccgtaccgaaaatcctcccacacgctgacgctggtgcccgttgctctgtcctctgttcgaaaaatttcctcttgttgagacctggggcatctctctctctcgccccccccccccccccccccccctgctcgcggcgcagcggagccgacgcgatgccgccgaggaggaaacggcgagcaccaccggccaagtcgcagaggcagacggagccggatccgcaaccgcaagtgccccctggcgccgacgcgccgctggaagagcggctgatatggggcagccaacaagaaagcgagcgccggattactgccatcaaagccataaaagacgcggaggctgggaacatacattaccagttgcaattggcacggtcctattattccgaggagcaattggagggaaacgccatgcagtattttcaggagaacttgcacaatctgtcggttgttccgaacgaggaatatgatgtgcttgagctgaaatggaataacggcggcgaatggatgattggagactttgcagatgacaggactctacgggcttcgattgcatcattcacagctgctgatggacttcagttcccaagggattcagacttctatacgcgcactagcaatttcagtgactttgcttggagtgagcagcctgaaggccaaatggcaggagcatcagaagcttttcagacacctggggctgtgagtaaccggctatcctgtggcatgacacccaaaactgtgaggctacccaagaatggtgagatgctcctatctgtgcatggttcacctcttggggtctataaagaagaaaatttagcagccattgaagaatctggtaacggaagtgaagatgctccctgataactcactgatatcaccttgttgttagctttgctgccaaggaggtcggcagaatcacttggctccggcctccgtgccatttccaccagacgagtttatttacgaactgagccgaagtttttctctacacaaccctcgttacaggcattactgaaatagatcattagaacaagtccattgttgaccacggccaccaaaatctagcttgaattcaaattgattataattgggtgacagctttagacgacgggatagataaacacaattgactcagagctgaagcagtttcgatgcaaaagtccaaaaacctatctgtgggcctgtttggttcagctttttctgaccatggagagaatctgactttagagagaatctgagtatcgttatgattatatacgacggaagataaaggtgtccacatggctcaggatctagagagtgacgaattcatactattacaacgacttaaccgattatgtgtttatattgatttttaatggtttttagtaaaacaaattttatagaagctgattggaaagctgattgtttaacagtctgcaacagcttttggtggcaagaagctaaaaaaac

SEQ ID NO: 40903 - DNA, 4800 bp, Zea Mays
cgatcgcctacgcggctacgccccacgcaacgccacgacgtaccccgcgaccgcaaagcgagcagcgaagcgagccccaggcgccggcgagccgggagtgcgtcgccggcggcggaggtggaggcagtaatggggaataagatcgcgcggacgacgcaggcgtcggccacggagtactacctccacgacctgccgtccacctacaacctcgtgctcctcgacgtcgtcagccgcggccgcttcctcaagtccgtccgctgcaagcacgacgaggggctgctcctcgtcaaggtctacttcaagcgcaccggcgagcccatcgacctcaaggagcacgagcggaggctggagcggattaggaaggcgttcaaggggattgatgggtcccatgtatggcccttccaggtttggctgcaaacagataaggcagcatatctcctgagacagtacttcttcaacaacttgcacgatcgactgagtacacgccctttcctcagtcagattgcaaagaaatggcttgcctttcagttaattcatgcagtggagcagagccatagtaagggaatttgccatggtgacataaaatgtgagaatgtgcttgttacttcttggaattggttatatcttgcggactttgcatcattcaagccaacgtatatcccggatgacgacccatctgatttctcattctacttcgacaccggaggaagacgaagatgctatctagcacctgaaagattctacgaacacggtggtgagtcccaagttgcagcagatgcacctctgcaaccatctatggatatattttctcttgggtgcgttcttgctgaacttttccttgaaggtcagccactttttgagctttcccaacttctggcttatcggcgtggtcaatatgaccccatacataccctagaaaagatacaagatactggtatccgtgacatgatacttcacatgacccagttggagcccaaaaaaaggttaccatgtcgaagctatctgcagaaatatgaaattgttgtgttcccattttatttctcaaaatttttgcacaagttcttctcagatattgttccacttgactccgatgccagggttgaaaagactcaagaaaattttgaaaagatacatgaaataatgatgggcagctcaacaattgaacaaattgagaggtccacatcgtgtgagcatagtgaaccatctgggagaaaaggcatgggaggagaaactttatattcaccaggagattatagaaacagcacatccataggtaagaaaaatacttctgtagaccatcaacatattgtcggaggtatcaatttcctcctcaaagaagtggagagcaggagcaacaacacaagcacaaaagtcacaaaagacactgagcattttgttgcaccgagcatttcatgtgcaagtggtgttcagtccttgcagctagttaatccagcaggaagacaaattggaagtggtttgatgagccagaacaatgctgtatctcatgtgaagaagatctcaaagactaacttatgctccttagtggctgcttatgatgatcaatcagatacctatagttttgacatttttcagcagatagacaccaaggtgagctgtgaaggaatggttttgcttgtctcgttactctgctcatgcatacgcagtgtgaaaaaacctgagctaagaagggccagcctaattcttctgaagttctcctccacatacatagatgatgataggcgcttacagctagtgctcccctatgtgattgcgatgctttcagatccatctgccattgtccgttgtgctgctttggaaaccttatgtgatgttctttgtcttgtgcaagatttccctatcagtgatactgttatattccctgagtatgtcctcccaatgctctctttgctccctgatgatacggaagagagtgttagggtttgttatgctagtaacattcacaagctggctttaacagcttacaggttcctacttcgttctcgtagcatcgcgaatattcgacctctggatgaatcactggtagctcacagatcccagtctgcagattcaccagcgaagaggatataggttatttgtgttacttctttgggcacaaacaaagtaacgattttcttctgcctatactcccagcatttctaaatgatcatgatgagcagctccgtgcagttttctttgcccagattgtctatgtttgctattttattggagcaaggagtgttgaggaatatcttctgccatatcttgaacaggcgctaagtgatggtatggaggctatccttgtaaatgcacttgattgcttgaccatgatgtgcaaaagtggttatttgaggaaaagagtaattgttggtctattggtaaaggttctccccctgctccggtatacaatcaattgggttaaacagtctgctgtaagatttgttgctgcctgcagcgagagcttaggatctgtagatacttatgtgtatctttctcctcagctacggcagttcctacacagggagccaccttcattggactctgaaactgctcttctttcatgtcttaagcctccactaccaaaatcaatgttctacgtacctttagaagatgctcaggacattggaaacattttactgaagagcagtggcaagaaagaacagatattacatggtggaagatactctggcatggcacaaagtggatctttgggcaaccttgaagatattcgtcgactgaaaggcactaatatttccagcagcgtgtccttggatgtcaaagactccttttcttttggcaaatcactatattctggttttgctctacatgcatctgctgcaaatagctccttttatgatggcttatctaaaggaataccatcatattctttttgtattgataaccggggtttaggagaaacacacatggtccctgattcatcagtgtataaagcttcgataaggctaccttggttggaaccgaatcgtcctggcatgcagactagagatgatcatttcagtagcaagcggcgagatttaagcatcaatgactctttgaagagcaattcttctttgcaaggggatagcatttcaaactctgatactggaggattgccgttctccagatcagcagtgaacctggagactggatggaagcctcgaggaattctagtggcacatctccaggaacatcgcttttctgtcaatgacattgccgtgtcgaatgacaataccttttttgtgactgcttctgacgactcgagtgtcaaaatctgggatacaagaaagttggaaaaagacattgctttcagatctaggttaacatatagcgtgggtaatagccgagctttatgtacggcaatggttcatggtacttcacaggttattgtcggtggtagcaatggaacattacacttgttttctgtggattgtgcacgaagcgttgggagtgtcgtggaaaggtatgctggaattgttggtgtaaaaaggaatgatatcaaagaaggcgcaattctcagcgttgtaaattgttcacccgacagctttagcccaactgttcttttcagcactgaacattgtggtatccataaatgggatacaagaaccaactcagaattttggtattttaaatcctctccagaggagggctatatatcagcacttgttgtgggccagtgtgggaattggttcatctcaggttcttcaagaggtgtccttacattgtgggataataggtttttactacctgttaactcgtggaactattcaatagtaagcccaatagagaaattgtgcttgcttatacctccaccaagttcaatatcttctgctggaaggccactagttttcgttgctgccggatgcaatgaagtctctctgtggaatgctgagaatggaagctgccaccagatgtttagaacagcgagcactgataatgaagctgtgatgtcaaaggcaccatcaaggcctgttaacaagccaatcattaaagatataataagagcacgtaattataagtacagaatcgatgagttgaatgacccacctgtgcgtcgtccaggcattcgttctttgctacccttaccaggtggtgatctgttaactggaggaacagatttgaagattcgttactgggatcaagccaggcctgagcaaagcttctgtattgctggtccctcggcgaaaaaagtccgttcagctaaagctgacattttagagaaagcagctggaaacgatgagtgttacgatataagatccagttttggagtacaagtcgtgcaggaaatgtacaaacagaataccacggtatccggtttgacgcccaagactcagttcgcggaggcagctgcagattctgccgggtgccatcgtgacgcaatactcgcgctggcatccttcaacttgtctagccagagattgatatcagccagcagagacggtgctgtcaaagtgtggaaatagctgctccagcatgggtaagatgacaagtcctttggcgtgtacatatttgcctggttagtgcttacacagtacacatatgccactagttattgttgtacagaagattgatccacacaagagtcgaaattgacacgtaagctttcatcctgtgtgacctgacctgtgtatataaataccaatggcttacctaccttacagtagtatattcatggattagtaaaagatatcataatgaataggaggtaggaaggctgtctaactacaataacatagggctccaaccataatcctccacacaaaaatgatctttttttgtcggtgctgttattttggacaatgaaag

SEQ ID NO: 40904 - DNA, 5146 bp, Zea Mays
cgatcgcctacgcggctacgccccacgcaacgccacgacgtaccccgcgaccgcaaagcgagcagcgaagcgagccccaggcgccggcgagccgggagtgcgtcgccggcggcggaggtggaggcagtaatggggaataagatcgcgcggacgacgcaggcgtcggccacggagtactacctccacgacctgccgtccacctacaacctcgtgctcctcgacgtcgtcagccgcggccgcttcctcaagtccgtccgctgcaagcacgacgaggggctgctcctcgtcaaggtctacttcaagcgcaccggcgagcccatcgacctcaaggagcacgagcggaggctggagcggattaggaaggcgttcaaggggattgatgggtcccatgtatggcccttccaggtttggctgcaaacagataaggcagcatatctcctgagacagtacttcttcaacaacttgcacgatcgactgagtacacgccctttcctcagtcagattgcaaagaaatggcttgcctttcagttaattcatgcagtggagcagagccatagtaagggaatttgccatggtgacataaaatgtgagaatgtgcttgttacttcttggaattggttatatcttgcggactttgcatcattcaagccaacgtatatcccggatgacgacccatctgatttctcattctacttcgacaccggaggaagacgaagatgctatctagcacctgaagtaaagatcacttaccttggattgtacaacaacacactgatttcaactctaggaattattagaatgcccaaatttgtaggctgttgtcagtcactaggtcgggacttcaggagcatatgtagagtgctgccggagcatagcaaggcggcaggagaggagggcggcggcgctggagaagggcgcacacgtgactgtgcgctgcgtattgtgtatcgtattggtacaggtaggagattctacgaacacggtggtgagtcccaagttgcagcagatgcacctctgcaaccatctatggatatattttctcttgggtgcgttcttgctgaacttttccttgaaggtcagccactttttgagctttcccaacttctggcttatcggcgtggtcaatatgaccccatacataccctagaaaagatacaagatactggtatccgtgacatgatacttcacatgacccagttggagcccaaaaaaaggttaccatgtcgaagctatctgcagaaatatgaaattgttgtgttcccattttatttctcaaaatttttgcacaagttcttctcagatattgttccacttgactccgatgccagggttgaaaagactcaagaaaattttgaaaagatacatgaaataatgatgggcagctcaacaattgaacaaattgagaggtccacatcgtgtgagcatagtgaaccatctgggagaaaaggcatgggaggagaaactttatattcaccaggagattatagaaacagcacatccataggtaagaaaaatacttctgtagaccatcaacatattgtcggaggtatcaatttcctcctcaaagaagtggagagcaggagcaacaacacaagcacaaaagtcacaaaagacactgagcattttgttgcaccgagcatttcatgtgcaagtggtgttcagtccttgcagctagttaatccagcaggaagacaaattggaagtggtttgatgagccagaacaatgctgtatctcatgtgaagaagatctcaaagactaacttatgctccttagtggctgcttatgatgatcaatcagatacctatagttttgacatttttcagcagatagacaccaaggtgagctgtgaaggaatggttttgcttgtctcgttactctgctcatgcatacgcagtgtgaaaaaacctgagctaagaagggccagcctaattcttctgaagttctcctccacatacatagatgatgataggcgcttacagctagtgctcccctatgtgattgcgatgctttcagatccatctgccattgtccgttgtgctgctttggaaaccttatgtgatgttctttgtcttgtgcaagatttccctatcagtgatactgttatattccctgagtatgtcctcccaatgctctctttgctccctgatgatacggaagagagtgttagggtttgttatgctagtaacattcacaagctggctttaacagcttacaggttcctacttcgttctcgtagcatcgcgaatattcgacctctggatgaatcactggtagctcacagatcccagtctgcagattcaccagcgaagaggcaagatattttttttcgccaacttgcagaactgaggaaatctatttatgagatagtgcaagatttagtgatgggacaaaagcagacacctaatacccgtagagctcttctgcaggatataggttatttgtgttacttctttgggcacaaacaaagtaacgattttcttctgcctatactcccagcatttctaaatgatcatgatgagcagctccgtgcagttttctttgcccagattgtctatgtttgctattttattggagcaaggagtgttgaggaatatcttctgccatatcttgaacaggcgctaagtgatggtatggaggctatccttgtaaatgcacttgattgcttgaccatgatgtgcaaaagtggttatttgaggaaaagagtaattgttggtctattggtaaaggttctccccctgctccggtatacaatcaattgggttaaacagtctgctgtaagatttgttgctgcctgcagcgagagcttaggatctgtagatacttatgtgtatctttctcctcagctacggcagttcctacacagggagccaccttcattggactctgaaactgctcttctttcatgtcttaagcctccactaccaaaatcaatgttctacgtacctttagaagatgctcaggacattggaaacattttactgaagagcagtggcaagaaagaacagatattacatggtggaagatactctggcatggcacaaagtggatctttgggcaaccttgaagatattcgtcgactgaaaggcactaatatttccagcagcgtgtccttggatgtcaaagactccttttcttttggcaaatcactatattctggttttgctctacatgcatctgctgcaaatagctccttttatgatggcttatctaaaggaataccatcatattctttttgtattgataaccggggtttaggagaaacacacatggtccctgattcatcagtgtataaagcttcgataaggctaccttggttggaaccgaatcgtcctggcatgcagactagagatgatcatttcagtagcaagcggcgagatttaagcatcaatgactctttgaagagcaattcttctttgcaaggggatagcatttcaaactctgatactggaggattgccgttctccagatcagcagtgaacctggagactggatggaagcctcgaggaattctagtggcacatctccaggaacatcgcttttctgtcaatgacattgccgtgtcgaatgacaataccttttttgtgactgcttctgacgactcgagtgtcaaaatctgggatacaagaaagttggaaaaagacattgctttcagatctaggttaacatatagcgtgggtaatagccgagctttatgtacggcaatggttcatggtacttcacaggttattgtcggtggtagcaatggaacattacacttgttttctgtggattgtgcacgaagcgttgggagtgtcgtggaaaggtatgctggaattgttggtgtaaaaaggaatgatatcaaagaaggcgcaattctcagcgttgtaaattgttcacccgacagctttagcccaactgttcttttcagcactgaacattgtggtatccataaatgggatacaagaaccaactcagaattttggtattttaaatcctctccagaggagggctatatatcagcacttgttgtgggccagtgtgggaattggttcatctcaggttcttcaagaggtgtccttacattgtgggataataggtttttactacctgttaactcgtggaactattcaatagtaagcccaatagagaaattgtgcttgcttatacctccaccaagttcaatatcttctgctggaaggccactagttttcgttgctgccggatgcaatgaagtctctctgtggaatgctgagaatggaagctgccaccagatgtttagaacagcgagcactgataatgaagctgtgatgtcaaaggcaccatcaaggcctgttaacaagccaatcattaaagatataataagagcacgtaattataagtacagaatcgatgagttgaatgacccacctgtgcgtcgtccaggcattcgttctttgctacccttaccaggtggtgatctgttaactggaggaacagatttgaagattcgttactgggatcaagccaggcctgagcaaagcttctgtattgctggtccctcggcgaaaaaagtccgttcagctaaagctgacattttagagaaagcagctggaaacgatgagtgttacgatataagatccagttttggagtacaagtcgtgcaggaaatgtacaaacagaataccacggtatccggtttgacgcccaagactcagttcgcggaggcagctgcagattctgccgggtgccatcgtgacgcaatactcgcgctggcatccttcaacttgtctagccagagattgatatcagccagcagagacggtgctgtcaaagtgtggaaatagctgctccagcatgggtaagatgacaagtcctttggcgtgtacatatttgcctggttagtgcttacacagtacacatatgccactagttattgttgtacagaagattgatccacacaagagtcgaaattgacacgtaagctttcatcctgtgtgacctgacctgtgtatataaataccaatggcttacctaccttacagtagtatattcatggattagtaaaagatatcataatgaataggaggtaggaaggctgtctaactacaataacatagggctccaaccataatcctccacacaaaaatgatctttttttgtcggtgctgttattttggacaatgaaag

SEQ ID NO: 40905 - DNA, 5851 bp, Zea Mays
cgatcgcctacgcggctacgccccacgcaacgccacgacgtaccccgcgaccgcaaagcgagcagcgaagcgagccccaggcgccggcgagccgggagtgcgtcgccggcggcggaggtggaggcagtaatggggaataagatcgcgcggacgacgcaggcgtcggccacggagtactacctccacgacctgccgtccacctacaacctcgtgctcctcgacgtcgtcagccgcggccgcttcctcaagtccgtccgctgcaagcacgacgaggggctgctcctcgtcaaggtctacttcaagcgcaccggcgagcccatcgacctcaaggagcacgagcggaggctggagcggattaggaaggcgttcaaggggattgatgggtcccatgtatggcccttccaggtttggctgcaaacagataaggcagcatatctcctgagacagtacttcttcaacaacttgcacgatcgactgagtacacgccctttcctcagtcagattgcaaagaaatggcttgcctttcagttaattcatgcagtggagcagagccatagtaagggaatttgccatggtgacataaaatgtgagaatgtgcttgttacttcttggaattggttatatcttgcggactttgcatcattcaagccaacgtatatcccggatgacgacccatctgatttctcattctacttcgacaccggaggaagacgaagatgctatctagcacctgaagtaaagatcacttaccttggattgtacaacaacacactgatttcaactctaggaattattagaatgcccaaatttgtaggctgttgtcagtcactaggtcgggacttcaggagcatatgtagagtgctgccggagcatagcaaggcggcaggagaggagggcggcggcgctggagaagggcgcacacgtgactgtgcgctgcgtattgtgtatcgtattggtacaggtaggagattctacgaacacggtggtgagtcccaagttgcagcagatgcacctctgcaaccatctatggatatattttctcttgggtgcgttcttgctgaacttttccttgaaggtcagccactttttgagctttcccaacttctggcttatcggcgtggtcaatatgaccccatacataccctagaaaagatacaagatactggtatccgtgacatgatacttcacatgacccagttggagcccaaaaaaaggttaccatgtcgaagctatctgcagaaatatgaaattgttgtgttcccattttatttctcaaaatttttgcacaagttcttctcagatattgttccacttgactccgatgccagggttgaaaagactcaagaaaattttgaaaagatacatgaaataatgatgggcagctcaacaattgaacaaattgagaggtccacatcgtgtgagcatagtgaaccatctgggagaaaaggcatgggaggagaaactttatattcaccaggagattatagaaacagcacatccataggtaagaaaaatacttctgtagaccatcaacatattgtcggaggtatcaatttcctcctcaaagaagtggagagcaggagcaacaacacaagcacaaaagtcacaaaagacactgagcattttgttgcaccgagcatttcatgtgcaagtggtgttcagtccttgcagctagttaatccagcaggaagacaaattggaagtggtttgatgagccagaacaatgctgtatctcatgtgaagaagatctcaaagactaacttatgctccttagtggctgcttatgatgatcaatcagatacctatagttttgacatttttcagcagatagacaccaaggtgagctgtgaaggaatggttttgcttgtctcgttactctgctcatgcatacgcagtgtgaaaaaacctgagctaagaagggccagcctaattcttctgaagttctcctccacatacatagatgatgataggcgcttacagctagtgctcccctatgtgattgcgatgctttcagatccatctgccattgtccgttgtgctgctttggaaaccttatgtgatgttctttgtcttgtgcaagatttccctatcagtgatactgttatattccctgagtatgtcctcccaatgctctctttgctccctgatgatacggaagagagtgttagggtttgttatgctagtaacattcacaagctggctttaacagcttacaggttcctacttcgttctcgtagcatcgcgaatattcgacctctggatgaatcactggtagctcacagatcccagtctgcagattcaccagcgaagaggcaagatattttttttcgccaacttgcagaactgaggaaatctatttatgagatagtgcaagatttagtgatgggacaaaagcagacacctaatacccgtagagctcttctgcaggatataggttatttgtgttacttctttgggcacaaacaaagtaacgattttcttctgcctatactcccagcatttctaaatgatcatgatgagcagctccgtgcagttttctttgcccagattgtctatgtttgctattttattggagcaaggagtgttgaggaatatcttctgccatatcttgaacaggcgctaagtgatggtatggaggctatccttgtaaatgcacttgattgcttgaccatgatgtgcaaaagtggttatttgaggaaaagagtaattgttggtctattggtaaaggttctccccctgctccggtatacaatcaattgggttaaacagtctgctgtaagatttgttgctgcctgcagcgagagcttaggatctgtagatacttatgtgtatctttctcctcagctacggcagttcctacacagggagccaccttcattggactctgaaactgctcttctttcatgtcttaagcctccactaccaaaatcaatgttctacgtacctttagaagatgctcaggacattggaaacattttactgaagagcagtggcaagaaagaacagatattacatggtggaagatactctggcatggcacaaagtggatctttgggcaaccttgaagatattcgtcgactgaaaggcactaatatttccagcagcgtgtccttggatgtcaaagactccttttcttttggcaaatcactatattctggttttgctctacatgcatctgctgcaaatagctccttttatgatggcttatctaaaggaataccatcatattctttttgtattgataaccggggtttaggagaaacacacatggtccctgattcatcagtgtataaagcttcgataaggctaccttggttggaaccgaatcgtcctggcatgcagactagagatgatcatttcagtagcaagcggcgagatttaagcatcaatgactctttgaagagcaattcttctttgcaaggggatagcatttcaaactctgatactggaggattgccgttctccagatcagcagtgaacctggagactggatggaagcctcgaggaattctagtggcacatctccaggaacatcgcttttctgtcaatgacattgccgtgtcgaatgacaataccttttttgtgactgcttctgacgactcgagtgtcaaaatctgggatacaagaaagttggaaaaagacattgctttcagatctaggttaacatatagcgtgggtaatagccgagctttatgtacggcaatggttcatggtacttcacaggttattgtcggtggtagcaatggaacattacacttgttttctgtggattgtgcacgaagcgttgggagtgtcgtggaaaggtatgctggaattgttggtgtaaaaaggaatgatatcaaagaaggcgcaattctcagcgttgtaaattgttcacccgacagctttagcccaactgttcttttcagcactgaacattgtggtatccataaatgggatacaagaaccaactcagaattttggtattttaaatcctctccagaggagggctatatatcagcacttgttgtgggccagtgtgggaattggttcatctcaggttcttcaagaggtgtccttacattgtgggataataggtttttactacctgttaactcgtggaactattcaatagtaagcccaatagagaaattgtgcttgcttatacctccaccaagttcaatatcttctgctggaaggccactagttttcgttgctgccggatgcaatgaagtctctctgtggaatgctgagaatggaagctgccaccagatgtttagaacagcgagcactgataatgaagctgtgatgtcaaaggcaccatcaaggcctgttaacaagccaatcattaaagatataataagagcacgtaattataagtacagaatcgatgagttgaatgacccacctgtgcgtcgtccaggcattcgttctttgctacccttaccaggtggtgatctgttaactggaggaacagatttgaagattcgttactgggatcaagccaggcctgagcaaagcttctgtattgctggtccctcggcgaaaaaagtccgttcagctaaagctgacattttagagaaagcagctggaaacgatgagtgttacgatataagatccagttttggagtacaagtcgtgcaggaaatgtacaaacagaataccacggtatccggtttgacgcccaagactcagttcgcggaggcagctgcagattctgccgggtgccatcgtgacgcaatactcgcgctggcatccttcaacttgtctagccagagattgatatcagccagcagagacggtgctgtcaaagtgtggaaatagctgctccagcatggctatgattattcaggctacggtgcttctacaggaaaaccatcagagtacaacacctacaatgacatagaggctgtttatgattgcttgagaacggagtatgggatagaagaagaggatctaatcctgtatgggcaatccgttggaagtggaccaacgttgcatctagcctcacgtctcgagaagttaagaggggttgtcctccacagcggcatactctctggcatacgggttctgtatccagtgaaagtgacgctttggttcgacatcttcaagaacatcgacaaaataaagcaggtggactgccctgtgttagtcatacatggcacagccgacgacatcgtggacttggctcacggcaagcggctgtgggagctagccaaggacaagtatgagccgctgtggatcaaaggcggtgggcactgcaacctggagacgtacccggagtacatcaggcacatgcgcaagttcataagcgccatggagaagctggccaaggacagcagcaaggcggcccaggcgccgccgccgtcgagcatggccgccgaagaaagacacaccaagtgcttgagattcgggaagagatgagatgccggcgacctggacctgggaaggaaacgcggtgcagcagcaaccctagttcgtgtatcatccgtgtgagattgagttcagacttcagagtagagagtagacagagtggagtgacagacagacctgtggctgctgtagtatgctgtacgtgctggagttcaggactagagagatgtctttgttttcctaggggcgccacggattagcctgttcgcagctgaattttttcttgttttttttttctgttttcgctatctgtattgtagtcactgtgcaaaaaaaatcgttttgattgattggctgcaaaaagtgaagtgcgctattgcgctgtgactagggccacgaaatgtccgttgctcgcttggttcttggatagctcaattcggataagttcttttaaatcggtttgtggttagctcgattcggatcagttcttttaattttt

SEQ ID NO: 40906 - DNA, 4876 bp, Zea Mays
cgcaaagcgagcagcgaagcgagccccaggcgccggcgagccgggagtgcgtcgccggcggcggaggtggaggcagtaatggggaataagatcgcgcggacgacgcaggcgtcggccacggagtactacctccacgacctgccgtccacctacaacctcgtgctcctcgacgtcgtcagccgcggccgcttcctcaagtccgtccgctgcaagcacgacgaggggctgctcctcgtcaaggtctacttcaagcgcaccggcgagcccatcgacctcaaggagcacgagcggaggctggagcggattaggaaggcgttcaaggggattgatgggtcccatgtatggcccttccaggtttggctgcaaacagataaggcagcatatctcctgagacagtacttcttcaacaacttgcacgatcgactgagtacacgccctttcctcagtcagattgcaaagaaatggcttgcctttcagttaattcatgcagtggagcagagccatagtaagggaatttgccatggtgacataaaatgtgagaatgtgcttgttacttcttggaattggttatatcttgcggactttgcatcattcaagccaacgtatatcccggatgacgacccatctgatttctcattctacttcgacaccggaggaagacgaagatgctatctagcacctgaaagattctacgaacacggtggtgagtcccaagttgcagcagatgcacctctgcaaccatctatggatatattttctcttgggtgcgttcttgctgaacttttccttgaaggtcagccactttttgagctttcccaacttctggcttatcggcgtggtcaatatgaccccatacataccctagaaaagatacaagatactggtatccgtgacatgatacttcacatgacccagttggagcccaaaaaaaggttaccatgtcgaagctatctgcagaaatatgaaattgttgtgttcccattttatttctcaaaatttttgcacaagttcttctcagatattgttccacttgactccgatgccaggttctctttgaaggttgaaaagactcaagaaaattttgaaaagatacatgaaataatgatgggcagctcaacaattgaacaaattgagaggtccacatcgtgtgagcatagtgaaccatctgggagaaaaggcatgggaggagaaactttatattcaccaggagattatagaaacagcacatccataggtaagaaaaatacttctgtagaccatcaacatattgtcggaggtatcaatttcctcctcaaagaagtggagagcaggagcaacaacacaagcacaaaagtcacaaaagacactgagcattttgttgcaccgagcatttcatgtgcaagtggtgttcagtccttgcagctagttaatccagcaggaagacaaattggaagtggtttgatgagccagaacaatgctgtatctcatgtgaagaagatctcaaagactaacttatgctccttagtggctgcttatgatgatcaatcagatacctatagttttgacatttttcagcagatagacaccaaggtgagctgtgaaggaatggttttgcttgtctcgttactctgctcatgcatacgcagtgtgaaaaaacctgagctaagaagggccagcctaattcttctgaagttctcctccacatacatagatgatgataggcgcttacagctagtgctcccctatgtgattgcgatgctttcagatccatctgccattgtccgttgtgctgctttggaaaccttatgtgatgttctttgtcttgtgcaagatttccctatcagtgatactgttatattccctgagtatgtcctcccaatgctctctttgctccctgatgatacggaagagagtgttagggtttgttatgctagtaacattcacaagctggctttaacagcttacaggttcctacttcgttctcgtagcatcgcgaatattcgacctctggatgaatcactggtagctcacagatcccagtctgcagattcaccagcgaagaggcaagatattttttttcgccaacttgcagaactgaggaaatctatttatgagatagtgcaagatttagtgatgggacaaaagcagacacctaatacccgtagagctcttctgcaggatataggttatttgtgttacttctttgggcacaaacaaagtaacgattttcttctgcctatactcccagcatttctaaatgatcatgatgagcagctccgtgcagttttctttgcccagattgtctatgtttgctattttattggagcaaggagtgttgaggaatatcttctgccatatcttgaacaggcgctaagtgatggtatggaggctatccttgtaaatgcacttgattgcttgaccatgatgtgcaaaagtggttatttgaggaaaagagtaattgttggtctattggtaaaggttctccccctgctccggtatacaatcaattgggttaaacagtctgctgtaagatttgttgctgcctgcagcgagagcttaggatctgtagatacttatgtgtatctttctcctcagctacggcagttcctacacagggagccaccttcattggactctgaaactgctcttctttcatgtcttaagcctccactaccaaaatcaatgttctacgtacctttagaagatgctcaggacattggaaacattttactgaagagcagtggcaagaaagaacagatattacatggtggaagatactctggcatggcacaaagtggatctttgggcaaccttgaagatattcgtcgactgaaaggcactaatatttccagcagcgtgtccttggatgtcaaagactccttttcttttggcaaatcactatattctggttttgctctacatgcatctgctgcaaatagctccttttatgatggcttatctaaaggaataccatcatattctttttgtattgataaccggggtttaggagaaacacacatggtccctgattcatcagtgtataaagcttcgataaggctaccttggttggaaccgaatcgtcctggcatgcagactagagatgatcatttcagtagcaagcggcgagatttaagcatcaatgactctttgaagagcaattcttctttgcaaggggatagcatttcaaactctgatactggaggattgccgttctccagatcagcagtgaacctggagactggatggaagcctcgaggaattctagtggcacatctccaggaacatcgcttttctgtcaatgacattgccgtgtcgaatgacaataccttttttgtgactgcttctgacgactcgagtgtcaaaatctgggatacaagaaagttggaaaaagacattgctttcagatctaggttaacatatagcgtgggtaatagccgagctttatgtacggcaatggttcatggtacttcacaggttattgtcggtggtagcaatggaacattacacttgttttctgtggattgtgcacgaagcgttgggagtgtcgtggaaaggtatgctggaattgttggtgtaaaaaggaatgatatcaaagaaggcgcaattctcagcgttgtaaattgttcacccgacagctttagcccaactgttcttttcagcactgaacattgtggtatccataaatgggatacaagaaccaactcagaattttggtattttaaatcctctccagaggagggctatatatcagcacttgttgtgggccagtgtgggaattggttcatctcaggttcttcaagaggtgtccttacattgtgggataataggtttttactacctgttaactcgtggaactattcaatagtaagcccaatagagaaattgtgcttgcttatacctccaccaagttcaatatcttctgctggaaggccactagttttcgttgctgccggatgcaatgaagtctctctgtggaatgctgagaatggaagctgccaccagatgtttagaacagcgagcactgataatgaagctgtgatgtcaaaggcaccatcaaggcctgttaacaagccaatcattaaagatataataagagcacgtaattataagtacagaatcgatgagttgaatgacccacctgtgcgtcgtccaggcattcgttctttgctacccttaccaggtggtgatctgttaactggaggaacagatttgaagattcgttactgggatcaagccaggcctgagcaaagcttctgtattgctggtccctcggcgaaaaaagtccgttcagctaaagctgacattttagagaaagcagctggaaacgatgagtgttacgatataagatccagttttggagtacaagtcgtgcaggaaatgtacaaacagaataccacggtatccggtttgacgcccaagactcagttcgcggaggcagctgcagattctgccgggtgccatcgtgacgcaatactcgcgctggcatccttcaacttgtctagccagagattgatatcagccagcagagacggtgctgtcaaagtgtggaaatagctgctccagcatgggtaagatgacaagtcctttggcgtgtacatatttgcctggttagtgcttacacagtacacatatgccactagttattgttgtacagaagattgatccacacaagagtcgaaattgacacgtaagctttcatcctgtgtgacctgacctgtgtatataaataccaatggcttacctaccttacagtagtatattcatggattagtaaaagatatcataatgaataggaggtaggaaggctgtctaactacaataacatagggctccaaccataatcctccacacaaaaatgatctttttttgtcggtgctgttattttggacaatgaaag

SEQ ID NO: 40907 - DNA, 4755 bp, Zea Mays
aaagcgagcagcgaagcgagccccaggcgccggcgagccgggagtgcgtcgccggcggcggaggtggaggcagtaatggggaataagatcgcgcggacgacgcaggcgtcggccacggagtactacctccacgacctgccgtccacctacaacctcgtgctcctcgacgtcgtcagccgcggccgcttcctcaagtccgtccgctgcaagcacgacgaggggctgctcctcgtcaaggtctacttcaagcgcaccggcgagcccatcgacctcaaggagcacgagcggaggctggagcggattaggaaggcgttcaaggggattgatgggtcccatgtatggcccttccaggtttggctgcaaacagataaggcagcatatctcctgagacagtacttcttcaacaacttgcacgatcgactgagtacacgccctttcctcagtcagattgcaaagaaatggcttgcctttcagttaattcatgcagtggagcagagccatagtaagggaatttgccatggtgacataaaatgtgagaatgtgcttgttacttcttggaattggttatatcttgcggactttgcatcattcaagccaacgtatatcccggatgacgacccatctgatttctcattctacttcgacaccggaggaagacgaagatgctatctagcacctgaaagattctacgaacacggtggtgagtcccaagttgcagcagatgcacctctgcaaccatctatggatatattttctcttggatacaagatactggtatccgtgacatgatacttcacatgacccagttggagcccaaaaaaaggttaccatgtcgaagctatctgcagaaatatgaaattgttgtgttcccattttatttctcaaaatttttgcacaagttcttctcagatattgttccacttgactccgatgccagggttgaaaagactcaagaaaattttgaaaagatacatgaaataatgatgggcagctcaacaattgaacaaattgagaggtccacatcgtgtgagcatagtgaaccatctgggagaaaaggcatgggaggagaaactttatattcaccaggagattatagaaacagcacatccataggtaagaaaaatacttctgtagaccatcaacatattgtcggaggtatcaatttcctcctcaaagaagtggagagcaggagcaacaacacaagcacaaaagtcacaaaagacactgagcattttgttgcaccgagcatttcatgtgcaagtggtgttcagtccttgcagctagttaatccagcaggaagacaaattggaagtggtttgatgagccagaacaatgctgtatctcatgtgaagaagatctcaaagactaacttatgctccttagtggctgcttatgatgatcaatcagatacctatagttttgacatttttcagcagatagacaccaaggtgagctgtgaaggaatggttttgcttgtctcgttactctgctcatgcatacgcagtgtgaaaaaacctgagctaagaagggccagcctaattcttctgaagttctcctccacatacatagatgatgataggcgcttacagctagtgctcccctatgtgattgcgatgctttcagatccatctgccattgtccgttgtgctgctttggaaaccttatgtgatgttctttgtcttgtgcaagatttccctatcagtgatactgttatattccctgagtatgtcctcccaatgctctctttgctccctgatgatacggaagagagtgttagggtttgttatgctagtaacattcacaagctggctttaacagcttacaggttcctacttcgttctcgtagcatcgcgaatattcgacctctggatgaatcactggtagctcacagatcccagtctgcagattcaccagcgaagaggcaagatattttttttcgccaacttgcagaactgaggaaatctatttatgagatagtgcaagatttagtgatgggacaaaagcagacacctaatacccgtagagctcttctgcaggatataggttatttgtgttacttctttgggcacaaacaaagtaacgattttcttctgcctatactcccagcatttctaaatgatcatgatgagcagctccgtgcagttttctttgcccagattgtctatgtttgctattttattggagcaaggagtgttgaggaatatcttctgccatatcttgaacaggcgctaagtgatggtatggaggctatccttgtaaatgcacttgattgcttgaccatgatgtgcaaaagtggttatttgaggaaaagagtaattgttggtctattggtaaaggttctccccctgctccggtatacaatcaattgggttaaacagtctgctgtaagatttgttgctgcctgcagcgagagcttaggatctgtagatacttatgtgtatctttctcctcagctacggcagttcctacacagggagccaccttcattggactctgaaactgctcttctttcatgtcttaagcctccactaccaaaatcaatgttctacgtacctttagaagatgctcaggacattggaaacattttactgaagagcagtggcaagaaagaacagatattacatggtggaagatactctggcatggcacaaagtggatctttgggcaaccttgaagatattcgtcgactgaaaggcactaatatttccagcagcgtgtccttggatgtcaaagactccttttcttttggcaaatcactatattctggttttgctctacatgcatctgctgcaaatagctccttttatgatggcttatctaaaggaataccatcatattctttttgtattgataaccggggtttaggagaaacacacatggtccctgattcatcagtgtataaagcttcgataaggctaccttggttggaaccgaatcgtcctggcatgcagactagagatgatcatttcagtagcaagcggcgagatttaagcatcaatgactctttgaagagcaattcttctttgcaaggggatagcatttcaaactctgatactggaggattgccgttctccagatcagcagtgaacctggagactggatggaagcctcgaggaattctagtggcacatctccaggaacatcgcttttctgtcaatgacattgccgtgtcgaatgacaataccttttttgtgactgcttctgacgactcgagtgtcaaaatctgggatacaagaaagttggaaaaagacattgctttcagatctaggttaacatatagcgtgggtaatagccgagctttatgtacggcaatggttcatggtacttcacaggttattgtcggtggtagcaatggaacattacacttgttttctgtggattgtgcacgaagcgttgggagtgtcgtggaaaggtatgctggaattgttggtgtaaaaaggaatgatatcaaagaaggcgcaattctcagcgttgtaaattgttcacccgacagctttagcccaactgttcttttcagcactgaacattgtggtatccataaatgggatacaagaaccaactcagaattttggtattttaaatcctctccagaggagggctatatatcagcacttgttgtgggccagtgtgggaattggttcatctcaggttcttcaagaggtgtccttacattgtgggataataggtttttactacctgttaactcgtggaactattcaatagtaagcccaatagagaaattgtgcttgcttatacctccaccaagttcaatatcttctgctggaaggccactagttttcgttgctgccggatgcaatgaagtctctctgtggaatgctgagaatggaagctgccaccagatgtttagaacagcgagcactgataatgaagctgtgatgtcaaaggcaccatcaaggcctgttaacaagccaatcattaaagatataataagagcacgtaattataagtacagaatcgatgagttgaatgacccacctgtgcgtcgtccaggcattcgttctttgctacccttaccaggtggtgatctgttaactggaggaacagatttgaagattcgttactgggatcaagccaggcctgagcaaagcttctgtattgctggtccctcggcgaaaaaagtccgttcagctaaagctgacattttagagaaagcagctggaaacgatgagtgttacgatataagatccagttttggagtacaagtcgtgcaggaaatgtacaaacagaataccacggtatccggtttgacgcccaagactcagttcgcggaggcagctgcagattctgccgggtgccatcgtgacgcaatactcgcgctggcatccttcaacttgtctagccagagattgatatcagccagcagagacggtgctgtcaaagtgtggaaatagctgctccagcatgggtaagatgacaagtcctttggcgtgtacatatttgcctggttagtgcttacacagtacacatatgccactagttattgttgtacagaagattgatccacacaagagtcgaaattgacacgtaagctttcatcctgtgtgacctgacctgtgtatataaataccaatggcttacctaccttacagtagtatattcatggattagtaaaagatatcataatgaataggaggtaggaaggctgtctaactacaataacatagggctccaaccataatcctccacacaaaaatgatctttttttgtcggtgctgttattttggacaatgaaag

SEQ ID NO: 40908 - DNA, 4643 bp, Zea Mays
aggcagtaatggggaataagatcgcgcggacgacgcaggcgtcggccacggagtactacctccacgacctgccgtccacctacaacctcgtgctcctcgacgtcgtcagccgcggccgcttcctcaagtccgtccgctgcaagcacgacgaggggctgctcctcgtcaaggtctacttcaagcgcaccggcgagcccatcgacctcaaggagcacgagcggaggctggagcggattaggaaggcgttcaaggggattgatgggtcccatgtatggcccttccaggtttggctgcaaacagataaggcagcatatctcctgagacagtacttcttcaacaacttgcacgatcgactgagtacacgccctttcctcagtcagattgcaaagaaatggcttgcctttcagttaattcatgcagtggagcagagccatagtaagggaatttgccatggtgacataaaatgtgagaatgtgcttgttacttcttggaattggttatatcttgcggactttgcatcattcaagccaacgtatatcccggatgacgacccatctgatttctcattctacttcgacaccggaggaagacgaagatgctatctagcacctgaaagattctacgaacacggtggtgagtcccaagttgcagcagatgcacctctgcaaccatctatggatatattttctcttgggtgcgttcttgctgaacttttccttgaaggtcagccactttttgagctttcccaacttctggcttatcggcgtggtcaatatgaccccatacataccctagaaaagatacaagatactggtatccgtgacatgatacttcacatgacccagttggagcccaaaaaaaggttaccatgtcgaagctatctgcagaaatatgaaattgttgtgttcccattttatttctcaaaatttttgcacaagttcttctcagatattgttccacttgactccgatgccagggttgaaaagactcaagaaaattttgaaaagatacatgaaataatgatgggcagctcaacaattgaacaaattgagaggtccacatcgtgtgagcatagtgaaccatctgggagaaaaggcatgggaggagaaactttatattcaccaggagattatagaaacagcacatccataggtaagaaaaatacttctgtagaccatcaacatattgtcggaggtatcaatttcctcctcaaagaagtggagagcaggagcaacaacacaagcacaaaagtcacaaaagacactgagcattttgttgcaccgagcatttcatgtgcaagtggtgttcagtccttgcagctagttaatccagcaggaagacaaattggaagtggtttgatgagccagaacaatgctgtatctcatgtgaagaagatctcaaagactaacttatgctccttagtggctgcttatgatgatcaatcagatacctatagttttgacatttttcagcagatagacaccaaggtgagctgtgaaggaatggttttgcttgtctcgttactctgctcatgcatacgcagtgtgaaaaaacctgagctaagaagggccagcctaattcttctgaagttctcctccacatacatagatgatgataggcgcttacagctagtgctcccctatgtgattgcgatgctttcagatccatctgccattgtccgttgtgctgctttggaaaccttatgtgatgttctttgtcttgtgcaagatttccctatcagtgatactgttatattccctgagtatgtcctcccaatgctctctttgctccctgatgatacggaagagagtgttagggtttgttatgctagtaacattcacaagctggctttaacagcttacaggttcctacttcgttctcgtagcatcgcgaatattcgacctctggatgaatcactggtagctcacagatcccagtctgcagattcaccagcgaagaggcaagatattttttttcgccaacttgcagaactgaggaaatctatttatgagatagtgcaagatttagtgatgggacaaaagcagacacctaatacccgtagagctcttctgcaggatataggttatttgtgttacttctttgggcacaaacaaagtaacgattttcttctgcctatactcccagcatttctaaatgatcatgatgagcagctccgtgcagttttctttgcccagattgtctatgtttgctattttattggagcaaggagtgttgaggaatatcttctgccatatcttgaacaggcgctaagtgatggtatggaggctatccttgtaaatgcacttgattgcttgaccatgatgtgcaaaagtggttatttgaggaaaagagtaattgttggtctattggtaaaggttctccccctgctccggtatacaatcaattgggttaaacagtctgctgtaagatttgttgctgcctgcagcgagagcttaggatctgtagatacttatgtgtatctttctcctcagctacggcagttcctacacagggagccaccttcattggactctgaaactgctcttctttcatgtcttaagcctccactaccaaaatcaatgttctacgtacctttagaagatgctcaggacattggaaacattttactgaagagcagtggcaagaaagaacagatattacatggtggaagatactctggcatggcacaaagtggatctttgggcaaccttgaagatattcgtcgactgaaaggcactaatatttccagcagcgtgtccttggatgtcaaagactccttttcttttggcaaatcactatattctggttttgctctacatgcatctgctgcaaatagctccttttatgatggcttatctaaaggaataccatcatattctttttgtattgataaccggggtttaggagaaacacacatggtccctgattcatcagtgtataaagcttcgataaggctaccttggttggaaccgaatcgtcctggcatgcagactagagatgatcatttcagtagcaagcggcgagatttaagcatcaatgactctttgaagagcaattcttctttgcaaggggatagcatttcaaactctgatactggaggattgccgttctccagatcagcagtgaacctggagactggatggaagcctcgaggaattctagtggcacatctccaggaacatcgcttttctgtcaatgacattgccgtgtcgaatgacaataccttttttgtgactgcttctgacgactcgagtgtcaaaatctgggatacaagaaagttggaaaaagacattgctttcagatctaggttaacatatagcgtgggtaatagccgagctttatgtacggcaatggttcatggtacttcacaggttattgtcggtggtagcaatggaacattacacttgttttctgtggattgtgcacgaagcgttgggagtgtcgtggaaaggtatgctggaattgttggtgtaaaaaggaatgatatcaaagaaggcgcaattctcagcgttgtaaattgttcacccgacagctttagcccaactgttcttttcagcactgaacattgtggtatccataaatgggatacaagaaccaactcagaattttggtattttaaatcctctccagaggagggctatatatcagcacttgttgtgggccagtgtgggaattggttcatctcaggttcttcaagaggtgtccttacattgtgggataataggtttttactacctgttaactcgtggaactattcaatagtaagcccaatagagaaattgtgcttgcttatacctccaccaagttcaatatcttctgctggaaggccactagttttcgttgctgccggatgcaatgaagtctctctgtggaatgctgagaatggaagctgccaccaggcattcgttctttgctacccttaccaggtggtgatctgttaactggaggaacagatttgaagattcgttactgggatcaagccaggcctgagcaaagcttctgtattgctggtccctcggcgaaaaaagtccgttcagctaaagctgacattttagagaaagcagctggaaacgatgagtgttacgatataagatccagttttggagtacaagtcgtgcaggaaatgtacaaacagaataccacggtatccggtttgacgcccaagactcagttcgcggaggcagctgcagattctgccgggtgccatcgtgacgcaatactcgcgctggcatccttcaacttgtctagccagagattgatatcagccagcagagacggtgctgtcaaagtgtggaaatagctgctccagcatgggtaagatgacaagtcctttggcgtgtacatatttgcctggttagtgcttacacagtacacatatgccactagttattgttgtacagaagattgatccacacaagagtcgaaattgacacgtaagctttcatcctgtgtgacctgacctgtgtatataaataccaatggcttacctaccttacagtagtatattcatggattagtaaaagatatcataatgaataggaggtaggaaggctgtctaactacaataacatagggctccaaccataatcctccacacaaaaatgatctttttttgtcggtgctgttattttggacaatgaaag

SEQ ID NO: 40909 - DNA, 4526 bp, Zea Mays
atggggaataagatcgcgcggacgacgcaggcgtcggccacggagtactacctccacgacctgccgtccacctacaacctcgtgctcctcgacgtcgtcagccgcggccgcttcctcaagtccgtccgctgcaagcacgacgaggggctgctcctcgtcaaggtctacttcaagcgcaccggcgagcccatcgacctcaaggagcacgagcggaggctggagcggattaggaaggcgttcaaggggattgatgggtcccatgtatggcccttccaggtttggctgcaaacagataaggcagcatatctcctgagacagtacttcttcaacaacttgcacgatcgactgagtacacgccctttcctcagtcagattgcaaagaaatggcttgcctttcagttaattcatgcagtggagcagagccatagtaagggaatttgccatggtgacataaaatgtgagaatgtgcttgttacttcttggaattggttatatcttgcggactttgcatcattcaagccaacgtatatcccggatgacgacccatctgatttctcattctacttcgacaccggaggaagacgaagatgctatctagcacctgaaatacaagatactggtatccgtgacatgatacttcacatgacccagttggagcccaaaaaaaggttaccatgtcgaagctatctgcagaaatatgaaattgttgtgttcccattttatttctcaaaatttttgcacaagttcttctcagatattgttccacttgactccgatgccagggtaagtgtcattcaagtctgtagtaacctcagtttcactgttactgttcatcaatgtaaacatagttctctttgaaggttgaaaagactcaagaaaattttgaaaagatacatgaaataatgatgggcagctcaacaattgaacaaattgagaggtccacatcgtgtgagcatagtgaaccatctgggagaaaaggcatgggaggagaaactttatattcaccaggagattatagaaacagcacatccataggtaagaaaaatacttctgtagaccatcaacatattgtcggaggtatcaatttcctcctcaaagaagtggagagcaggagcaacaacacaagcacaaaagtcacaaaagacactgagcattttgttgcaccgagcatttcatgtgcaagtggtgttcagtccttgcagctagttaatccagcaggaagacaaattggaagtggtttgatgagccagaacaatgctgtatctcatgtgaagaagatctcaaagactaacttatgctccttagtggctgcttatgatgatcaatcagatacctatagttttgacatttttcagcagatagacaccaaggtgagctgtgaaggaatggttttgcttgtctcgttactctgctcatgcatacgcagtgtgaaaaaacctgagctaagaagggccagcctaattcttctgaagttctcctccacatacatagatgatgataggcgcttacagctagtgctcccctatgtgattgcgatgctttcagatccatctgccattgtccgttgtgctgctttggaaaccttatgtgatgttctttgtcttgtgcaagatttccctatcagtgatactgttatattccctgagtatgtcctcccaatgctctctttgctccctgatgatacggaagagagtgttagggtttgttatgctagtaacattcacaagctggctttaacagcttacaggttcctacttcgttctcgtagcatcgcgaatattcgacctctggatgaatcactggtagctcacagatcccagtctgcagattcaccagcgaagaggcaagatattttttttcgccaacttgcagaactgaggaaatctatttatgagatagtgcaagatttagtgatgggacaaaagcagacacctaatacccgtagagctcttctgcaggatataggttatttgtgttacttctttgggcacaaacaaagtaacgattttcttctgcctatactcccagcatttctaaatgatcatgatgagcagctccgtgcagttttctttgcccagattgtctatgtttgctattttattggagcaaggagtgttgaggaatatcttctgccatatcttgaacaggcgctaagtgatggtatggaggctatccttgtaaatgcacttgattgcttgaccatgatgtgcaaaagtggttatttgaggaaaagagtaattgttggtctattggtaaaggttctccccctgctccggtatacaatcaattgggttaaacagtctgctgtaagatttgttgctgcctgcagcgagagcttaggatctgtagatacttatgtgtatctttctcctcagctacggcagttcctacacagggagccaccttcattggactctgaaactgctcttctttcatgtcttaagcctccactaccaaaatcaatgttctacgtacctttagaagatgctcaggacattggaaacattttactgaagagcagtggcaagaaagaacagatattacatggtggaagatactctggcatggcacaaagtggatctttgggcaaccttgaagatattcgtcgactgaaaggcactaatatttccagcagcgtgtccttggatgtcaaagactccttttcttttggcaaatcactatattctggttttgctctacatgcatctgctgcaaatagctccttttatgatggcttatctaaaggaataccatcatattctttttgtattgataaccggggtttaggagaaacacacatggtccctgattcatcagtgtataaagcttcgataaggctaccttggttggaaccgaatcgtcctggcatgcagactagagatgatcatttcagtagcaagcggcgagatttaagcatcaatgactctttgaagagcaattcttctttgcaaggggatagcatttcaaactctgatactggaggattgccgttctccagatcagcagtgaacctggagactggatggaagcctcgaggaattctagtggcacatctccaggaacatcgcttttctgtcaatgacattgccgtgtcgaatgacaataccttttttgtgactgcttctgacgactcgagtgtcaaaatctgggatacaagaaagttggaaaaagacattgctttcagatctaggttaacatatagcgtgggtaatagccgagctttatgtacggcaatggttcatggtacttcacaggttattgtcggtggtagcaatggaacattacacttgttttctgtggattgtgcacgaagcgttgggagtgtcgtggaaaggtatgctggaattgttggtgtaaaaaggaatgatatcaaagaaggcgcaattctcagcgttgtaaattgttcacccgacagctttagcccaactgttcttttcagcactgaacattgtggtatccataaatgggatacaagaaccaactcagaattttggtattttaaatcctctccagaggagggctatatatcagcacttgttgtgggccagtgtgggaattggttcatctcaggttcttcaagaggtgtccttacattgtgggataataggtttttactacctgttaactcgtggaactattcaatagtaagcccaatagagaaattgtgcttgcttatacctccaccaagttcaatatcttctgctggaaggccactagttttcgttgctgccggatgcaatgaagtctctctgtggaatgctgagaatggaagctgccaccaggcattcgttctttgctacccttaccaggtggtgatctgttaactggaggaacagatttgaagattcgttactgggatcaagccaggcctgagcaaagcttctgtattgctggtccctcggcgaaaaaagtccgttcagctaaagctgacattttagagaaagcagctggaaacgatgagtgttacgatataagatccagttttggagtacaagtcgtgcaggaaatgtacaaacagaataccacggtatccggtttgacgcccaagactcagttcgcggaggcagctgcagattctgccgggtgccatcgtgacgcaatactcgcgctggcatccttcaacttgtctagccagagattgatatcagccagcagagacggtgctgtcaaagtgtggaaatagctgctccagcatgggtaagatgacaagtcctttggcgtgtacatatttgcctggttagtgcttacacagtacacatatgccactagttattgttgtacagaagattgatccacacaagagtcgaaattgacacgtaagctttcatcctgtgtgacctgacctgtgtatataaataccaatggcttacctaccttacagtagtatattcatggattagtaaaagatatcataatgaataggaggtaggaaggctgtctaactacaataacatagggctccaaccataatcctccacacaaaaatgatctttttttgtcggtgctgttattttggacaatgaaag

SEQ ID NO: 40910 - DNA, 5583 bp, Zea Mays
atggggaataagatcgcgcggacgacgcaggcgtcggccacggagtactacctccacgacctgccgtccacctacaacctcgtgctcctcgacgtcgtcagccgcggccgcttcctcaagtccgtccgctgcaagcacgacgaggggctgctcctcgtcaaggtctacttcaagcgcaccggcgagcccatcgacctcaaggagcacgagcggaggctggagcggattaggaaggcgttcaaggggattgatgggtcccatgtatggcccttccaggtttggctgcaaacagataaggcagcatatctcctgagacagtacttcttcaacaacttgcacgatcgactgagtacacgccctttcctcagtcagattgcaaagaaatggcttgcctttcagttaattcatgcagtggagcagagccatagtaagggaatttgccatggtgacataaaatgtgagaatgtgcttgttacttcttggaattggttatatcttgcggactttgcatcattcaagccaacgtatatcccggatgacgacccatctgatttctcattctacttcgacaccggaggaagacgaagatgctatctagcacctgaaagattctacgaacacggtggtgagtcccaagttgcagcagatgcacctctgcaaccatctatggatatattttctcttggatacaagatactggtatccgtgacatgatacttcacatgacccagttggagcccaaaaaaaggttaccatgtcgaagctatctgcagaaatatgaaattgttgtgttcccattttatttctcaaaatttttgcacaagttcttctcagatattgttccacttgactccgatgccagggttgaaaagactcaagaaaattttgaaaagatacatgaaataatgatgggcagctcaacaattgaacaaattgagaggtccacatcgtgtgagcatagtgaaccatctgggagaaaaggcatgggaggagaaactttatattcaccaggagattatagaaacagcacatccataggtaagaaaaatacttctgtagaccatcaacatattgtcggaggtatcaatttcctcctcaaagaagtggagagcaggagcaacaacacaagcacaaaagtcacaaaagacactgagcattttgttgcaccgagcatttcatgtgcaagtggtgttcagtccttgcagctagttaatccagcaggaagacaaattggaagtggtttgatgagccagaacaatgctgtatctcatgtgaagaagatctcaaagactaacttatgctccttagtggctgcttatgatgatcaatcagatacctatagttttgacatttttcagcagatagacaccaaggtgagctgtgaaggaatggttttgcttgtctcgttactctgctcatgcatacgcagtgtgaaaaaacctgagctaagaagggccagcctaattcttctgaagttctcctccacatacatagatgatgataggcgcttacagctagtgctcccctatgtgattgcgatgctttcagatccatctgccattgtccgttgtgctgctttggaaaccttatgtgatgttctttgtcttgtgcaagatttccctatcagtgatactgttatattccctgagtatgtcctcccaatgctctctttgctccctgatgatacggaagagagtgttagggtttgttatgctagtaacattcacaagctggctttaacagcttacaggttcctacttcgttctcgtagcatcgcgaatattcgacctctggatgaatcactggtagctcacagatcccagtctgcagattcaccagcgaagaggcaagatattttttttcgccaacttgcagaactgaggaaatctatttatgagatagtgcaagatttagtgatgggacaaaagcagacacctaatacccgtagagctcttctgcaggatataggttatttgtgttacttctttgggcacaaacaaagtaacgattttcttctgcctatactcccagcatttctaaatgatcatgatgagcagctccgtgcagttttctttgcccagattgtctatgtttgctattttattggagcaaggagtgttgaggaatatcttctgccatatcttgaacaggcgctaagtgatggtatggaggctatccttgtaaatgcacttgattgcttgaccatgatgtgcaaaagtggttatttgaggaaaagagtaattgttggtctattggtaaaggttctccccctgctccggtatacaatcaattgggttaaacagtctgctgtaagatttgttgctgcctgcagcgagagcttaggatctgtagatacttatgtgtatctttctcctcagctacggcagttcctacacagggagccaccttcattggactctgaaactgctcttctttcatgtcttaagcctccactaccaaaatcaatgttctacgtacctttagaagatgctcaggacattggaaacattttactgaagagcagtggcaagaaagaacagatattacatggtggaagatactctggcatggcacaaagtggatctttgggcaaccttgaagatattcgtcgactgaaaggcactaatatttccagcagcgtgtccttggatgtcaaagactccttttcttttggcaaatcactatattctggttttgctctacatgcatctgctgcaaatagctccttttatgatggcttatctaaaggaataccatcatattctttttgtattgataaccggggtttaggagaaacacacatggtccctgattcatcagtgtataaagcttcgataaggctaccttggttggaaccgaatcgtcctggcatgcagactagagatgatcatttcagtagcaagcggcgagatttaagcatcaatgactctttgaagagcaattcttctttgcaaggggatagcatttcaaactctgatactggaggattgccgttctccagatcagcagtgaacctggagactggatggaagcctcgaggaattctagtggcacatctccaggaacatcgcttttctgtcaatgacattgccgtgtcgaatgacaataccttttttgtgactgcttctgacgactcgagtgtcaaaatctgggatacaagaaagttggaaaaagacattgctttcagatctaggttaacatatagcgtgggtaatagccgagctttatgtacggcaatggttcatggtacttcacaggttattgtcggtggtagcaatggaacattacacttgttttctgtggattgtgcacgaagcgttgggagtgtcgtggaaaggtatgctggaattgttggtgtaaaaaggaatgatatcaaagaaggcgcaattctcagcgttgtaaattgttcacccgacagctttagcccaactgttcttttcagcactgaacattgtggtatccataaatgggatacaagaaccaactcagaattttggtattttaaatcctctccagaggagggctatatatcagcacttgttgtgggccagtgtgggaattggttcatctcaggttcttcaagaggtgtccttacattgtgggataataggtttttactacctgttaactcgtggaactattcaatagtaagcccaatagagaaattgtgcttgcttatacctccaccaagttcaatatcttctgctggaaggccactagttttcgttgctgccggatgcaatgaagtctctctgtggaatgctgagaatggaagctgccaccagatgtttagaacagcgagcactgataatgaagctgtgatgtcaaaggcaccatcaaggcctgttaacaagccaatcattaaagatataataagagcacgtaattataagtacagaatcgatgagttgaatgacccacctgtgcgtcgtccaggcattcgttctttgctacccttaccaggtggtgatctgttaactggaggaacagatttgaagattcgttactgggatcaagccaggcctgagcaaagcttctgtattgctggtccctcggcgaaaaaagtccgttcagctaaagctgacattttagagaaagcagctggaaacgatgagtgttacgatataagatccagttttggagtacaagtcgtgcaggaaatgtacaaacagaataccacggtatccggtttgacgcccaagactcagttcgcggaggcagctgcagattctgccgggtgccatcgtgacgcaatactcgcgctggcatccttcaacttgtctagccagagattgatatcagccagcagagacggtgctgtcaaagtgtggaaatagctgctccagcatggctatgattattcaggctacggtgcttctacaggaaaaccatcagagtacaacacctacaatgacatagaggctgtttatgattgcttgagaacggagtatgggatagaagaagaggatctaatcctgtatgggcaatccgttggaagtggaccaacgttgcatctagcctcacgtctcgagaagttaagaggggttgtcctccacagcggcatactctctggcatacgggttctgtatccagtgaaagtgacgctttggttcgacatcttcaagaacatcgacaaaataaagcaggtggactgccctgtgttagtcatacatggcacagccgacgacatcgtggacttggctcacggcaagcggctgtgggagctagccaaggacaagtatgagccgctgtggatcaaaggcggtgggcactgcaacctggagacgtacccggagtacatcaggcacatgcgcaagttcataagcgccatggagaagctggccaaggacagcagcaaggcggcccaggcgccgccgccgtcgagcatggccgccgaagaaagacacaccaagtgcttgagattcgggaagagatgaggtaccgtatcggccttctttagctgtgtacgcccagtcaagtcacgaaaacgctgatgcactgcgttgccttgctgccgctgctttcgtgtgcaagtccaagaagcgatagcacaggtcgtcagtgagccggccaggcggatggatggatggaggtttcctgttgagtttcatggactctctctttctctctctgcagatgccggcgacctggacctgggaaggaaacgcggtgcagcagcaaccctagttcgtgtatcatccgtgtgagattgagttcagacttcagagtagagagtagacagagtggagtgacagacagacctgtggctgctgtagtatgctgtacgtgctggagttcaggactagagagatgtctttgttttcctaggggcgccacggattagcctgttcgcagctgaattttttcttgttttttttttctgttttcgctatctgtattgtagtcactgtgcaaaaaaaatcgttttgattgattggctgcaaaaagtgaagtgcgctattgcgctgtgactagggccacgaaatgtccgttgctcgcttggttcttggatagctcaattcggataagttcttttaaatcggtttgtggttagctcgattcggatcagttcttttaattttt

SEQ ID NO: 40911 - DNA, 3044 bp, Zea Mays
aaagcactagattcaccaaaacaaagtggcaggtctagcctagctattaagcgacaaagctcagttctagcaacaaaaggagaatactcctaatgattaacagatccatctgaattatatttaagcaaagattaagatttcccagatctatccttctctttcttagcagggcaaagatccaagtgtctgatcaaatggccagttccagatgaagatttagtagacatgctattcttgcagtgaagacaaatggcagatactcttacctccttaccattttgcatcacagttacctcctcaaagtgcagccataccttagaggttagagctctcctcctagaacgtttatcaggcacaaggacagaggtgctcgcgtcggccgttgggcttgtggagcccgtgtatgttcgggtcgtttgggccccggcgccgtccagatcgatggtagcgacaccaaggaggaggcaccgagcatcctctgcctcattatgtgcttcaagccaccgctcctcgaccacgacatcgatattgagctcatcgtcaaccgagtccgtggacatggccaccgccttagtcgacttctccagctcctcacggtgcgcggcgcacacacacggcgcacacctgaacatatcgagcttacggttagggttatgtgctcacggcggcgagcgagagaacgagaaagaagacggctcacacggcgacggagcgagagaacgagaaaggaagacggcacctagagaccaaaaaaggaagacgatacacacacaaacgactcacggcgacggagcgagaaatgaagaaccgagagaacgagatttagggttacctgcaacaccggagcaccggatccaccaacgacaaggcagacggcagagccgcagaggtagaggagcgagcttggcgtaaccgtttagggttagggtgcaccgttacagtgaacaagcggagcgagaaaggaagaggataggacggaccgagagaggaagaggaagattagcgtcggccgtcgaccggagttctccaccggcgccggccgccagcaagcgctaaccctaaatctccaagccgagtcgcccgtgaccgcgagagagaggagaaaggagcagagcaggcagcagagttctgaaatttggagaaatgagcgaccgcgtgtccgcgagtcttacagactcgttttttaacgggtccatgccgtgccagcgccttaaccgggccgggcccgtgccaccaccgcgtgccaagccgcctgccaagcacgatacgcgcaccgggccaggttggaacgggcacggcggcctgcgtgccggaccaggtctaggccgtgctaaggcgtgctgggccatgggctgtatatcgggcccggcccggtttggacatgtatactcaaaaggacggggaagacgaggccgcaactccgcgggagcaacagccagccaaccacctctcgttggaacctgcgactgcgagttccacctccgcccgcccgctcgcccacgctcacgcccggaataggcagttgcagcagccagccagccccgcgcgccccgccatcgtgggaggaggcccatgccgcgggggcagcagggggaagggtagaatgggcaacgtcacgtcgtcggtggcggcgcggctggccttcttcccgccggagccggccacgtacggcgtcgagcccgcggccgagaacggcgccctgctgcggatgacgggggtgttgccggacgcgggcgtcgaggtgcgcgcgctgcccaccagggccggcacgcgcgtcgtctccgccttctggcgccaccccgcggcgcggctcacgctgctctactcccacggcaacgccgccgacctcggccagatgctcggcctcttcctcgagctccgcgcgcacctccgcgtcaacatcatgagctatgattattcaggctacggtgcttctacaggaaaaccatcagagtacaacacctacaatgacatagaggctgtttatgattgcttgagaacggagtatgggatagaagaagaggatctaatcctgtatgggcaatccgttggaagtggaccaacgttgcatctagcctcacgtctcgagaagttaagaggggttgtcctccacagcggcatactctctggcatacgggttctgtatccagtgaaagtgacgctttggttcgacatcttcaagaacatcgacaaaataaagcaggtggactgccctgtgttagtcatacatggcacagccgacgacatcgtggacttggctcacggcaagcggctgtgggagctagccaaggacaagtatgagccgctgtggatcaaaggcggtgggcactgcaacctggagacgtacccggagtacatcaggcacatgcgcaagttcataagcgccatggagaagctggccaaggacagcagcaaggcggcccaggcgccgccgccgtcgagcatggccgccgaagaaagacacaccaagtgcttgagattcgggaagagatgagtccaagaagcgatagcacaggtcgtcagtgagccggccaggcggatggatggatggaggtttcctgttgagtttcatggactctctctttctctctctgcagatgccggcgacctggacctgggaaggaaacgcggtgcagcagcaaccctagttcgtgtatcatccgtgtgagattgagttcagacttcagagtagagagtagacagagtggagtgacagacagacctgtggctgctgtagtatgctgtacgtgctggagttcaggactagagagatgtctttgttttcctaggggcgccacggattagcctgttcgcagctgaattttttcttgttttttttttctgttttcgctatctgtattgtagtcactgtgcaaaaaaaatcgttttgattgattggctgcaaaaagtgaagtgcgctattgcgctgtgactagggccacgaaatgtccgttgctcgcttggttcttggatagctcaattcggataagttcttttaaatcggtttgtggttagctcgattcggatcagttcttttaattttt

SEQ ID NO: 40912 - DNA, 1569 bp, Zea Mays
gtcgtgatctccttgcaacgaatcctaggctagaaaaacaaccaagtaatctctctacttcctcttccttaccatgtagagaaggcatgtgatctcatgccttatgaacagtaccaattattgtactagtacatcgtttcacaggtctttgttgtgttgctgataaatgctgcaccggcctgttgtaccttcgccgtccttgccttcagaaatttcagttagttacgggtcaccactctgacacaagatcaaaatgtatatgtggggctctaactatgttgtatgtatatatgcgagaccgcgaatctgggtcaatttcgtgcctcttatcaaagttgagagcaaagcaaaactcaaaagagcgccatgtcctttgttcttctagcccattgtttttgcccaaccaaagataacccaccacctttaaaaaaaaaggataacccaccaggatatatctgctactcttgtatcaagtctaagtttcatcacaggcagatggatgtataactttctagtgatctacacgacacctactctatgattattcaggctacggtgcttctacaggaaaaccatcagagtacaacacctacaatgacatagaggctgtttatgattgcttgagaacggagtatgggatagaagaagaggatctaatcctgtatgggcaatccgttggaagtggaccaacgttgcatctagcctcacgtctcgagaagttaagaggggttgtcctccacagcggcatactctctggcatacgggttctgtatccagtgaaagtgacgctttggttcgacatcttcaagaacatcgacaaaataaagcaggtggactgccctgtgttagtcatacatggcacagccgacgacatcgtggacttggctcacggcaagcggctgtgggagctagccaaggacaagtatgagccgctgtggatcaaaggcggtgggcactgcaacctggagacgtacccggagtacatcaggcacatgcgcaagttcataagcgccatggagaagctggccaaggacagcagcaaggcggcccaggcgccgccgccgtcgagcatggccgccgaagaaagacacaccaagtgcttgagattcgggaagagatgagatgccggcgacctggacctgggaaggaaacgcggtgcagcagcaaccctagttcgtgtatcatccgtgtgagattgagttcagacttcagagtagagagtagacagagtggagtgacagacagacctgtggctgctgtagtatgctgtacgtgctggagttcaggactagagagatgtctttgttttcctaggggcgccacggattagcctgttcgcagctgaattttttcttgttttttttttctgttttcgctatctgtattgtagtcactgtgcaaaaaaaatcgttttgattgattggctgcaaaaagtgaagtgcgctattgcgctgtgactagggccacgaaatgtccgttgctcgcttggttcttggatagctcaattcggataagttcttttaaatcggtttgtggttagctcgattcggatcagttcttttaattttt

SEQ ID NO: 40913 - DNA, 2702 bp, Zea Mays
gacagagacagagatgtttgacgtgtggagtgtcgtgggatggtgggacaggtggcagctgcgcgtcctcgtcctcggcagcctcggcatccagtggtttctgctggtggctgcccccatgcgcaagtacaccatccgccccggcctcaggctatgcatctggcttgcctacatcagcagcgacgctctggccatctacgcgctcgccaccctcttcaaccgccacgccagggcgaccagcagcagcagttgtgacggcggtgccaacagcaaggcgaggatcctggaggtcctctgggctcctgtcctgctcatccatctcggcgggcaggaggagctgaccgcctacaccatcgaagacaacgagctgtggacacggcacaccgtgaccctcgtgtcccaggtcgcggttgccctctacgccttctacaagtcctggcccaaccccagcgactggaagctgctggcgtccgcgatcctgctcttcatcatcggggtcgtcagcttcagcgagaagccatgggcgctcaagaaagccagcatcaacaggctggcgtctgtgtcggccacgatacaggggaccaagaagcgcacgaggctggcggtgtacttggacgatcttctcttctccgattggtacagctgctccagagccaccgagaagagtagcagcagcggtagtagcctccccgcagccgcagccgcggcaggtgtgggttggcacgactgcttctccttcaccgagccgagcaataaggggcacggcgatcatgtgggcttgtcggaggcagataaagtctacatggtgctctcggacatgtcgctgtccgcggccgccgacgaccttgtgctgcgaggcagggctcgaaatgtggaggatgttcttcggcccctgagcaccaaggcggagcaggcactcaagcgctggctgcgtggcgcgtttgggctcatatacaccagagccaacctggtcttcactcgcacgtacctggtgtaccatgtgctggtggtgccgatcctgcacgtcgccgccctcacgctgttcgcgacgagcgacaagcacgggtacgaccgcaccgacgtgaagatcacgtacgtcctcctgtgcctcaccgccgcgctggacgtccttgcggtgttcgtccgccagctgctgtacggggccatgtccgccaaaggtgtcccggcgctgtgcgagacggtgccaggctacaacctcgtggacgcggtcacccggcggaggcagaaggacattgggtggctgttcaggtgcgccgccgccatgggctgcaaggaggagtacttggagtactgcaagtgcggcggggggcagcagcactacacactgtacaagaatgtgtcgaagatggtccttgcggatctggtggacgcacagggccgcgacctcgccaactacagagtcttcacggtgccctacgcatcacctgcaagcactgctgccgggccggccgtggagcagcagcgcgcatcgccagcaggcgcggccaactgggctctcagcgaggagcagcagaagctgtgcggccgcaaggtccgggacaccctgcgtgggtccttcgacaggagcgtcctcgtctggcacatcgccaccgacctctgcttccgcatggaacaagttcctcctgacgccgacaaggaagaagactcgcactggctccgcatcaagtgcacggaagcgatatcctgctacatggctcgcctgctcgactcccaccccgacatgctgctcaccggcagcaggcggcacctggtcagcgaagccttggatgaactcgagtccatctttgaccgcaccatggtagatcgcagcggcaagccaccgggcaaagacgacctgcacaagatcatcgacgacgtggcgcgggtacgtttccaggtgcccgtcggcgtcgctcatggagctgcagacgacgacggggaggaggcggtacagtctttcttccacatccccgaggcatgcgggcttgcaatggagctgctgcagcttgaagcgtccacgcgctggagggtgatgtatcgggtgtggctgggcatgctcttctactccgccagcatgtgcaggggctacctgcacgctaagagcttgggtgaaggtggcgagttcctttcctacgtctggctcgtcctctcgctcaagggggccaagaccctggccgacaagcttcagatgttggaggtggaaggggacgacaggcagggacgaagggttgagatgcggaatgaggagcttcagattcggggagacgacagggagccagcaccccgatcgatgcccaccactagcagcttgtttcaaacctgatcaaatcctccaatccaatcgccgatgccatgattttactatatatcaattctcctgtttgtttgttcgtttaatttctagccagcgttctccgacccaactactggccggtttgtttgtcgccttgcctttgtttaataagctcagcccctcactttgaatcaatgtgtttcgactagagatgaccaaacggaccggcccggcttggatctggtgaagcccagctcattttgggcccggcccgccagatacggttagaaaatcgggccggtccgactaagcacgcgggctcaattttctgtccgagcccgacccgcagcgggcctaaacgggccggaccggcctgtttagcacgaaaaaacaggctatgcgggccgaa

SEQ ID NO: 40914 - DNA, 1085 bp, Zea Mays
ttcatctccctgctcagctcgccacgccgaactgcccagcgccgcgcgcctggctcgcccgtccacgatccacctcgtccatggccgcgcgtccatcttactcctttggtccgcgtctctctggctcggccgtctccagctcgccttgctccctgctgctcgctcggccgagctccctggccaccgcgccgtggattttcctgcgcacgcgtcgccgtcgagttctctggtgtttgtgcatcgtgaagtacctccaacgctgtggcttcccagttccttctggtcgcgcgcagctctcccagctcgtcggtgttcccagctcgccctgtctgcgcgccgcgctctcttgttgtggttttctgcttccttgtcgcgcgcgcagcatttcgttttccctcgtcgtgccaagttctcctctgcacgcagtcgcgtcctgtttcctgctcgtcagtgtgccctctcggctcgctcggctttaattcccaatcgcgtcgtcgacctcatcattcgccgtcgttcgtcgtcctctagtcccagttcgacccatccgtgctttcgctcctcattcatcaggcttcgcatgtgctcgtcgtttgccgtcgagtcattgaacccgtcatccccggcttgatccccacctcaccagcttactccagacttcaatcgaaggtcgtcgtcgttcgtgcatccccaagaaatcccaagaatcaggtgaagacgaagaccagcagcgtggtgttcaccaagtacgcgacaaaaagctcggacatcctgcgtgactcaagttcaattcgtcaaaattattcagtcgaggaaaagatcttcagcaattgattaccgaagaaaagaaggcccctggatgacgtcaaccggaaaccgtcgtcgtgcttgtgactatcacgtcaaattagttagggtacgttaattaattgcgtgatatagaagacaacccaagtcgaccccaagcgcgggctaatccacaagatgatgttgatggacgaaccggaagatggataatctgaacgagtgcgtgccaggacaaatgatggtcgtcaagtggacatcacctaacaacactaacctag

SEQ ID NO: 40915 - DNA, 2070 bp, Zea Mays
tgaaaacaaggctacgattttttgcaaagtagagtttaaaatagaggatgttataggaggtaatgtgacaagaaatctgctagagatatatatagctttaggtctctttaatttccacgatatgccctaggtcggcctaatattctctgattctttgatggagccaacaagttggagtttgcaccgcacgccaatgcaaagataacgtattctcgctcaagcacaagtgggtgagcatctattctattctttgccccaccacgcacagcgatgatgcaatgcttgctgcaagtgaagaatatagagagagagagaggggctaggcttttgtgagcacatattcgttccttgccgcatgcatgcagatcgatggacggccttagctcccactatactactccatatataatgccctgctccttcctcacgagctagctcaccggccgctcagcatggacagctactatttgtactggcaggggaagtggtattggtggtcggggtactggaacgatcctaacgataccgccggtgtcttccttgatctatgtgcatgtaggcagacgttacccagcagttaatatagttatattaactaatgcctccttcaactatgcgttgggcatgggagcattagccgaaccacctcaggacagctctgccgacggtgtgatcttgatcaaggatatggcggagtggcaaaagcactgggaccagactgctccatacaacaagctgctggtgtatgagttctacgaaaagaattcctcgctgtgcaaggccatggacaagccgttcgagaagctcgccacgcagtacaaaggcagggccgacttctgcaagctggacgtggacaactttgagcttttggcgcggatttgcggagtggagggagcgtatccgacgttcgtgctgttcaagaaatgcgcgcaggtgggcaaggtcgttggcctcaaggaggacgacctcgagcggatcgtccagcgagcgataataagctagggcgtgttcggctggctacaagccgacactgttgcagctgtttggattgctgcagctgcaatccatagagagaaaaatactgtagaagccgcagccgcagccggattgcagccgcagcaagccgcagcgaacaagctgctagctaggagtagtcgtcaactcgtcatgtagtaccacacagactcagttttcgtacgtgtgccaagacaaaactacaaaaggacatgactatgcgtacgcatcgatcggcacagtggcggatctacaccctctgtggctggggcttgatccatgtatctttatataagtctctatttaatacgatataaaatagttaagataaaatgaagatgagaaaatttggtagatttagtccggatcataaaaaaattctggatccatccctggatcggcatgctaccaaaaatatgtacgataaagcgtacgtggtacatatatatggtcggtctatcgtcgacctagctaggattttagtagagacataactattaaaagaaattcgtgaataaatttagtacttccaccaactagtcaaagttgttaattagtctttgcacgcgtactgccacactatttgtttcctgacacgtctcatgtatcaagtcttaactagatatactcctctgtaaattatggggatatctgcctgtcatgaatttatcagatattctataccttttctttctatctattctatatctatataatttcccccttagcgtcataacttcacgtgtcatcaatatatgtttcgttcataccttagattatatgctccttatggtgctcctcctacgttccctcccacctatggtgctcctcccacatgtggtacccctgctccttctcgtgctcccttaaaaacagtagtgctaccaagtagccagaatgatgcagactccaactagtccacgttctctggtgcatcatagtttcaatggcgacgggcctggactaagatggaggatcaaaggcttgtaaatacgcgtacacttttatgaattccatactttttgaaagtacaaaatattttttgagtttgtacaa

SEQ ID NO: 40916 - DNA, 2032 bp, Zea Mays
tgaaaacaaggctacgattttttgcaaagtagagtttaaaatagaggatgttataggaggtaatgtgacaagaaatctgctagagatatatatagctttaggtctctttaatttccacgatatgccctaggtcggcctaatattctctgattctttgatggagccaacaagttggagtttgcaccgcacgccaatgcaaagataacgtattctcgctcaagcacaagtgggtgagcatctattctattctttgccccaccacgcacagcgatgatgcaatgcttgctgcaagtgaagaatatagagagagagagaggggctaggcttttgtgagcacatattcgttccttgccgcatgcatgcagatcgatggacggccttagctcccactatactactccatatataatgccctgctccttcctcacgagctagctcaccggccgctcagcatggacagctactatttgtactggcaggggaagtggtattggtggtcggggtactggaacgatcctaacgataacgttacccagcagttaatatagttatattaactaatgcctccttcaactatgcgttgggcatgggagcattagccgaaccacctcaggacagctctgccgacggtgtgatcttgatcaaggatatggcggagtggcaaaagcactgggaccagactgctccatacaacaagctgctggtgtatgagttctacgaaaagaattcctcgctgtgcaaggccatggacaagccgttcgagaagctcgccacgcagtacaaaggcagggccgacttctgcaagctggacgtggacaactttgagcttttggcgcggatttgcggagtggagggagcgtatccgacgttcgtgctgttcaagaaatgcgcgcaggtgggcaaggtcgttggcctcaaggaggacgacctcgagcggatcgtccagcgagcgataataagctagggcgtgttcggctggctacaagccgacactgttgcagctgtttggattgctgcagctgcaatccatagagagaaaaatactgtagaagccgcagccgcagccggattgcagccgcagcaagccgcagcgaacaagctgctagctaggagtagtcgtcaactcgtcatgtagtaccacacagactcagttttcgtacgtgtgccaagacaaaactacaaaaggacatgactatgcgtacgcatcgatcggcacagtggcggatctacaccctctgtggctggggcttgatccatgtatctttatataagtctctatttaatacgatataaaatagttaagataaaatgaagatgagaaaatttggtagatttagtccggatcataaaaaaattctggatccatccctggatcggcatgctaccaaaaatatgtacgataaagcgtacgtggtacatatatatggtcggtctatcgtcgacctagctaggattttagtagagacataactattaaaagaaattcgtgaataaatttagtacttccaccaactagtcaaagttgttaattagtctttgcacgcgtactgccacactatttgtttcctgacacgtctcatgtatcaagtcttaactagatatactcctctgtaaattatggggatatctgcctgtcatgaatttatcagatattctataccttttctttctatctattctatatctatataatttcccccttagcgtcataacttcacgtgtcatcaatatatgtttcgttcataccttagattatatgctccttatggtgctcctcctacgttccctcccacctatggtgctcctcccacatgtggtacccctgctccttctcgtgctcccttaaaaacagtagtgctaccaagtagccagaatgatgcagactccaactagtccacgttctctggtgcatcatagtttcaatggcgacgggcctggactaagatggaggatcaaaggcttgtaaatacgcgtacacttttatgaattccatactttttgaaagtacaaaatattttttgagtttgtacaa

SEQ ID NO: 40917 - DNA, 1990 bp, Zea Mays
tgaaaacaaggctacgattttttgcaaagtagagtttaaaatagaggatgttataggaggtaatgtgacaagaaatctgctagagatatatatagctttaggtctctttaatttccacgatatgccctaggtcggcctaatattctctgattctttgatggagccaacaagttggagtttgcaccgcacgccaatgcaaagataacgtattctcgctcaagcacaagtgggtgagcatctattctattctttgccccaccacgcacagcgatgatgcaatgcttgctgcaagtgaagaatatagagagagagagaggggctaggcttttgtgagcacatattcgttccttgccgcatgcatgcagatcgatggacggccttagctcccactatactactccatatataatgccctgctccttcctcacgagctagctcaccggccgctcagcatggacagctactatttgtactggcaggggaagtggtattggtggtcggggtactggaacgatcctaacgataacgttacccagcagttaatatagttatattaactaatgcctccttcaactatgcgttgggcatgggagcattagccgaaccacctcaggacagctctgccgacggtgtgatcttgatcaaggatatggcggagtggcaaaagcactgggaccagactgctccatacaacaagctggccatggacaagccgttcgagaagctcgccacgcagtacaaaggcagggccgacttctgcaagctggacgtggacaactttgagcttttggcgcggatttgcggagtggagggagcgtatccgacgttcgtgctgttcaagaaatgcgcgcaggtgggcaaggtcgttggcctcaaggaggacgacctcgagcggatcgtccagcgagcgataataagctagggcgtgttcggctggctacaagccgacactgttgcagctgtttggattgctgcagctgcaatccatagagagaaaaatactgtagaagccgcagccgcagccggattgcagccgcagcaagccgcagcgaacaagctgctagctaggagtagtcgtcaactcgtcatgtagtaccacacagactcagttttcgtacgtgtgccaagacaaaactacaaaaggacatgactatgcgtacgcatcgatcggcacagtggcggatctacaccctctgtggctggggcttgatccatgtatctttatataagtctctatttaatacgatataaaatagttaagataaaatgaagatgagaaaatttggtagatttagtccggatcataaaaaaattctggatccatccctggatcggcatgctaccaaaaatatgtacgataaagcgtacgtggtacatatatatggtcggtctatcgtcgacctagctaggattttagtagagacataactattaaaagaaattcgtgaataaatttagtacttccaccaactagtcaaagttgttaattagtctttgcacgcgtactgccacactatttgtttcctgacacgtctcatgtatcaagtcttaactagatatactcctctgtaaattatggggatatctgcctgtcatgaatttatcagatattctataccttttctttctatctattctatatctatataatttcccccttagcgtcataacttcacgtgtcatcaatatatgtttcgttcataccttagattatatgctccttatggtgctcctcctacgttccctcccacctatggtgctcctcccacatgtggtacccctgctccttctcgtgctcccttaaaaacagtagtgctaccaagtagccagaatgatgcagactccaactagtccacgttctctggtgcatcatagtttcaatggcgacgggcctggactaagatggaggatcaaaggcttgtaaatacgcgtacacttttatgaattccatactttttgaaagtacaaaatattttttgagtttgtacaa

SEQ ID NO: 40918 - DNA, 2036 bp, Zea Mays
tgaaaacaaggctacgattttttgcaaagtagagtttaaaatagaggatgttataggaggtaatgtgacaagaaatctgctagagatatatatagctttaggtctctttaatttccacgatatgccctaggtcggcctaatattctctgattctttgatggagccaacaagttggagtttgcaccgcacgccaatgcaaagataacgtattctcgctcaagcacaagtgggtgagcatctattctattctttgccccaccacgcacagcgatgatgcaatgcttgctgcaagtgaagaatatagagagagagagaggggctaggcttttgtgagcacatattcgttccttgccgcatgcatgcagatcgatggacggccttagctcccactatactactccatatataatgccctgctccttcctcacgagctagctcaccggccgctcagcatggacagctactatttgtactggcaggggaagtggtattggtggtcggggtactggaacgatcctaacgatagcagacgttacccagcagttaatatagttatattaactaatgcctccttcaactatgcgttgggcatgggagcattagccgaaccacctcaggacagctctgccgacggtgtgatcttgatcaaggatatggcggagtggcaaaagcactgggaccagactgctccatacaacaagctgctggtgtatgagttctacgaaaagaattcctcgctgtgcaaggccatggacaagccgttcgagaagctcgccacgcagtacaaaggcagggccgacttctgcaagctggacgtggacaactttgagcttttggcgcggatttgcggagtggagggagcgtatccgacgttcgtgctgttcaagaaatgcgcgcaggtgggcaaggtcgttggcctcaaggaggacgacctcgagcggatcgtccagcgagcgataataagctagggcgtgttcggctggctacaagccgacactgttgcagctgtttggattgctgcagctgcaatccatagagagaaaaatactgtagaagccgcagccgcagccggattgcagccgcagcaagccgcagcgaacaagctgctagctaggagtagtcgtcaactcgtcatgtagtaccacacagactcagttttcgtacgtgtgccaagacaaaactacaaaaggacatgactatgcgtacgcatcgatcggcacagtggcggatctacaccctctgtggctggggcttgatccatgtatctttatataagtctctatttaatacgatataaaatagttaagataaaatgaagatgagaaaatttggtagatttagtccggatcataaaaaaattctggatccatccctggatcggcatgctaccaaaaatatgtacgataaagcgtacgtggtacatatatatggtcggtctatcgtcgacctagctaggattttagtagagacataactattaaaagaaattcgtgaataaatttagtacttccaccaactagtcaaagttgttaattagtctttgcacgcgtactgccacactatttgtttcctgacacgtctcatgtatcaagtcttaactagatatactcctctgtaaattatggggatatctgcctgtcatgaatttatcagatattctataccttttctttctatctattctatatctatataatttcccccttagcgtcataacttcacgtgtcatcaatatatgtttcgttcataccttagattatatgctccttatggtgctcctcctacgttccctcccacctatggtgctcctcccacatgtggtacccctgctccttctcgtgctcccttaaaaacagtagtgctaccaagtagccagaatgatgcagactccaactagtccacgttctctggtgcatcatagtttcaatggcgacgggcctggactaagatggaggatcaaaggcttgtaaatacgcgtacacttttatgaattccatactttttgaaagtacaaaatattttttgagtttgtacaa

SEQ ID NO: 40919 - DNA, 1245 bp, Zea Mays
caacgctgccaccaattcgcagctccaccaaacggctcgtcgccgtcgcagtcgcagccatttttctgtcggtctgtcccccgcgcgtgccgcttctcacctgtgcacctcgccgactcctcggatttgtcatattcgcctgaggtgggctcagtcgctgagagtggccacggtgaggaaggacgaggaagagggggccgcggaccgcgtgccgcacctgccgtggatgcggtaccccgtcgatatcgacaccttctctggctgccccgtcacacagctcccccgcctcgacccgagtaggttcagcagttggtcaatcatcaatagcagatgaagtttctagtcttgtcccgaagcccaaacaagagttttacccaactattgacgaagaatatgtccaaatggaaccacagactaaaattgatatattggtggcaacccctgaaagactaatggatcacattaacatgacaaatggtttcagtctggagcatcttcagtacctggtcattgatgaaacagatcgaatggtaagagaggcttatcaatcctggttgccaacagtgatccaacttacacactcaattagccaaggtcattcctggcatgacattgatagccaaactctacttcatccattgacttctattagaagatcgggtgtggagcgtgtatttaaaggtaaatgctatccaagattggggaagatggttttatctgctacactgactcaagatcctagcaagctatcacaacttgaattgcaccatcccttgttgttgaatagtgggaagaagcgctattgaattcctacaaaacttgagtcctacaaactgatatataaattaaacttaaaaccactctctctccttgttcttctccaagaactgcaagggaataagtgcttagttttacgtcatctgtggaatcaagtcaccgactaagcacattagcagagatgttctcgccatctctctttagtgttgcgggtgtttagtctgatgttgccgctgtttttctcgctgtgcgtgcagcacatccgcgtcgcggcatttcatctctttctctgcacatgtgggtactgctattactgttggtcaacaacgaacttgactagaagggtgaacatgttgttgttgtatattattttacttgaatctgtttacgccgatctgaatgtcaaacactgggagatgaatcgtctgtcggtgctctatggagacgcggacggtccgcgacctggac

SEQ ID NO: 40920 - DNA, 1170 bp, Zea Mays
gtcattacttcgcgtgttgatggaaaattgaatcagtgctggtgcaaggtgacccccaaaaggatgatgagccagtagagtattctgtggagggcttggttctgtaaatcagaaattgtggatccatatggcttcaccatggaaacattgttttgaggattatcctacaaatatatgttagagaggtttttgatgatattgctcctatggtgggcttgtcagtaggttcagcagttggtcaatcatcaatagcagatgaagtttctagtcttgtcccgaagcccaaacaagagttttacccaactattgacgaagaatatgtccaaatggaaccacagactaaaattgatatattggtggcaacccctgaaagactaatggatcacattaacatgacaaatggtttcagtctggagcatcttcagtacctggtcattgatgaaacagatcgaatggtaagagaggcttatcaatcctggttgccaacagtgatccaacttacacactcaattagccaaggtcattcctggcatgacattgatagccaaactctacttcatccattgacttctattagaagatcgggtgtggagcgtgtatttaaaggtaaatgctatccaagattggggaagatggttttatctgctacactgactcaagatcctagcaagctatcacaacttgaattgcaccatcccttgttgttgaatagtgggaagaagcgctattgaattcctacaaaacttgagtcctacaaactgatatataaattaaacttaaaaccactctctctccttgttcttctccaagaactgcaagggaataagtgcttagttttacgtcatctgtggaatcaagtcaccgactaagcacattagcagagatgttctcgccatctctctttagtgttgcgggtgtttagtctgatgttgccgctgtttttctcgctgtgcgtgcagcacatccgcgtcgcggcatttcatctctttctctgcacatgtgggtactgctattactgttggtcaacaacgaacttgactagaagggtgaacatgttgttgttgtatattattttacttgaatctgtttacgccgatctgaatgtcaaacactgggagatgaatcgtctgtcggtgctctatggagacgcggacggtccgcgacctggac

SEQ ID NO: 40921 - DNA, 997 bp, Zea Mays
cagaaattgtggatccatatggcttcaccatggaaacattgttttgaggattatcctacaaatatatgttagagaggtttttgatgatattgctcctatggtgggcttgtcagtaggttcagcagttggtcaatcatcaatagcagatgaagtttctagtcttgtcccgaagcccaaacaagagttttacccaactattgacgaagaatatgtccaaatggaaccacagactaaaattgatatattggtggcaacccctgaaagactaatggatcacattaacatgacaaatggtttcagtctggagcatcttcagtacctggtcattgatgaaacagatcgaatggtaagagaggcttatcaatcctggttgccaacagtgatccaacttacacactcaattagccaaggggtgtggagcgtgtatttaaaggtaaatgctatccaagattggggaagatggttttatctgctacactgactcaagatcctagcaagctatcacaacttgaattgcaccatcccttgttgttgaatagtgggaagaagcgctattgaattcctacaaaacttgagtcctacaaactgatatataaattaaacttaaaaccactctctctccttgttcttctccaagaactgcaagggaataagtgcttagttttacgtcatctgtggaatcaagtcaccgactaagcacattagcagagatgttctcgccatctctctttagtgttgcgggtgtttagtctgatgttgccgctgtttttctcgctgtgcgtgcagcacatccgcgtcgcggcatttcatctctttctctgcacatgtgggtactgctattactgttggtcaacaacgaacttgactagaagggtgaacatgttgttgttgtatattattttacttgaatctgtttacgccgatctgaatgtcaaacactgggagatgaatcgtctgtcggtgctctatggagacgcggacggtccgcgacctggac

SEQ ID NO: 40922 - DNA, 736 bp, Zea Mays
atgtgatatgaatatgatccctttggaccaataatttcgattcctcctcacctaacaaagagcagacacgacagcttcgcgacaaatttagcagagaagaaaagctgaggacgcaggagcagcttggcccaaaaggagaggaggtaaagaggcacagaaaagctactcctattttacaagaacatggaaagatgggagctaaaggttgctgcatgattaaacatcatttcttataaacaaacaaaaggagggagagagggcaggaaaggtagccctgctaggccacttggcaattccaaccctacaagatctccctccctcccttctgaacacacgacctctcaagacaagatcactgcttaccgccggcaccggcatacttgatggtcctagaaccatcgtcgccaccggcaccaccactgtcgtcgtgcaagggacctctagcgccttccactgagcccacggaggggcggggcaggagggacggcggcggcgacgacgacgtggaggaggagatggccgaggccaaggagatcggcatcaggcacagccccttgccctgcaggtactgcatggcagtgcccatgtcctcctccatcagcctggccacctgttgctccgtcacccgcaggctgctgccgccaccaccgttatcaccgttggtggcaccatcgccgccgtcgtcgcttgtgccgtttccggctctgtcgtcgccctctgatgccatgctggcgac

SEQ ID NO: 40923 - DNA, 483 bp, Zea Mays
caacttcagttcagactactgataatagtagcacctttgagcactgctgctgaaaatgagctgcgccgaattgccacctgaaaccccagctgtgaacggagaagggtcatctgccgccaccgccgccgctcctggtgccgggtcgaagccgaaaaagaagatatgctgcgcgtgccctgatacaaagaggctgagggatgagtgcgtcgtcgagcacggtgagcctgcttgcaccaagtggatcgaagctcacaagcgatgcctccgtgctgaggggttcaatgtctgaaacttgtagtctgtcgggctcgctttcctagaaccgtaggaaatggaaacattagaaaaatagagttatacaactagtcataataataccttaatgccaggagttatacggtaaggggaaatcacgatgtgaaaattatgttggcgatgaaacgtatttgagaatgagattgttgaattttattcgctaaatca

SEQ ID NO: 40924 - DNA, 1752 bp, Zea Mays
atacggacacaggatatttggtcgctggagacagacacacgacacgacacagacatgcgtcgaggtcacgaggtccagagcagtaggaaagtagttttctcgaggccacgaggtcccctgtacctgtagctgtagcatgggcggtacagcagcaccaatgcaagctgcaaggcgatcgaatgatactaccccaccggcgtcggacatgcaggcagatgcgcatccagcccacgagcctctcgccggccgggtggccatcgtgacaggaggcgccgggggcatcggctcggcggtggccgcgcacctggcgtccctgggcgcccgcgtcgtggtcggcttcatcggcgacccggcccccgcggaccagctcgtggcggccctcaacaactcctcgccggcaggcaacagcgacccgcgcgccgtggcggtggcagcggacgtgtcggacccggcgcaggtggcgcggctgttcgacgcggcggaggcggcgttcgggccggagctgcacgtgctggtggccgcggcgggggtgcaggacgcgacgtacccgcggatcgcggacacgtcgcccgagcagtgggacctcgcgttcggcgtgaacacgcgcggcacgttcctgtgctgccgggaggcggcgcggcggctggcgcgcggcggcgcgggccgcatcgtcaccctctcgtcctccaacgtggggtcgctgcggcccgggtacggcgcgtacgtggccagcaaggcggccgtggaggccatgacaaaggtgctggccaaggagctcggagggatggggatcacggccaacgccgtggcgccgggccccgtggccacgcccatgttctacgcgggcaaatcggaggagcgcgtggccgccgccgcgcgcgagtgccccatggggaggctcgccgagccagcggacgtggcgcccgtggtggggttcctgtgcaccgacgccgccggctggatcaacgggcaggtcatccgagtcaacggcggctacgtgtgagtgtactgtgatgagagggaggaggcatagctagctagcttagcttggagtgtcagcgtgtcaccaaccgacaattacacgtgctccttcccttaataataataataataataataataataataataataataataataataataataataataataataaggtctgagaaaaaaaaaacttgtacgtgcatttccatttgaccatttcattgtgtgattgagccaggtagagggaaaaaggacagatgagatccctcaaagtagagctcctgacagaatggtgactgcaccaaagggtacgatcaatacagtaaaatacatagccgaagctaaaagatgaccgagaattaataggagcttcccatcagcctaaacagttcacaatggtgtcctgaggcctaaaccagccagtctcattctaccgcataaaatataacataaatggtaatggttcactctctgagtaccggcggtaacaaatttgaataggtcagtattggatgactgttgtctactctgaagtgtcggttagaagattctggtcgccccctttgcttagatttgaaaccagcaatgatagtgagtaacctgttaactggagcctctagttctaaggagatggcggatctaagaaagatacatctaaaggcattacacttaaggacacataactgctaaggtttacagcttacaacaaagctttcagtttttgggcgcattgcattggtctaggatgcaataaaagac

SEQ ID NO: 40925 - DNA, 4446 bp, Zea Mays
ggtcgggtacctatcgagtttcgggtttacgggcttaaattgccatccctaggagttcggcaccagtgctatcagaaatttagcggggtaatgatatgtttacctcggcgcttaatttctgaattgacagcatttcatcaacataagaattggtaaaacgccattgtaagttcctattatgcaggaggcgcaactgatggacatattccatgtgagctgggctcttcttccctcttgtagcatcaacaatgtagctaagaattgaagagcctgaatcagatctggcagaactacatggtgagacaggtgttgagggtctagtccttgatgggcttggtaatctcctagaggcaaatgatggtgacgacgaagcattggatggtgatgaagggcgtattaaaacacgtgatggtgatgatgatcccctagctaactgctttggaggtgtagatttttctgaattatttgaaggtccatctggacttgaactggcattctcctcttgaccttcatttccatcagcagaaccagggctctcaacatcacctgataaaatttcagggccttttcttctgttataagcaagaggcgttttccttggtgaaactctggatggttgcacagttaaagatatttgctgtctggtcttatcagttagatccatgcttcttgacatggcattaacaccatctggtcctagtactcttcttgtagaaaacactcgtgaaggaaccattgaagatactggtccattacattcatcagcaaaatccataatttttgacattatattagcactttcagatctcgccgttcttcttggtgacattccacgtgatggaactgtcatgggtttcttatcttcctcagcaaaatccatgcttttagatatagtatcagtgccatcggatgcaagtcgccttgttggagaagctcctcgagatggaaccttcaccgtcaatgttctgttacctttttggtttacaacaacattctctgatgcattcttatcatcatcagtaacaggtctcagtgatggctcttgagatgcaagggatgatgagactgcactagtagctatgtcactagaatctgttcttcctggatcgtaaccatcaccaccgtattccgttgacacaataagtttctcagtaacatatatgttttttactagagcaccagtgtcatcaagtttactgtctgaaatgcaaccagatgcagttgacgggctctccacaccttttgatagggtattaacaccatcagattcaagcctactgctctgcagagtctgacacgacgcacttgatgctgtggacagtctgctgtctttttcagcaaaagtcatgcctgttgatatggcattagaggcaaccctgcttctgggagaaacccctcgtaaagcagctgatgaggaagatggtctacagtttttgtcagcaaattctttgttcaatgcagcattgataccatcagaggccagccgtcttcttggcgaaaaccctcgtgatgaagttgacggtgttgaaggtctgatacatttttcagtaatgtctgtgctctttgatatacattctataccatcagaagtgagctgtcttcttggtgaaacccctcgtgctacagctgacatggctaagggtttgttactgttttcaatgagatcaatgctcattgatatcacattgctaacgtctgaggcgagtcgtcttcttggtgaaacccctcgtgctgcagctgacatggtgacaagtttgttattgttttcaacaagatccatgctctttataatcacattgacaccatctgacgaaagtcgccttcttggtgaaagccctcgtgatgcagctgatgaggtagtaggtctagtgtctttctcaacaagatccatactttttgatatggttttaacaccatcagaggcaagttgtcttaatgttgagacccctctaggtgcaactgaggaggacacagttctggaatccttttcagtgaacttgatcctttctgaagtgacattgatggcatcagatgcaaccctgcagcgtggtgacatacctcgcggtgttgcatatgaggttgatggcctgtctagtccatcagcaagatctgagccttttgatacagtgccaacaccatcagaggctaattgaagtcttggtgaaatccctcgtgagaccgctgaagaggttgatggcctgttagcgtaatcaccaaagtccatgcctttggttacaccacttatgccatcagaagcaagccttcttcgtggagacgtcccatgtgatatggaagatgaggtggatggcctgttatcgtttccagaaaacaccgaactccttgatatagtctcaagaccatcagaggcaagtcttctccttggagaaacccctcgaggtggaattgatgagctgactactctgctatccttttcagcaaaatctatatttttcacaatatcattaacactatcagaggtgggtctccttcttggagaaacccctcttgatgaagctggtatcctatctttttcagggaaatcaacgcttttcattaaatcagcaatgccaccagaagttgttcttctcggtgaaagtcctcttgatgaagacaggttggaaacaggtccaattaatctctctgatgattttgtactagtctgcgatgcagcattaaacacacttgataatgatgcacttggtgcaatgctgggtgatgaaactggcgaggagagtgtactgttatcattttcagtaaaatccacgctttctgatagggtcatggtgccatctgatgcagctgttgttattggtgacacccttcttgatgaaattgccgaggatgaaagtttgagatctctacgaacaacggcctttttggacacatcatctgcatcattagaaggtgactttcttggtgtcttggtgctatctgatgcagctgttgttattggtgacacccttcttgatgaaattgccaaggatgaaagtttgagatctctacgaacaacagcctttttggacgcatcttctgcatcattagaaggtgactttcttggtgtcctggtgccatctgatgcagctgttgttgttggtgacacccttcttgatgaaattgccaaggaagaaagtttgagatctctacgaacaacggcctttttggacgcatcatctgcatcattagaaggtgactttcttggtgaccccccttgtgatgacattgacgaagagaccagccggtcaattttatcagcaagatcaatacttcttgacaaggtatttgcagcggagtacattgttgttcgcttaggggtagctctccctctcaacgggctcctcttcctatcagctggtgctgcatccctcgtcttggcctcgcctgcagaagaggtactagaattccttttcccctttgattcgacctggaaagaagaagacagactccgcattgaaggccacaacccatcaggagcccggcaacccgacaacctcctcggagcgctttgcgtctctgaaacggcatcatgcaccggcgtggacgagctggaggatgaggaggacgggctggaaggcgcagacgatggcgacgccgaggcagagatcctggacggggtagtgggccgcgagccgcccgaagacggcctcgacggagtcgcctgccgccgttcggtggactgggacctcttcgcctgtgacccagctggcgtcggggacgacgctcgaccgccggcattgggtgacggtgacgggtgcctcctcggaatagtagatgcttctgctggcatcgcagctaccttgcgcttcaccgcagcatcagcatggccgttagcataatccttctccgccggcaggtcagatttccgaagcagcactgccccgggcgcacggatttcgcaggcgtctatccgcgcacccgccaccctggctcaaatccatcagcattgatagcgccacgaaggagttatttgagtttgtaacattttcgtcgcgcggcttcaccagtttattactccgcagctgtacttcgccagtttggtattatggagttcaaagtcacgccagattgggacagttaatctcccgcgctccattaacgtctgttttattgcttttgatgcaggttatgtaccccttcgtactaatctacccttgaccggagtactaccttgccgcgcgtgagaccaagaaaacagagcgcacaaggcgaggttgagctggagcaggagcatccccggcgagcagggaaccggccatggagctcggagagttgtgcgcagaggcgaacagagagatgagcgcgcgcggcgagcagaaatcagggagcagggcacggtggccatgacaagtagggaggtgtgcagtcgagttgtaggccagcgcgcgcagggaatttggtgcggccatggaacctgagcagggcacggcgcaggagttcgacggaacgctg

SEQ ID NO: 40926 - DNA, 2010 bp, Zea Mays
tcttttctccccttcccaccccatccctcactgcgagtggcctggtgcgcgagccgcgcgagaggaaaagaggcagagcgagccttccgcctcctcccccccttcgcgagagagaaaggagtgggggaggaaaaaaaatcttagggctttctcgtcgatcctctccgcgattaccccaccgattcgtccaatccaatgcagcgcggccccgcggtatcaaatcccccggcggcggccgccaccggcgcctccgagaacggcttgcttggtctggcgtaatgttagtcagggtattaatcctcatatggagactagagtccccatcaagccatctagtccgtgagcagaaatattggacactctggcccatcttgcagtgcacctgcatatcagttgtttcgccctgttactcgttctatgacccgtgggtctgatcctatcgtggcttcacctggtttcaaggcaggaggatctgatagcgcaagcacacaaagaagtatttcatatgcttcttttagcgctcaattagttgcctcacgactgactgccactcgtacccggacccctctaaaagtgacttcatctggttggaagcctcttactcaacctgttgctctgaacgaagagaggaaatgtgcaaaccttacaatcaaccctactgctaagcgttccagagttacttcctccagagctgtcaaagattcaatcaacaattcagcttcaaaagccaactcaagtgttcccagtgacaaaaagtacagaaatgaagataatgtgagcctgggcgatcagtcagatggggccgtcatgccatctcccacaaagaagctgcaaatatgcaaaggcccttcagatgcaccttcaattaggaaatcaactatcagaatcctgggtgttaagggagctgctctaccacccacagggaaatctcaagttgaaactcggaaatgctttgctaatgctacagcagaagtgatttctgctagtacaaacgagatcagtgagccagataatgcagctgccccattgcttgcacagcagttgccaccagacactgcaaagaactccactgtcatcatgcatacccatgaaacaagtaaagtcaatcagttggctgctacatggccaagggcgaactttcaaactgattacaacaagaagccttccaatgtacccataatggctaaccagcccagtgggttcgctggtgcgactgctcccttggtgacaccaaagatggaaatcggaaacatgaaggacagttccaatcctctctcaaatcctgcttacgcaagggcgcttgtaataaagcagcaagagcagctccttcagcaatataaattgggcagttcaccgcagcgacagcatcatggacagcatctctacatcaaagggccagctctgtttgagaatgatgacccgccaccggtcaagccgctgggaacaaggtgccagctctgcaagcttgatgttgctttccggacacaaggggatgctggccgtgatgccaatgctccaccagtcattgcagttttggcatgccaccatgtgttccacagcaggtgcattgaatctgtttacgggctcgctgagcctgctgagtgccttgcctgcctggagtccggtgcagcgcactgattgctaaccagatacaccaggtcaagagtctgaagtgctccatttctgtgggcctttagatggtgtaagtaggctaccattggagttcaatagggagctgaattatgggacatgtcacatgtctgatatatatgtttatttatttctcctgtcgtggtcataggtaaaatctgcagtctattgacgctgccattttgaataaacctggtgtctgcgctggttggcttggtgttgactgatgacttgtgagtagccgccaaacttgctgttgcggcctacctttgctgcaagcctgctatataagagcaactccaagagttcctaaaaaattactacaaaaaattatgcattggggttccgctaaaaaaaata

SEQ ID NO: 40927 - DNA, 1888 bp, Zea Mays
tcttttctccccttcccaccccatccctcactgcgagtggcctggtgcgcgagccgcgcgagaggaaaagaggcagagcgagccttccgcctcctcccccccttcgcgagagagaaaggagtgggggaggaaaaaaaatcttagggctttctcgtcgatcctctccgcgattaccccaccgattcgtccaatccaatgcagcgcggccccgcggtatcaaatcccccggcggcggccgccaccggcgcctccgagaacggtggatgtgatttgtctcgtgcggatgggaaatggtcgtaggatcctttataggttattattgaactgccccccacagttaattggaggatctgatagcgcaagcacacaaagaagtatttcatatgcttcttttagcgctcaattagttgcctcacgactgactgccactcgtacccggacccctctaaaagtgacttcatctggttggaagcctcttactcaacctgttgctctgaacgaagagaggaaatgtgcaaaccttacaatcaaccctactgctaagcgttccagagttacttcctccagagctgtcaaagattcaatcaacaattcagcttcaaaagccaactcaagtgttcccagtgacaaaaagtacagaaatgaagataatgtgagcctgggcgatcagtcagatggggccgtcatgccatctcccacaaagaagctgcaaatatgcaaaggcccttcagatgcaccttcaattaggaaatcaactatcagaatcctgggtgttaagggagctgctctaccacccacagggaaatctcaagttgaaactcggaaatgctttgctaatgctacagcagaagtgatttctgctagtacaaacgagatcagtgagccagataatgcagctgccccattgcttgcacagcagttgccaccagacactgcaaagaactccactgtcatcatgcatacccatgaaacaagtaaagtcaatcagttggctgctacatggccaagggcgaactttcaaactgattacaacaagaagccttccaatgtacccataatggctaaccagcccagtgggttcgctggtgcgactgctcccttggtgacaccaaagatggaaatcggaaacatgaaggacagttccaatcctctctcaaatcctgcttacgcaagggcgcttgtaataaagcagcaagagcagctccttcagcaatataaattgggcagttcaccgcagcgacagcatcatggacagcatctctacatcaaagggccagctctgtttgagaatgatgacccgccaccggtcaagccgctgggaacaaggtgccagctctgcaagcttgatgttgctttccggacacaaggggatgctggccgtgatgccaatgctccaccagtcattgcagttttggcatgccaccatgtgttccacagcaggtgcattgaatctgtttacgggctcgctgagcctgctgagtgccttgcctgcctggagtccggtgcagcgcactgattgctaaccagatacaccaggtcaagagtctgaagtgctccatttctgtgggcctttagatggtgtaagtaggctaccattggagttcaatagggagctgaattatgggacatgtcacatgtctgatatatatgtttatttatttctcctgtcgtggtcataggtaaaatctgcagtctattgacgctgccattttgaataaacctggtgtctgcgctggttggcttggtgttgactgatgacttgtgagtagccgccaaacttgctgttgcggcctacctttgctgcaagcctgctatataagagcaactccaagagttcctaaaaaattactacaaaaaattatgcattggggttccgctaaaaaaaata

SEQ ID NO: 40928 - DNA, 1830 bp, Zea Mays
tcttttctccccttcccaccccatccctcactgcgagtggcctggtgcgcgagccgcgcgagaggaaaagaggcagagcgagccttccgcctcctcccccccttcgcgagagagaaaggagtgggggaggaaaaaaaatcttagggctttctcgtcgatcctctccgcgattaccccaccgattcgtccaatccaatgcagcgcggccccgcggtatcaaatcccccggcggcggccgccaccggcgcctccgagaacgtgagcagaaatattggacactctggcccatcttgcagtgcacctgcatatcagttgtttcgccctgttactcgttctatgacccgtgggtctgatcctatcgtggcttcacctggtttcaaggcaggaggatctgatagcgcaagcacacaaagaagtatttcatatgcttcttttagcgctcaattagttgcctcacgactgactgccactcgtacccggacccctctaaaagtgacttcatctggttggaagcctcttactcaacctgttgctctgaacgaagagaggaaatgtgcaaaccttacaatcaaccctactgctaagcgttccagagttacttcctccagagctgtcaaagattcaatcaacaattcagcttcaaaagccaactcaagtgttcccagtgacaaaaagtacagaaatgaagataatgtgagcctgggcgatcagtcagatggggccgtcatgccatctcccacaaagaagctgcaaatatgcaaaggcccttcagatgcaccttcaattaggaaatcaactatcagaatcctgggtgttaagggagctgctctaccacccacagggaaatctcaagttgaaactcggaaatgctttgctaatgctacagcagaagtgatttctgctagtacaaacgagatcagtgagccagataatgcagctgccccattgcttgcacagcagttgccaccagacactgcaaagaactccactgtcatcatgcatacccatgaaacaagtaaagtcaatcagttggctgctacatggccaagggcgaactttcaaactgattacaacaagaagccttccaatgtacccataatggctaaccagcccagtgggttcgctggtgcgactgctcccttggtgacaccaaagatggaaatcggaaacatgaaggacagttccaatcctctctcaaatcctgcttacgcaagggcgcttgtaataaagcagcaagagcagctccttcagcaatataaattgggcagttcaccgcagcgacagcatcatggacagcatctctacatcaaagggccagctctgtttgagaatgatgacccgccaccggtcaagccgctgggaacaaggtgccagctctgcaagcttgatgttgctttccggacacaaggggatgctggccgtgatgccaatgctccaccagtcattgcagttttggcatgccaccatgtgttccacagcaggtgcattgaatctgtttacgggctcgctgagcctgctgagtgccttgcctgcctggagtccggtgcagcgcactgattgctaaccagatacaccaggtcaagagtctgaagtgctccatttctgtgggcctttagatggtgtaaaatctgcagtctattgacgctgccattttgaataaacctggtgtctgcgctggttggcttggtgttgactgatgacttgtgagtagccgccaaacttgctgttgcggcctacctttgctgcaagcctgctatataagagcaactccaagagttcctaaaaaattactacaaaaaattatgcattggggttccgctaaaaaaaata

SEQ ID NO: 40929 - DNA, 2082 bp, Zea Mays
tcttttctccccttcccaccccatccctcactgcgagtggcctggtgcgcgagccgcgcgagaggaaaagaggcagagcgagccttccgcctcctcccccccttcgcgagagagaaaggagtgggggaggaaaaaaaatcttagggctttctcgtcgatcctctccgcgattaccccaccgattcgtccaatccaatgcagcgcggccccgcggtatcaaatcccccggcggcggccgccaccggcgcctccgagaacggtggatgtgatttgtctcgtgcggatgggaaatggtcgtaggatcctttataggttattattgaactgccccccacagttaattggcttgcttggtctggcgtaatgttagtcagggtattaatcctcatatggagactagagtccccatcaagccatctagtccgtgagcagaaatattggacactctggcccatcttgcagtgcacctgcatatcagttgtttcgccctgttactcgttctatgacccgtgggtctgatcctatcgtggcttcacctggtttcaaggcaggaggatctgatagcgcaagcacacaaagaagtatttcatatgcttcttttagcgctcaattagttgcctcacgactgactgccactcgtacccggacccctctaaaagtgacttcatctggttggaagcctcttactcaacctgttgctctgaacgaagagaggaaatgtgcaaaccttacaatcaaccctactgctaagcgttccagagttacttcctccagagctgtcaaagattcaatcaacaattcagcttcaaaagccaactcaagtgttcccagtgacaaaaagtacagaaatgaagataatgtgagcctgggcgatcagtcagatggggccgtcatgccatctcccacaaagaagctgcaaatatgcaaaggcccttcagatgcaccttcaattaggaaatcaactatcagaatcctgggtgttaagggagctgctctaccacccacagggaaatctcaagttgaaactcggaaatgctttgctaatgctacagcagaagtgatttctgctagtacaaacgagatcagtgagccagataatgcagctgccccattgcttgcacagcagttgccaccagacactgcaaagaactccactgtcatcatgcatacccatgaaacaagtaaagtcaatcagttggctgctacatggccaagggcgaactttcaaactgattacaacaagaagccttccaatgtacccataatggctaaccagcccagtgggttcgctggtgcgactgctcccttggtgacaccaaagatggaaatcggaaacatgaaggacagttccaatcctctctcaaatcctgcttacgcaagggcgcttgtaataaagcagcaagagcagctccttcagcaatataaattgggcagttcaccgcagcgacagcatcatggacagcatctctacatcaaagggccagctctgtttgagaatgatgacccgccaccggtcaagccgctgggaacaaggtgccagctctgcaagcttgatgttgctttccggacacaaggggatgctggccgtgatgccaatgctccaccagtcattgcagttttggcatgccaccatgtgttccacagcaggtgcattgaatctgtttacgggctcgctgagcctgctgagtgccttgcctgcctggagtccggtgcagcgcactgattgctaaccagatacaccaggtcaagagtctgaagtgctccatttctgtgggcctttagatggtgtaagtaggctaccattggagttcaatagggagctgaattatgggacatgtcacatgtctgatatatatgtttatttatttctcctgtcgtggtcataggtgtgagccccgccacacaagtcgtccaggaagacaagcaacaaaggatgatcggtcgacaacacaacgtccagggatccggacgacagtgatcaccagaaggatgatcggtcggcaacgtccagggatccggacgacagtgagcaccggctggaaggcgacgacaacgtaccacgacatcggcggccaagacgtg

SEQ ID NO: 40930 - DNA, 1365 bp, Zea Mays
tcttttctccccttcccaccccatccctcactgcgagtggcctggtgcgcgagccgcgcgagaggaaaagaggcagagcgagccttccgcctcctcccccccttcgcgagagagaaaggagtgggggaggaaaaaaaatcttagggctttctcgtcgatcctctccgcgattaccccaccgattcgtccaatccaatgcagcgcggccccgcggtatcaaatcccccggcggcggccgccaccggcgcctccgagaacgacaaaaagtacagaaatgaagataatgtgagcctgggcgatcagtcagatggggccgtcatgccatctcccacaaagaagctgcaaatatgcaaaggcccttcagatgcaccttcaattaggaaatcaactatcagaatcctgggtgttaagggagctgctctaccacccacagggaaatctcaagttgaaactcggaaatgctttgctaatgctacagcagaagtgatttctgctagtacaaacgagatcagtgagccagataatgcagctgccccattgcttgcacagcagttgccaccagacactgcaaagaactccactgtcatcatgcatacccatgaaacaagtaaagtcaatcagttggctgctacatggccaagggcgaactttcaaactgattacaacaagaagccttccaatgtacccataatggctaaccagcccagtgggttcgctggtgcgactgctcccttggtgacaccaaagatggaaatcggaaacatgaaggacagttccaatcctctctcaaatcctgcttacgcaagggcgcttgtaataaagcagcaagagcagctccttcagcaatataaattgggcagttcaccgcagcgacagcatcatggacagcatctctacatcaaagggccagctctgtttgagaatgatgacccgccaccggtcaagccgctgggaacaaggtgccagctctgcaagcttgatgttgctttccggacacaaggggatgctggccgtgatgccaatgctccaccagtcattgcagttttggcatgccaccatgtgttccacagcaggtgcattgaatctgtttacgggctcgctgagcctgctgagtgccttgcctgcctggagtccggtgcagcgcactgattgctaaccagatacaccaggtgtgagccccgccacacaagtcgtccaggaagacaagcaacaaaggatgatcggtcgacaacacaacgtccagggatccggacgacagtgatcaccagaaggatgatcggtcggcaacgtccagggatccggacgacagtgagcaccggctggaaggcgacgacaacgtaccacgacatcggcggccaagacgtg

SEQ ID NO: 40931 - DNA, 2024 bp, Zea Mays
acttgaacttacatatgctgtttttctttatttggcatatccacatatcccgattctgtaacggttcgacaattccattaaatattctaagttggttatgcggtatagtttatagaagtgcaccttccccgtgtgcctggatgttactcctgaaagatacttagctgctggactgttaattcatttaacaaatatcacaagatggagttgcacattaatttcttctgttctatgttatctatcttagcaatctgcatctcatactgtgttttgactcaattgatatttagtgtagtttcttgctatatatgaccatgctgcatgattttagtaatgcctcacagtctcacacttctgttcatgaagtaaatattagctaacagtacacccccaaacaatgtttctgcttaatcttgaactcgcttctttttttactttgctttgcattttcagtgagcagaaatattggacactctggcccatcttgcagtgcacctgcatatcagttgtttcgccctgttactcgttctatgacccgtgggtctgatcctatcgtggcttcacctggtttcaaggcaggaggatctgatagcgcaagcacacaaagaagtatttcatatgcttcttttagcgctcaattagttgcctcacgactgactgccactcgtacccggacccctctaaaagtgacttcatctggttggaagcctcttactcaacctgttgctctgaacgaagagaggaaatgtgcaaaccttacaatcaaccctactgctaagcgttccagagttacttcctccagagctgtcaaagattcaatcaacaattcagcttcaaaagccaactcaagtgttcccagtgacaaaaagtacagaaatgaagataatgtgagcctgggcgatcagtcagatggggccgtcatgccatctcccacaaagaagctgcaaatatgcaaaggcccttcagatgcaccttcaattaggaaatcaactatcagaatcctgggtgttaagggagctgctctaccacccacagggaaatctcaagttgaaactcggaaatgctttgctaatgctacagcagaagtgatttctgctagtacaaacgagatcagtgagccagataatgcagctgccccattgcttgcacagcagttgccaccagacactgcaaagaactccactgtcatcatgcatacccatgaaacaagtaaagtcaatcagttggctgctacatggccaagggcgaactttcaaactgattacaacaagaagccttccaatgtacccataatggctaaccagcccagtgggttcgctggtgcgactgctcccttggtgacaccaaagatggaaatcggaaacatgaaggacagttccaatcctctctcaaatcctgcttacgcaagggcgcttgtaataaagcagcaagagcagctccttcagcaatataaattgggcagttcaccgcagcgacagcatcatggacagcatctctacatcaaagggccagctctgtttgagaatgatgacccgccaccggtcaagccgctgggaacaaggtgccagctctgcaagcttgatgttgctttccggacacaaggggatgctggccgtgatgccaatgctccaccagtcattgcagttttggcatgccaccatgtgttccacagcaggtgcattgaatctgtttacgggctcgctgagcctgctgagtgccttgcctgcctggagtccggtgcagcgcactgattgctaaccagatacaccaggtcaagagtctgaagtgctccatttctgtgggcctttagatggtgtaaaatctgcagtctattgacgctgccattttgaataaacctggtgtctgcgctggttggcttggtgttgactgatgacttgtgagtagccgccaaacttgctgttgcggcctacctttgctgcaagcctgctatataagagcaactccaagagttcctaaaaaattactacaaaaaattatgcattggggttccgctaaaaaaaata

SEQ ID NO: 40932 - DNA, 1511 bp, Zea Mays
aaaaccatagcggcaatgcaactgcagccctggagctcaggcatcttgtacgagctggtaaggtcgagccatggcttttgccacaacaaaccagcatatcgccccagcttcgatctcacgcatctaccgctgcgctgcgcggctctctctggttccagttccagcccatggtggctggtgggcgtcgtgacgatcaggccgtttctttcggcggctgtggcgaccagatggcgccacaagaagacagctactttgcctcacggaatcctccacacagaaatcgttagctagattgagtgcggtgctaccctgactgagcttttctctctcttttttttctttccttctttttttacatctttttctcgttttgcggtgccgtgccgacgccgtcgataacgccaaacttcaccctgatatatgggatgatcttcctgtcaccgctcaagagtatacagagtctatgtctaccgatacaacctattttgttttcttgaccttgcaaggccttggtccacgagtctcgcgtcactctctcagccaaggtcctctccggccactactcttgcttccgcggcttcctgcttcgccgctcctctctcgccccctctatccctcctgagctatggtcgtctctcttatgtaccatgtgtgtatttgattaaattaactaagcgatgtaccacaaccatatatatatgcaggagactgaagcaatctgtgccctgcattttgttcttgttctgtaaacacggtgacgtgccttttctgtgcatgaaacagtcttagttttcgtgttagaagtatgtatatcacttgtcatgctactctgatctgttgtttttagttagcgtcaattgcaatgaccagtaaacctaggcctgaaagggggcgggtcgaccatttcggatctgcggccccctcccagctttggcccacggctcctttaccggctgtgggctgtggcccatcgcagatccctagttttgcttgttgcatcagctacagaggctaactgacgttggacaatctcgtcagaagctagcatcatacataaataaacggagattatgcaaaacaaatttattcctcatacataaccgacgaccatgcactacgtcatccgatcctgctcctacggcttcctaggcacccactgcgagtcaccagtagcgtcttccggcgatggcgccgccagggtcttctgctcggctatgtagggcaaatacaggtccctgtggtgtgaaggaggcgaagtagcgccgccgtcgcgttcttgcgcacgacggccagcgccattattgttgttgctaggaatgcagctagcctgatcgagcttttcttctaggtcttgcgacgtcgtgctagctggtgggcggggacggctatgtatacatacgacagcgtgatctcgctacttgcttgctagtctggaaagcattgcttctgatgtagtttattgattgatagatgacataacagatagatctatgcctcgccctctcttgaag

SEQ ID NO: 40933 - DNA, 1736 bp, Zea Mays
tgcactgaaaaaactgattccttcaatttgcatttcattgcctcccagaaacatacaacaaacaccacggggttatttacataccaaggtagtaagcagttacgtgctgcttctgatcagacatatataagtactccgaatcaacaaggagttggaaccagcgagttcataccatatcgatcacaacggtgaacattagatcaaaccaaccaaaaaattggcaaacaaaacccgacctcaaaaaaacggggggcacaaaaccgccaattcagctgccggtggcagcaatggggctgaacgtcacaggccaagctcttctggtagccccctctctctgggaagccgaccgcccaaggccagacccgaacctcgagcaccttatgaggcaggggttcgtgtccatggaacccatgcagaacgatgggtgcagcttcatcgctggtatcctctggcagctcagcgagcggaaggaggacgagcccatcggcggcaggcggacgcactggaactcggagcggcacggatgggcgccgaccggggcggaagagtcggagctcacggctgggcacgccgtgcagaacgacagcgagaggctgttcctcggcaactctcttatcgggctcgtgccggggagggtgttgaacgagatgatcggatgtctgcagagagggcatggtattgcacccgctgggctcgctgacgtgtagctagttgagcaaaggtatagagcacatcttgtgcagaattcatgtttgcaacctgcaaacaaagttgtacagaatgctgtgaaccaccagagcataaagtgtaaaggctagtagtgcacttgatatgaggctcagactacaactagtagaatgctagcattagggcctgttcagttttggtggattactggattgaacacccggaacgattcctagctagattgtttgtctaatttatataagggttgatgagctggaatgattcttggtcaaatccggcgtaaacgaacgcacccttaatgagaacatcttccaggtacagattcagttagcttgaactgcaacggccagtattaaccatgtactgtatatttggcagcataccttctgcagcaacggaacagctcccttctaagcagacagcacaagggtcgatacaaacaggtgactggtttagatacctccatccacactccctagagaacgaaatgacacaattcattagatgttttctagacaagcaatgcaaaatggaccactatgataggctgacaagtgttggaactcatactacatggtcaggaaaacaatttaagggaaagcgttcataattaggcaactatagggagtatacagatgaacaagatcacatggcaacctataagaaacaatgagcagtaaccagtaaattactatttaagccatgcaggcgacaagaccagggaactaatggcacatagctgcgatcacatggcaacctataagaaacaatgagcagtaaccagtaaattactatttaagccatgcaggcgacaagaccagggaactaatggcacatagctgcataactaaattagagacatggtcacctggcaatgttcatgatactcatgagtggaagacagagataaggtgaaggaagagtgtgtatccgaccctctggttctctacttaagatttcttcaactgaatttctttgccaggaacgagccaccattaaaggggtccatctgcataacagaaacgaac

SEQ ID NO: 40934 - DNA, 480 bp, Zea Mays
gaatgaatcaacttctcttccttttttttttcttccttctgatgatatcatcgtcatcgtcagctactaccatatacaaaggtggtccaaacattcttcgcacattatcattaacggcatatatacaggcacgaacgattttgggggtagcaatgtagaagaagaaaccaaaaaaaaaactgtcgatcctgtaactgcagctaatcctacgccacacctgtctgaatcctgttcatcatcactggttatttttctttgctcgacgtttgctgtttaccgctagcgctgtgtgttttacttcccttccccccctcagagcgagccttcgaacgagacccggagctgcaccgccgccgccggcccgggccgtcgtggcggcgacggcgcgctggccaggccgtccagcatcttgaccacgtccaccgtgtcgtccaggtagtacttggccatgctcggcttcttgcccaccgtgcacgcgaa

SEQ ID NO: 40935 - DNA, 2942 bp, Zea Mays
cccacccggtctccagaacagacaacccgtccttctccttcccatcggctccacacaaccagaaggttcttcgcttcactctgccctgcgccgccgccaacgctgcagccgcagttgccgcaggcgggaacttggacgtgctactcgcgactgctctcatctgttcccgcgattcgttcacaatggcccgtgtgtatgtcggcaacttggatgcacgcgtgacttccggggaactcgaagatgagttccgtgtgtttggagttctgcgaagtgtttgggtcgcacgcaaaccacctggttttgcatttattgattttgacgacaggagggatgcagaggatgctattcgtgatctagatggtaagaatggatggaaagttgaactatctcgtagcaccaatggtcgtggcagtcgtgatcggcatggtggatctgagtcaaagtgctatgagtgtggtgagactgggcactttgcacgtgaatgtcgtctgcgcattggctctggaggtctaggcagtggaagacgtcgcagcaggagcaggagccgcagtcgcagccctagataccgcaggagtccgagctataatagaaggagctatagccctcgttatcgttctccaaggcgccgtactccttcaccggctcgtggacgcagctatagcaggtcgccatagtacaactgtgacaaatatgcatctccctcgttaacggagtaatgatggcagatactggtgtagcaggagcttggcctgaagcccgtgcctgattcttctctgtgtgaggacttggttcttggtttggctgtggggaacaaatttggaactgtcgtcaactgcatgacttcagttcaggcatgttctgcttaaacgactcggccaactacggctctcagttgtagtcttcatggttttgttcctccattcttggcacgtccttatctgcaaatgaatgtcaaccttccattactatctgcctgcgatgtttcatcatgaaattcttcaccaaagatgctacttcgtcacaaattagtaacattctttcccccatatagttgatatggtttgagtgtactgagcactaacaattgcagctcatgaaaataaggcccttgatttttgtcatagaacaagagcggctattttaattgcagcactcacatgaaaataaatctactctgcatgccggggattgaggcgactgaagtgtgagccttcagctgcacgtagttggccatccaaggaacctagtcaggctgatttcagcaagaggcgcagcctacgactgaacttggttttattttttgtggttttgattcttcacttcttccttgtgttctgccttcactgcatcttattggtagtggtcgaataatgcttctgtatgtggtaaatcattcttggtacaatggctctcttttttctgctgatcaatgtatgtaggaatttctgatagtcgccgttaattgtagtataaatatgtttcctctgcaagataattgtaattatatgtgaatactctcagaaaacatagatttgaggtataatctgctcttggcaaatgattttttttaaaaagcatcattctagtgcccctgcagtcttgttctcaatgcttcctttgggcaattatggactacggcatgtgcagtagaggtttcgtattgcttggcttcatgttgcatttttaggtcacttttccttatggagtgatgaatggttcctgttgctcttgcattgcatttgcgtgtcagaggatatgatacaccaatttaatttggaccttgtattaatttgccctcgttgtttctggtttctatacataagtcatgtcggtatgttggaagtacatacccctctttgtttctggtttctaacataagtctgctaggtaaatctggtggggcctgagggtttgtttgggtagtctagtattagtcccaatccacatgtgttgaggtgaattaggatgcaaattaatttaagttacaccacaatccacctcaatacatatggattgtggttaatactagagtacccaaactaaacctgagtaagttcatggagcttacttttttggtctaattctcgcccaacttattttgatggtacacaattgttttgctttaaaatgtttgaggcaaccttatgtattatcatcgtgtcttttttttgttgttgttgtatcttctatggtgtgtgtgctcggctacctctcttaagacttggttgggagcaatgggaatgagcccaatcttcccaaacacgccgttagggtaccgtttggcgtgagatgcagcaagccgcttgggggcttgggccacagtatggtatttctgtgctagagaatcacctcgtcatgccttcgccgtattgaacgtgttccgaagtttacatgtgaaggcaacaggttccaaattttattactcctagatgccaccatctcgtttgtgctagttttggcctggatatgattggaatgtaacaagttcacgctgcatcatctagacggtctacaactggttgccctttcgaaattgtgcgctgaaaattgcacatttttccagcatgcaacctaaaacaaatgtgagcaacttatttgtccaagcttagctttggcttgtgacaagttatcacggacatcacaccttgtatcagtaggggcaccgcggcggcggtggagtgccccctacaggcggcatacagggagggggctgcattgcggttagtctaaattggatttgtcttttttttctacattttagtcttgtcgctcgacgactggctatcacgttgaagacaaatccattgtatatgtgacttggtgagtataaacgaactatgttctggatactcagttttttctgacctctttgacagagctttattattggaaaaaatttagatctagtatttattatagagtaccactactgtggatctacc

SEQ ID NO: 40936 - DNA, 2946 bp, Zea Mays
cccacccggtctccagaacagacaacccgtccttctccttcccatcggctccacacaaccagaaggttcttcgcttcactctgccctgcgccgccgccaacgctgcagccgcagttgccgcaggcgggaacttggacgtgctactcgcgactgctctcatctgttcccgcgtaggattcgttcacaatggcccgtgtgtatgtcggcaacttggatgcacgcgtgacttccggggaactcgaagatgagttccgtgtgtttggagttctgcgaagtgtttgggtcgcacgcaaaccacctggttttgcatttattgattttgacgacaggagggatgcagaggatgctattcgtgatctagatggtaagaatggatggaaagttgaactatctcgtagcaccaatggtcgtggcagtcgtgatcggcatggtggatctgagtcaaagtgctatgagtgtggtgagactgggcactttgcacgtgaatgtcgtctgcgcattggctctggaggtctaggcagtggaagacgtcgcagcaggagcaggagccgcagtcgcagccctagataccgcaggagtccgagctataatagaaggagctatagccctcgttatcgttctccaaggcgccgtactccttcaccggctcgtggacgcagctatagcaggtcgccatagtacaactgtgacaaatatgcatctccctcgttaacggagtaatgatggcagatactggtgtagcaggagcttggcctgaagcccgtgcctgattcttctctgtgtgaggacttggttcttggtttggctgtggggaacaaatttggaactgtcgtcaactgcatgacttcagttcaggcatgttctgcttaaacgactcggccaactacggctctcagttgtagtcttcatggttttgttcctccattcttggcacgtccttatctgcaaatgaatgtcaaccttccattactatctgcctgcgatgtttcatcatgaaattcttcaccaaagatgctacttcgtcacaaattagtaacattctttcccccatatagttgatatggtttgagtgtactgagcactaacaattgcagctcatgaaaataaggcccttgatttttgtcatagaacaagagcggctattttaattgcagcactcacatgaaaataaatctactctgcatgccggggattgaggcgactgaagtgtgagccttcagctgcacgtagttggccatccaaggaacctagtcaggctgatttcagcaagaggcgcagcctacgactgaacttggttttattttttgtggttttgattcttcacttcttccttgtgttctgccttcactgcatcttattggtagtggtcgaataatgcttctgtatgtggtaaatcattcttggtacaatggctctcttttttctgctgatcaatgtatgtaggaatttctgatagtcgccgttaattgtagtataaatatgtttcctctgcaagataattgtaattatatgtgaatactctcagaaaacatagatttgaggtataatctgctcttggcaaatgattttttttaaaaagcatcattctagtgcccctgcagtcttgttctcaatgcttcctttgggcaattatggactacggcatgtgcagtagaggtttcgtattgcttggcttcatgttgcatttttaggtcacttttccttatggagtgatgaatggttcctgttgctcttgcattgcatttgcgtgtcagaggatatgatacaccaatttaatttggaccttgtattaatttgccctcgttgtttctggtttctatacataagtcatgtcggtatgttggaagtacatacccctctttgtttctggtttctaacataagtctgctaggtaaatctggtggggcctgagggtttgtttgggtagtctagtattagtcccaatccacatgtgttgaggtgaattaggatgcaaattaatttaagttacaccacaatccacctcaatacatatggattgtggttaatactagagtacccaaactaaacctgagtaagttcatggagcttacttttttggtctaattctcgcccaacttattttgatggtacacaattgttttgctttaaaatgtttgaggcaaccttatgtattatcatcgtgtcttttttttgttgttgttgtatcttctatggtgtgtgtgctcggctacctctcttaagacttggttgggagcaatgggaatgagcccaatcttcccaaacacgccgttagggtaccgtttggcgtgagatgcagcaagccgcttgggggcttgggccacagtatggtatttctgtgctagagaatcacctcgtcatgccttcgccgtattgaacgtgttccgaagtttacatgtgaaggcaacaggttccaaattttattactcctagatgccaccatctcgtttgtgctagttttggcctggatatgattggaatgtaacaagttcacgctgcatcatctagacggtctacaactggttgccctttcgaaattgtgcgctgaaaattgcacatttttccagcatgcaacctaaaacaaatgtgagcaacttatttgtccaagcttagctttggcttgtgacaagttatcacggacatcacaccttgtatcagtaggggcaccgcggcggcggtggagtgccccctacaggcggcatacagggagggggctgcattgcggttagtctaaattggatttgtcttttttttctacattttagtcttgtcgctcgacgactggctatcacgttgaagacaaatccattgtatatgtgacttggtgagtataaacgaactatgttctggatactcagttttttctgacctctttgacagagctttattattggaaaaaatttagatctagtatttattatagagtaccactactgtggatctacc

SEQ ID NO: 40937 - DNA, 2937 bp, Zea Mays
cccacccggtctccagaacagacaacccgtccttctccttcccatcggctccacacaaccagaaggttcttcgcttcactctgccctgcgccgccgccaacgctgcagccgcagttgccgcaggcgggaacttggacgtgctactcgcgactgctctcatctgttcccgcgtaggattcgttcacaatggcccgtgtgtatgtcggcaacttggatgcacgcgtgacttccggggaactcgaagatgagttccgtgtgtttggagttctgcgaagtgtttgggtcgcacgcaaaccacctggttttgcatttattgattttgacgacaggagggatgcagaggatgctattcgtgatctagatggtaagaatggatggaaagttgaactatctcgtagcaccaatggtcgtggcagtcgtgatcggcatggtggatctgagtcaaagtgctatgagtgtggtgagactgggcactttgcacgtgaatgtcgtctgcgcattggctctggaggtctaggcagtggaagacgtcgcagcaggagcaggagccgcagtcgcagccctagataccgcaggagtccgagctataatagaagccctcgttatcgttctccaaggcgccgtactccttcaccggctcgtggacgcagctatagcaggtcgccatagtacaactgtgacaaatatgcatctccctcgttaacggagtaatgatggcagatactggtgtagcaggagcttggcctgaagcccgtgcctgattcttctctgtgtgaggacttggttcttggtttggctgtggggaacaaatttggaactgtcgtcaactgcatgacttcagttcaggcatgttctgcttaaacgactcggccaactacggctctcagttgtagtcttcatggttttgttcctccattcttggcacgtccttatctgcaaatgaatgtcaaccttccattactatctgcctgcgatgtttcatcatgaaattcttcaccaaagatgctacttcgtcacaaattagtaacattctttcccccatatagttgatatggtttgagtgtactgagcactaacaattgcagctcatgaaaataaggcccttgatttttgtcatagaacaagagcggctattttaattgcagcactcacatgaaaataaatctactctgcatgccggggattgaggcgactgaagtgtgagccttcagctgcacgtagttggccatccaaggaacctagtcaggctgatttcagcaagaggcgcagcctacgactgaacttggttttattttttgtggttttgattcttcacttcttccttgtgttctgccttcactgcatcttattggtagtggtcgaataatgcttctgtatgtggtaaatcattcttggtacaatggctctcttttttctgctgatcaatgtatgtaggaatttctgatagtcgccgttaattgtagtataaatatgtttcctctgcaagataattgtaattatatgtgaatactctcagaaaacatagatttgaggtataatctgctcttggcaaatgattttttttaaaaagcatcattctagtgcccctgcagtcttgttctcaatgcttcctttgggcaattatggactacggcatgtgcagtagaggtttcgtattgcttggcttcatgttgcatttttaggtcacttttccttatggagtgatgaatggttcctgttgctcttgcattgcatttgcgtgtcagaggatatgatacaccaatttaatttggaccttgtattaatttgccctcgttgtttctggtttctatacataagtcatgtcggtatgttggaagtacatacccctctttgtttctggtttctaacataagtctgctaggtaaatctggtggggcctgagggtttgtttgggtagtctagtattagtcccaatccacatgtgttgaggtgaattaggatgcaaattaatttaagttacaccacaatccacctcaatacatatggattgtggttaatactagagtacccaaactaaacctgagtaagttcatggagcttacttttttggtctaattctcgcccaacttattttgatggtacacaattgttttgctttaaaatgtttgaggcaaccttatgtattatcatcgtgtcttttttttgttgttgttgtatcttctatggtgtgtgtgctcggctacctctcttaagacttggttgggagcaatgggaatgagcccaatcttcccaaacacgccgttagggtaccgtttggcgtgagatgcagcaagccgcttgggggcttgggccacagtatggtatttctgtgctagagaatcacctcgtcatgccttcgccgtattgaacgtgttccgaagtttacatgtgaaggcaacaggttccaaattttattactcctagatgccaccatctcgtttgtgctagttttggcctggatatgattggaatgtaacaagttcacgctgcatcatctagacggtctacaactggttgccctttcgaaattgtgcgctgaaaattgcacatttttccagcatgcaacctaaaacaaatgtgagcaacttatttgtccaagcttagctttggcttgtgacaagttatcacggacatcacaccttgtatcagtaggggcaccgcggcggcggtggagtgccccctacaggcggcatacagggagggggctgcattgcggttagtctaaattggatttgtcttttttttctacattttagtcttgtcgctcgacgactggctatcacgttgaagacaaatccattgtatatgtgacttggtgagtataaacgaactatgttctggatactcagttttttctgacctctttgacagagctttattattggaaaaaatttagatctagtatttattatagagtaccactactgtggatctacc

SEQ ID NO: 40938 - DNA, 1873 bp, Zea Mays
gtggcccaccccacctccttccgagctccgaggagcgatcggcagggcgcgcctctggccgctttgtcgcgacgcgcgttcgctccaatcctgtcgcggccattaaaagccttcccggctttcccgctcagctcgtctcttccagaaacgtacctcgtcatctcttcgccttcgctacgcaattccgatccacgctgcgggccacttgtgacgactggcggaacccgcgagaaacagaggcgggcgagcggcgatcggagatggcgccggagaagccccggaaggaacaggaggaggagttgatgctggaggatggaggcatcgaggagagcccgcgccgcagcttcgaggactgcggcgactccgaggaggaccgcggggagggcgatgacgaggaggagcgggacagcgaccgcgacggcgtcggttcgacgcgctccttcctgccccaaaagtggccgcagagctacagggaaacaactgacacctacacaatcgctgcatcaccgagctttggttacttaggttcttctacaagcaaatactcgctcctcgaccttggtcgcagtattctgggctctgacctgaagtcacctctaatatcggccaaggctgattctgtcagaaacttgccgaaaacccttggttcaatgagagatgggagagtctcgtttcaattgcaacacacgggagaaatctacattagtcaagggtgcaatgtgacgcaaacagtcttcaacgggattaatgtgcttgctggtgttggccttctttccactccgtttacaattcatgaagctggatggactggccttgcagttctagcatgctttgcgattgtttgctgttatactggaattcttctaaaacattgttttgagagcaaagatggtatctcaagttatccagacattggagaggctgcatttggaagaattggccgtgtgttgatatctattattttgtataccgagctatattcatactgtgtggaattcatcattttggagggtgataacctcacatcaatttttcctaaagctggttttgattggcttgggattcatgttgatggaaaacattttttcggagtgttaactgctattttagtcttgccaacagtatggctgcgagatcttcgagtactctcgtacctttcagcgggtggtgtgattgcaactcttctcgtattcctgtccgttggtttagtcggtgttaccgatggtataggcttccattcaactgggaaggcagtaaactggagtggcatgccttttgccattggtatttatggattttgctactccgggcattcggtatttccaaatatctaccagtcaatgtccgatagatctaagttccctaaggcactgttcatatgtttcgcaatttgcacagcaatatatggctcttttgctgtcattggctttctcatgtttggaaagaacactttatcacaaatcactttaaaccttccaaagcattcgtttgcctcagaagttgcactatggaccacggtgatcaaccctttcaccaaatttgccttgttgttaaacccattagctcggagtttagaagagttgcgtcctgaaggttttatgaacgaaacatcatgcgctattatactgaggactgcccttcttgcatcaactgtatgcattgcctttcttctgccgttctttggtcttgtgatgtctctcattggatctcttcttagtatacttgtgttcacagccgcgtacagagctatatgacaggactttctgatatgcaatgcgttgttatttcgtttgtggcctaagaaagaggaagcatggatgatagattaatcgtattttattatgcaatgcgattaattaacgaatgtatactt

SEQ ID NO: 40939 - DNA, 2696 bp, Zea Mays
gtggcccaccccacctccttccgagctccgaggagcgatcggcagggcgcgcctctggccgctttgtcgcgacgcgcgttcgctccaatcctgtcgcggccattaaaagccttcccggctttcccgctcagctcgtctcttccagaaacgtacctcgtcatctcttcgccttcgctacgcaattccgatccacgctgcgggccacttgtgacgactggcggaacccgcgagaaacagaggcgggcgagcggcgatcggagatggcgccggagaagccccggaaggaacaggaggaggagttgatgctggaggatggaggcatcgaggagagcccgcgccgcagcttcgaggactgcggcgactccgaggaggaccgcggggagggcgatgacgaggaggagcgggacagcgaccgcgacggcgtcggttcgacgcgctccttcctgccccaaaagtggccgcagagctacagggaaacaactgacacctacacaatcgctgcatcaccgagctttggttacttaggttcttctacaagcaaatactcgctcctcgaccttggtcgcagtattctgggctctgacctgaagtcacctctaatatcggccaaggctgattctgtcagaaacttgccgaaaacccttggttcaatgagagatgggagagtctcgtttcaattgcaacacacgggagaaatctacattagtcaagggtgcaatgtgacgcaaacagtcttcaacgggattaatgtgcttgctggtgttggccttctttccactccgtttacaattcatgaagctggatggactggccttgcagttctagcatgctttgcgattgtttgctgttatactggaattcttctaaaacattgttttgagagcaaagatggtatctcaagttatccagacattggagaggctgcatttggaagaattggccgtgtgttgatatcttcatactgtgtggaattcatcattttggagggtgataacctcacatcaatttttcctaaagctggttttgattggcttgggattcatgttgatggaaaacattttttcggagtgttaactgctattttagtcttgccaacagtatggctgcgagatcttcgagtactctcgtacctttcagcgggtggtgtgattgcaactcttctcgtattcctgtccgttggtttagtcggtgttaccgatggtataggcttccattcaactgggaaggcagtaaactggagtggcatgccttttgccattggtatttatggattttgctactccgggcattcggtatttccaaatatctaccagtcaatgtccgatagatctaagttccctaaggcactgttcatatgtttcgcaatttgcacagcaatatatggctcttttgctgtcattggctttctcatgtttggaaagaacactttatcacaaatcactttaaaccttccaaagcattcgtttgcctcagaagttgcactatggaccacggtgatcaaccctttcaccaaatttgccttgttgttaaacccattagctcggagtttagaagagttgcgtcctgaaggttttatgaacgaaacatcatgcgctattatactgaggactgcccttcttgcatcaactgtatgcattgcctttcttctgccgttctttggtcttgtgatgtctctcattggatctcttcttagtatacttgtgttcacagccgcgtacagagctatatgacaggactttctgatatgcaatgcgttgttatttcgtttgtggcctaagaaagaggaagcatggatgatagattaatcgtattttattatgcaatgcgattaattaacgaatgtatacttcccataatcacaggcagtcataatgccacccttgtgtttcctgaagatcgcgcagaacaaagcaacttgtgcacaggtaatcgcaagcatttgtatcgtaatgttgggcgtcatcagtgctgccctggggacatactcctccgtgaaaaagattgtagaaaactactaagctcttcgacaataattgcctgcctgcaccagactccacgtatggaactcgaaatgttgaggcatctatatatacggcgacgactactgtacaatcagagtacaccttatgtacagtcaggatcagctagcactatattcttagaacttggtcgagtgcagcgaggatgcatgttcgttggccttttatggtgccaccatggtcgaagccatagcctgagcatgataatggcgccatgcactgttgtcttgtatcatatgcgctgttctatctcaagttctttttgaaggaagcaggcttgatttgtttgtagtgtgacgttctgtgtgtcaatgcaaaagaataatctggtgaaaaacaccgtgtcctagatgtttcatctcttttttttctttgctcaatttgctagtcaattaaccatatcatcgaactgaacatgtattggcttcggattggaacgcatacatacattctcctaatgttgcacgcaggacagaatgttacacagttacaagtagtgcaaatgtcagcacttcgctgagctgattgtatgtacactatcctaatgatgcacgcaagacaaactggcttggctttaggcatgccagggagcaatttccctgcaatgtacatttaagagggcgtcgatcttggcatctccaccgacacagagtgtgg

SEQ ID NO: 40940 - DNA, 2755 bp, Zea Mays
gtggcccaccccacctccttccgagctccgaggagcgatcggcagggcgcgcctctggccgctttgtcgcgacgcgcgttcgctccaatcctgtcgcggccattaaaagccttcccggctttcccgctcagctcgtctcttccagaaacgtacctcgtcatctcttcgccttcgctacgcaattccgatccacgctgcgggccacttgtgacgactggcggaacccgcgagaaacagaggcgggcgagcggcgatcggagatggcgccggagaagccccggaaggaacaggaggaggagttgatgctggaggatggaggcatcgaggagagcccgcgccgcagcttcgaggactgcggcgactccgaggaggaccgcggggagggcgatgacgaggaggagcgggacagcgaccgcgacggcgtcggttcgacgcgctccttcctgccccaaaagtggccgcagagctacagggaaacaactgacacctacacaatcgctgcatcaccgagctttggttacttaggttcttctacaagcaaatactcgctcctcgaccttggtcgcagtattctgggctctgacctgaagtcacctctaatatcggccaaggctgattctgtcagaaacttgccgaaaacccttggttcaatgagagatgggagagtctcgtttcaattgcaacacacgggagaaatctacattagtcaagggtgcaatgtgacgcaaacagtcttcaacgggattaatgtgcttgctggtgttggccttctttccactccgtttacaattcatgaagctggatggactggccttgcagttctagcatgctttgcgattgtttgctgttatactggaattcttctaaaacattgttttgagagcaaagatggtatctcaagttatccagacattggagaggctgcatttggaagaattggccgtgtgttgatatcttcatactgtgtggaattcatcattttggagggtgataacctcacatcaatttttcctaaagctggttttgattggcttgggattcatgttgatggaaaacattttttcggagtgttaactgctattttagtcttgccaacagtatggctgcgagatcttcgagtactctcgtacctttcagcgggtggtgtgattgcaactcttctcgtattcctgtccgttggtttagtcggtgttaccgatggtataggcttccattcaactgggaaggcagtaaactggagtggcatgccttttgccattggtatttatggattttgctactccgggcattcggtatttccaaatatctaccagtcaatgtccgatagatctaagttccctaaggcactgttcatatgtttcgcaatttgcacagcaatatatggctcttttgctgtcattggctttctcatgtttggaaagaacactttatcacaaatcactttaaaccttccaaagcattcgtttgcctcagaagttgcactatggaccacggtgatcaaccctttcaccaaatttgccttgttgttaaacccattagctcggagtttagaagagttgcgtcctgaaggttttatgaacgaaacatcatgcgctattatactgaggactgcccttcttgcatcaactgtatgcattgcctttcttctgccgttctttggtcttgtgatgtctctcattggatctcttcttagtatacttgtggcagtcataatgccacccttgtgtttcctgaagatcgcgcagaacaaagcaacttgtgcacaggtaatcgcaagcatttgtatcgtaatgttgggcgtcatcagtgctgccctggggacatactcctccgtgaaaaagattgtagaaaactactaagctcttcgacaataattgcctgcctgcaccagactccacgtatggaactcgaaatggtcaggttttactgtacgaccaaatttttactagaactaccggatttcctgtacattattgctgctgttattattcggaccacactagcctactaaaaaggaacacttccaataatgtaatcttgcgcacctttacctgagttctttatcatttagttgtactgtagcaagttcctgtgctgccgattgttcctaggataagcttctgccttttacagttgaggcatctatatatacggcgacgactactgtacaatcagagtacaccttatgtacagtcaggatcagctagcactatattcttagaacttggtcgagtgcagcgaggatgcatgttcgttggccttttatggtgccaccatggtcgaagccatagcctgagcatgataatggcgccatgcactgttgtcttgtatcatatgcgctgttctatctcaagttctttttgaaggaagcaggcttgatttgtttgtagtgtgacgttctgtgtgtcaatgcaaaagaataatctggtgaaaaacaccgtgtcctagatgtttcatctcttttttttctttgctcaatttgctagtcaattaaccatatcatcgaactgaacatgtattggcttcggattggaacgcatacatacattctcctaatgttgcacgcaggacagaatgttacacagttacaagtagtgcaaatgtcagcacttcgctgagctgattgtatgtacactatcctaatgatgcacgcaagacaaactggcttggctttaggcatgccagggagcaatttccctgcaatgtacatttaagagggcgtcgatcttggcatctccaccgacacagagtgtgg

SEQ ID NO: 40941 - DNA, 1017 bp, Zea Mays
aattgtttcacaaaccagttgatggagaaactgagaaaccgtagtgttaattataacaacaccgtgacctaggagcactcgcatggggatcccctttagcctagctcggtcatcaaacaccacttcatatttcaagacttccatttacatgaaaagttttgaattaagaaggggatagtgcaaatagagtgccttcaaagtaactgctggacgatcatagatgcatataaagctttcttcatgatgttgcagacattcaagattgtgtcataatgcacctataacagctatagttccatgcatacctagaagtgaataataaataaaagataggggtgaattactttccatatcacgaaagaagagatactttgaattgatggaatgacttgcaatttggaatttggaacaaaaatgcgttgtaatttggaacaggaaagtagtagtctaaaacagagggtaagaaattcaattatcacactggtttagttcctaaatcaaggatcacgataatggaaaataaaattggtattactgaagatcctatgtatcgaacaatcagatcaaaatgccaaggttaagtttggagtcatcgaacatgataaatcaaaattatcaaaatcttaaatacagaaccagattggagcagccactacattgtaaagacatgtagttgtgttacacatgtgtatagaagaacaataagcatgcctcgttcagatatatatgcactgttctttgttttgaatgaaaggacaaaacatctgtactgataccaggttgtatcttgtatgttccatgtatgagagtgtaatcttcccaacttgccacacggctgcaagcgtcatgttcgtgcatggctgaccagagtaattgatgaactcaaagaatatgaagtcaattagcctgtgaaagtaagactatgcaggcatagatgatcttgcttctctggaagcgccatatatagtctgcattctgaaaaggcatcaattaaaccgttataccaatcgaaaaatg

SEQ ID NO: 40942 - DNA, 1309 bp, Zea Mays
ttggagtcatcgaacatgataaatcaaaattatcaaaatcttaaatacagaaccagattggagcagccactacattgtaaagacatgtagttgtgttacacatgtgtatagaagaacaataagctataaataaataaaaattagtattttcaagttagagtgatcaagtacaggtgttgttcttgttagataaatatgtaagaggctaagaaagatagcatatttacaagcgactgccgttaacgcactaatttttttggcgagcagggcgacgcgctcaccagacgaccttgtcggtggagatggcgcggaagagcggaagcgatttgccgacgacagcgatgcagcagcaggttagagcgacgctattggtgtcgggagcaatggcgggcagggggcaaggcgtcgagcggtgggggagagagacggccaccaaggcatgggattatgggaaggagactgggagagggatctggaagcttcggggccaatcccagcaagcaaaatggacgagggaaagggaagagagctcttcgggaaggggaatgtggaggggacgacgaaccctagcaaggaaaacgaatgggggggaaggggaagagccgtcacgcttaccgggactgttggagcactagcggcggggtctggagccttgtcgccagagtcgcgggcgggcgaggaatgtcgccgcagtcgcagacgagcgaggaagggtgggtacggggggagggagtgtgaaatgcaggaaggagagagagagagagagaggataggagagaagaagcgtcacgaagcctccacacacaagcgcacgcgagagaataggaatcgttgatcaatgatcgaacggtcaagaaaattcggtcgacgtggataggctctctggccacgtttccttgctgctttaataataaggaaacatgtatatccacaatcattgcttagagagttctttctatttctatatattaaagttgggagcaaagtcacgctctcactcagcacatccacgtctacctttttctcttcaaccgcacgatcgtgtcctgacggcaccaaacgattcccatcgcttcctacacagtggcagctgagtttttatcctccactccatacgccgcagcctggtgaggatctgcctggctgcaccgtttctgcatcacacgcggcgacgagccctgctgctgctaggtatccatgcaggagatgagggcgtggatcagaatataatatcatgtgcactgtccgataacacacgctgcagtcaatcatgttatcatcattcatcaagttgagtttacctctccac

SEQ ID NO: 40943 - DNA, 113 bp, Zea Mays
ggagaactgcgtatcattatattgagagagagaaaggtccaaaatagaccacaatacaatgcccaaacaaggcaaaagaacatagggaaaaaaccaaccctaatacaaacagg

SEQ ID NO: 40944 - DNA, 3429 bp, Zea Mays
caacactccacttcatccataagatgtcattagccgtatgtacattacgtcttatgatccatacctatttttatagtcacgttcatatatgcacattataatctccagtgtcatttctagatacacatatatgtctagctgccttagatgcagtgtagattttttcaatgtttcccatgtccttttgggtgcaacgagcatgttatctctatgcttgcacacgtgcgtatattatgtttgtacatattcacataaggatataaacatgtatatacacatatacatatatacatagaccacttttttgctgatcaaagaaaaaaagagtgcatacacacacacacagagagagagaggtcaacctatatctgatctatcaggtctaaagacactaccttgcatagatatctatctatgttgcaaccatgcaactcatatatacattgtttatacattgttatgaggccaggttacatatgaaacgtgttagcccaagcaagaaaacaaagctgagtaagtgatctcatatcatcttagttcataatagacaacaaaaaggcaacatctctaactagatgtctaacttgtgatttgttaatgaaacttgtcatgaagattaaagtacgttgtgtgcgtagataattattgaaccaacaaagatcatcatcaacaagtagcatagttaatacattgctacaacggtgtaccaacctacctgaattgtaaattctatattaagcgcaagcacaacctgtcaacatcgtatcacattgcaagaccactttgaatcattgctaggtccaatgaactcttgacttcattttttattactaggttcagctgaacattataaaaaataccacgaatgaaatctaatgtcctttttgatttactgtttttcctacattgtgggaaaaattatagcttcataccatggttgatcgtacttttgcccaccataatatcaatgtcgtcgttgctctgctcttttctggtataatgaaagaataaaatcaacaaatggatcccgagctgtcatctacaacaattgttgtaaaggcggcaaagtctacctacctccttataggcctaggcttgaacccttattatcactggcacgatttgatggtgattcatcatctaagaggttggtgcaaattataaggcaatataactgttcatttacatttacatacacgtgtggccatattgatagaacaaccaatgatggtcgcggtccaccaatcttcaaaacgaatatgatcattattaacaccatataaaaagcctctaattttttgagctttatgtatatgatactacacatgaagttagcaatgggacacgctcgatttctcatgatgatgcttctgatatctccattcaaccaggaaatgttcatgaattattgaaaatattggatggaattatattatgttgtcttttttgcatgatgatgcttctgatatcttaggtttgtactattctatgcagtataatgtttatctactctacaaccatcattgtcaccttaattgtgattgtaccacatttatccaaaactccaacggtctatgaccactctgatttactatgcaacacgcgtgcatggggcgtgcacaatacactagtaatagtttgaacaacattgccaaaaaggccccgaaaataatttcttcacttttattttatagaagtcatgttacttgacacttcttatccatttgtttacaagttgatgaacagatttcagttgagctcaataaagacagcctcgcgtcacctcctaagaagtatgtatttataaaaaaattgaagccaaatcataaacactatttaattttgcaggtatcaatcctggttcatactaacactaacaaacacataggatcaagactacacagctaggttctacataccctgacagccttgatcattagatcatcaacgatctcatgatgttctcatgaaagtactacaccatctactctcctgccatactctcatgtcgtgtacataatttgtaatcaatatcatctgagtattcttcttatagccataccaaaaagacacaacagcttaaagactctttaactactgacgctcaccttttccgtacaggtaggatgacgaacatcgtcacttttggagcacaaatgcttttatgtatatataaccaaactgctgaaactttcacagtgttgtatatattgaactgatctccagatgttgaatcctgctaatgatgtaatatataagtttgtacaaacctatgaacatgtcggttgactatgcaactaccgtaatcgctataattatcacctctagacaatgtgcaactctttcaaacattgatctggtttcctttgtttttgcccttatatcctaatttactctctgtcaatcatacaattatcatacattatacgttctccttggatttgaaggttcattaatggagtgtttggtttgaggaatgatatagtccattatcttctcactcctcacttttttgtttggtttgtggtatggagtgagttagtccatcaccacctcattcctcatagttagtttttagtactaatatgtggaatggagtcatcccaccaaatttgaggaatggacctatgatgcaccactttattttggatatagtgattcatcaaaccaaacacctcataagtatatccttgagccaaaatagaaaaaaaatcatagaagagctctttggtaaataccttcgcttttggtatccagagaaaaccctccgagtagtgtgcaactgtgcattaatgtgaagcttgatgacttggactgacctgttgtttgcatgctttgcggtagttagatgattcacatgatcacaaccacgacgatgccctacccagagtttgcgctagctactctgacgattgacacacttaaacatgtggtaaatgcacaagatcctacggtggtttcaagtctcgacaaccactgcttggaaaccacccgcatttccagtcacaccgacacttgactagacgaacatccaatcaacaaactagcaaacattaataaattgacaagctcgcaaggagtcaaaaaatggagggagggagggaaagcgaggtcaggaggggggctcacgagaaaacactcgaactggtcctcgaggtcctccagcgcggcgcggatggcgtgcaggctcctgtcctcctcagccagggccgccagggcgacgacctcgtctccgccgcgcgcgccgagacccagacccctgcccttgacgtgcacgaggccgggggcggatgcggaggcggaggcgcggcggcggacagcgcgcaggaagtgggcgcgggagagggcgtggatggcatcgctgaccttgtcgtggaggtcccagatggtctccagcagcacgacctcctcttcttatttaccgtttaa

SEQ ID NO: 40945 - DNA, 1996 bp, Zea Mays
atggctgactacatgcttccatgcaccggcccacatggcacatgcctgctgctgccgctgccctctgtctcgcgaacacaggcgtacaggacacgtccaggcatgatgaagatgaacaaaattacaggtcatgccaaccatggagcggtgccaagcaagtgtcatgccaagaaagtgccaaccatcaaggcatggactgctgattgtttttggcgactcatgatgcctgtatctgatacctgtgctgaaaaggtcttatacatgttgaggtaattgtaatgatatcacaaacaatcagcatatgaattccatagaactaatcccagtaccaggaacaaaacaaatgcatctagtcaggtactcaggtcggaagtttaaaagatcatgagaatgcatggcgacaattgggattgaaaccaaaataggtcatctaagatccttgtgtctggaaatgaataaaatagccatcaattaggttcaaactaacttacagattgacaattccacaggtatcgcaatgatataagtatcatctaattaacttcacaaaagtagtaagtataatggtaatggctaatgatctagtatgtaattgtaaacgccatgcaaactacttccgcatgctttagcccatccaaatgatcttttcatagaagcattcaacctgcataacttagatactattgtagcagataaccaaacgagattcagatcagcagaaattagtctgctcctctttcagtctaatcgtctacaatgctcccactacaactacggggtgttaaagtatatttaataaattagaccaattttattctccttcaaagtgaaccatttgagggtttgagatatatacataatcaacagtatgtatagaaattagtgtccaagaaaccatgagaggattagggcaaaaagtaggctaattgttgcatgtggttcagtgattgttaatttattagtatacgcaaacttgcacaacgagagggtgtgaccacgaacaacgagcttgcacatgctaccagccatggaaaagaagcaccgaaactggcatatggcctgcagtccagcgttgcagtgcctgaaccaaataccatgcttcgtgctatctctcctgcttaagattcaaggattaattcccctcaacctcgagtatttaatccaatcccaacaaggcgtcaaagcatctctgtacatagtgagcccaaaagggaaaataaacacaaggacctttctggcgcagcaacaaggccgaatctactatccgaaaccagtggaaaagcatgccgacagtggagaccaatgcctccccacctaaccagggaagggaaggcaagcggttcgtcttcacttcgcttcgattcatacgcaacgtgatttcttaagagctactaccacgaacctcatatattcctatcggaagcagcacacatcgagaatattcgaggacgggctggtcgaagccagggattgcgaaacagtacataccagttgtcgccgatgggcgacacgagaattctcgcagcggacgaagccgacgggcggcggatgcggaggatagcgcgatgaaaaggaaggaaatcgtgcaatgttcactgtccaacgtgtaccagactgttcggtgcgcccacggacagaaggcgtccagggccttccaaacaaagaagaaatgactaaaggactcctctaggtgcatagagttgttaccaagtatactaagagcactcttaaactccgattcaatgcaaccacacactcatgctatagagaattgagtgttttcttaagagaaactctgtcgttttgattattgcattctcacttttgcttgtatgcgtggtgttgctgctcttgtactcttatgtgtgtttctactccctccttactcctttgctttgattgagatcactcgtgtaaagcgtgagagactccaacttgtggagatttctcacagagggatttgatataagaaagaataatgtggtacttaagtttg

SEQ ID NO: 40946 - DNA, 1129 bp, Zea Mays
acacggtgtacaaaggtcccttggtcaagtgtaaagaaagaacaccgataaaacgccgtcgaactactccggacgggaagcacctccaatcccctcgcccccacggaccctcgccgccggggaagcgccgctcgctcaggaggacagccatggcgccggagccggaggatgatattatgaacgagaagaatccccgcccgctcgacgaggacgacatcgcgctcctcaaaacctatgggcttgggccgtactcgactagcattaagaaggtcgagaaggagatcaaggaaatggccaagaaaatcaatgacctttgtggtataaaggagtctgatacagggttggctccacctagccagtgggatttggtttcagataaacagatgatgcaagaagaacaaccgttacaagtggcaaggtgtacaaagatcataagccctaatacggatgatgccaaatatgttataaatgtaaaacaaatcgcaaaatttgttgttggactgggggataaagtgtctccaactgacatcgaggaagggatgagggtcggtgttgatcgcaacaagtaccagattcaaatccctcttccaccaaaaattgacccaagtgttaccatgatgaccgtggaggaaaagccagatgtgacgtacaatgatgttggtggctgcaaggagcagattgagaaaatgcgtgaagttgttgaacttcctatgcttcacccagaaaagtttgtcaagcttggtattgatcctccaaaaggcgtcctttgctatggcccacctggcactggcaagacacttcttgcaagagctgtagcaaatcggactgatgcttgtttcatccgtgtaattggaagtgagttagttcagaagtatgtcggcgaaggtgctcggatggtcagggaacttttccagatggcccgctcaaagaaagcgtgcattgtattcttcgatgaagttgatgctattggtggtgctcgttttgatgatggggtgggtggcgacaatgaggtgcagcgtacaatgttggaaatagtaaaccagcttgatgggtttgatgcaagagggaacatcaaagttctcatggccactaataggtcccagaagctgaccactttttgttttttttt

SEQ ID NO: 40947 - DNA, 243 bp, Zea Mays
cctcctccgcgaccgcgcgccgcccctctccgccttctctgcggccgcgccacctcctctctgctacatcgaccaacagctcagaaagcaacgagcgttccagtggtatgacatgatcccacagaacgctttgagagtagcagaggaaggaggaacgaggaaggttttatagtttggattagatgattggatgatcggatggtggatcctctttcccaccaagtcaaggtttgtgaattcggg

SEQ ID NO: 40948 - DNA, 174 bp, Zea Mays
cctccgcgaccgcgcgccgcccctctccgccttctctgcggccgcgccacctcctctctgctacatcgaccaacagctcagaaagcaacgagcgttccagtggtatgacatgatcccacagaacgctttgaggtggatcctctttcccaccaagtcaaggtttgtgaattcggg

SEQ ID NO: 40949 - DNA, 2066 bp, Zea Mays
cgcgcgccacttcgtcacggcccaaagaccagccgccgccggcagaaccccacgccgctcaatccagcctccgcctcgccgccgccgccgcctgtgctgctccgggcgcgccgcgtccatcagccatgctcgccctcgcccgcgcgctccggagccttggccaggcgggggccaggcgggagggccccctcctcgcctggctctcttccttgaggtcggccgccttctcctcctcatccgcgccgccggagtacgacatgccgtcggtgacatggggcgtaatacaggggcgcaaggagcgtctcgtctcgcgcgtgttggcgctcgacttcctccgctccgcgggcgtctccgaccccgccggggagctcgaggcggtcgagctcccctcgtccctcgaggtgctccaggagcgcctcgacttcctcctccgcctcggcctctccaccgacgacctctccaactacccgctattactggcctgctccctcaggaagaacgtcatccccgtcctctcctacctcgagaagctcggcgtcacgcgcgcccgcctggccgcctttgtccgcgcctacccggcctgcctccacgcctctgtcgccgtcgacctcgctcccatggtcaaggcgctccgtggcctggacgtcgaccgccaggacctcccccgcgtcctcgagcggtaccccgacgtcctgggactcaagcccgacggcacaatcagcacctccgtcgcctaccttgtcggcatcgtcggcgtggcgccacgagacatcggtcccatggtaacgcacttccctttcttccttggcatgagggttggcactaccatcaagccgttctgcgactacatcacctccctcgggctgcccatgcggatcctggcgaggatcctagagaagcgaccttacattctcggctatgatcttgaggaaacggtcaaaccaaacgtggaggcattgctcagctttggcattcagaaggaggccctgccgttggtgattgcacagtacccatctatactcgggctgccactgaaagcgaagctagcggcacaacagtacttcttcaccttgaagctccagatcgacccagatgggttcgcacgtgtgattgagaagttgccacagcttgtaagcttaaatcagaatgtgatcttgaagcctgtggagttcctccgtggacgagggatctccaatgaggatgttgctcggatggtggtccgctgtcctcagattctactgctgcggatcgagctcatgaagaacagtttgtacttcttcaagagtgagatgaagagaccaatgagtgaattgttagaatacccagaatattttacttacagcttggagtcaagaatcaagcctaggtatatgagagttacaagtcgggggattaagtgtagcttggattggttcttgaactgcagtgatatgaggtttgaggacaggatgcaaggggattttatagaaggggatgcaccaggtccttcgtttacgatgggtgggaagcttcagatgccaggcagccagctagtgtcagatgatgacgaggatactgatgatgaggtgctatataggaggacggtcatgatctaatttggtggaagataatcccaatggtctttcatgacatgtttccctgcagtatcatataaacaaccgcagtagtttgagtgctgccctagcaaaaactcggaggcattgataacgactctgatggtactcgggcacgacctttgatcatgtgccccaaagatggaagtgggaggtccattgacaacctaagcagggaagagtttgtagtaaaacggatatgacgtgctgccaaaaatctccttccagctaaacagtcgattctttcattgattaattaatgctactctaaggcaggtcagggggtgatcatacaataggatcagatatttgtagcatgtgactatctactatttgtaactgaaatgtcccacctactttttccctattgaaatagaacctcatgtacagctcgagtgtgttccatgaaaccatcttgacgtagccaattaattaatatgatcatgattttct

SEQ ID NO: 40950 - DNA, 2113 bp, Zea Mays
cgcgcgccacttcgtcacggcccaaagaccagccgccgccggcagaaccccacgccgctcaatccagcctccgcctcgccgccgccgccgcctgtgctgctccgggcgcgccgcgtccatcagccatgctcgccctcgcccgcgcgctccggagccttggccaggcgggggccaggcgggagggccccctcctcgcctggctctcttccttgaggtcggccgccttctcctcctcatccgcgccgccggagtacgacatgccgtcggtgacatggggcgtaatacaggggcgcaaggagcgtctcgtctcgcgcgtgttggcgctcgacttcctccgctccgcgggcgtctccgaccccgccggggagctcgaggcggtcgagctcccctcgtccctcgaggtgctccaggagcgcctcgacttcctcctccgcctcggcctctccaccgacgacctctccaactacccgctattactggcctgctccctcaggaagaacgtcatccccgtcctctcctacctcgagaagctcggcgtcacgcgcgcccgcctggccgcctttgtccgcgcctacccggcctgcctccacgcctctgtcgccgtcgacctcgctcccatggtcaaggcgctccgtggcctggacgtcgaccgccaggacctcccccgcgtcctcgagcggtaccccgacgtcctgggactcaagcccgacggcacaatcagcacctccgtcgcctaccttgtcggcatcgtcggcgtggcgccacgagacatcggtcccatggtaacgcacttccctttcttccttggcatgagggttggcactaccatcaagccgttctgcgactacatcacctccctcgggctgcccatgcggatcctggcgaggatcctagagaagcgaccttacattctcggctatgatcttgaggaaacggtcaaaccaaacgtggaggcattgctcagctttggcattcagaaggaggccctgccgttggtgattgcacagtacccatctatactcgggctgccactgaaagcgaagctagcggcacaacagtacttcttcaccttgaagctccagatcgacccagatgggttcgcacgtgtgattgagaagttgccacagcttgtaagcttaaatcagaatgtgatcttgaagcctgtggagttcctccgtggacgagggatctccaatgaggatgttgctcggatggtggtccgctgtcctcagattctactgctgcggatcgagctcatgaagaacagtttgtacttcttcaagagtgagatgaagagaccaatgagtgaattgttagaatacccagaatattttacttacagcttggagtcaagaatcaagcctaggtatatgagagttacaagtcgggggattaagtgtagcttggattggttcttgaactgcagtgatatgaggtttgaggacaggatgcaaggggattttatagaaggggatgcaccaggtccttcgtttacgatgggtgggaagcttcagatgccaggcagccagctagtgtcagatgatgacgaggatactgatgatgaggtgctatataggaggacggtcatgatctaatttggtggaagataatcccaatggtctttcatgacatgtttccctgcagtatcatataaacaagtgataagacaccagaatatgattgatgagtgttctcttggcaccagccgcagtagtttgagtgctgccctagcaaaaactcggaggcattgataacgactctgatggtactcgggcacgacctttgatcatgtgccccaaagatggaagtgggaggtccattgacaacctaagcagggaagagtttgtagtaaaacggatatgacgtgctgccaaaaatctccttccagctaaacagtcgattctttcattgattaattaatgctactctaaggcaggtcagggggtgatcatacaataggatcagatatttgtagcatgtgactatctactatttgtaactgaaatgtcccacctactttttccctattgaaatagaacctcatgtacagctcgagtgtgttccatgaaaccatcttgacgtagccaattaattaatatgatcatgattttct

SEQ ID NO: 40951 - DNA, 861 bp, Zea Mays
atgggccacaccctgctgtcgctctcgctcgcaggccacctcgtgtcaccgtggtgtgggtcccaagcgccagtcccacgaccgattcttcctataccgcttgaacacccgctgagccatggacccaagtcgttgtttctcttctctgctccgcagaaagcaccggccagcgtacaatgttgtcgcgtcctcgcgggcgccagctggccatccttaggttgttgcagttcgaccatcgatataaatccaaggccctgcgtccgccatgtctatctacttgtggcggtgaacgcagatcttgggatcggggggatggggcgagtattcgccgccgtagatcccaatgtcagccgtcgtaatccaaactcctctgcgcatatgtaccggccacggtttccccatggtgtcggtgcccagacccctgagtctcattaccaagagggggagctctgtcgccaggagagggagagaacgtcgtcaagtatggcagtgggagaagctgtcggcgtctttcgcgtatgccgtcgtcgagccctcgatgatcgctctatggggttcgcgaggatccagggaaggcattcatgaactaaccagtgccgggcatcatgcctagaccgaccaattgctcgccggaggacaacttccgctgtggtgcgtggtcgcgatgttctgcgtcataattacagatcaggatccaatggccctgatgcgtcgataccccttcgtcgtggcaactttctaaaagaaaccctgctcttttgacaaatcaacccgccatcccctgtgagagtaaattaattatagtcgggtcctggtattttgcaaaacaatccctgcgatctctggtttttatatctgcag

SEQ ID NO: 40952 - DNA, 1127 bp, Zea Mays
atgggccacaccctgctgtcgctctcgctcgcaggccacctcgtgtcaccgtggtgtgggtcccaagcgccagtcccacgaccgattcttcctataccgcttgaacacccgctgagccatggacccaagtcgttgtttctcttctctgctccgcagaaagcaccggccagcgtacaatgttgtcgcgtcctcgcgggcgccagctggccatccttaggttgttgcagttcgaccatcgatataaatccaaggccctgcgtccgccatgtctatctacttgtggcggtgaacgcagatcttgggatcggggggatggggcgagtattcgccgccgtagatcccaatgtcagccgtcgtaatccaaactcctctgcgcatatgtaccggccacggtttccccatggtgtcggtgcccagacccctgagtctcattaccaagagggggagctctgtcgccaggagagggagagaacgtcgtcaagtatggcagtgggagaagctgtcggcgtctttcgcgtatgccgtcgtcgagccctcgatgatcgctctatggggttcgcgaggatccagggaaggcattcatgaactaaccagtgccgggcatcatgcctagaccgaccaattgctcgccggaggacaacttccgctgtggtgcgtggtcgcgatgttctgcgtcataattacagcagtgaggtcacgagaatttgaagatcatcctggtacctggaatcccgagtctcaggcaagttgtgcccttgatcacttttctttacccaataatgttactgttaatcactgtgacatgctcagattaatctgatgggacctaataggtttccctagacatgtcttatcccacaccttgtttaccactgaacttttgggtagttttgctattgctctacctggttttgggattaatattacattatgatcatgttctagttatactgttgtttaattattgttcatgacaagatcattgtgttaattggaagatggagcttaacttgagaaacacgtgctaccacaaggctggaataggatgcccttggctgactaattaggaaatctagtggaggactactgtcggcgtttcgagacaggggggtccctaagccgacgag

SEQ ID NO: 40953 - DNA, 2285 bp, Zea Mays
ttttcgtgttcctcacagaggagttcttctttcttgccaagccggcaataagtctggggttcgatgtcaacaactccctattacaaggtatttatacctgctgtccttctctcccttttacttaagctaaacaccctctctgatacgaaatcacagctaattactctttaacgactccactcagcgccaaaatactttggattagctttggtcatcctcttgctgtatctcctggacgtcagcctgcctttctcctgcacctccattccttcctgctcttgtcctggttcaccagcgttagagatgctaacatccccctctccttgaataacagcttgtccccaagctggcgccatagggaaactttgcttgatggcttgttcatcctcccaggtggacaaggacaccggacagttagaccacctgaccagcacttgaggtatcaccctactgcctcttcgaagcagacgagaggcaagaacctcttcaggtacctgcaagccaatggataaatctggaagcgaatcattgacaacaactcgagtgcccactgctgccttaagctgtgaaacatgaaacacaggatgaatcgcactgtctgatggcaaagctagttcatacgccacaggattcacttttttgatgatctcaaatggtccaaaaaacctgaaagcaagcttggaatgcatcctatctcccactgaacgctgatagaagggttgtaacttaaggaacacccggtcacccactgcaaactgtcgatccgtgcgtcccttgtcagcctgcttcttcatacggtcttgtgcacgttggagatgaaacttgacttgttgtaacatctgctgatggctgtgcaaccaagtactcaggtcaggcactgaacactgatcaacagactccaaacccagctgcaatggagcatgaccatataacacctcaaaaggggatttacccactgctgtatggtaacatgtgttataccagaattcagccagcggtaaccaggaataccactgtcgagggcatgaatggacgaaacagcgaaggtatgcttggttcacacgctcggtctgaccgtccgactgaggatgataggcgctgctcatgcacaactgagtgccagccaaccggaagagttcttgccataatttgctggtaaaaatggggtccctgtcagacactatagactgaggtaagccatgaagcttgtagatttctgacagatatactttagccaccgacaaagctgaaaacgggtgagccagtgctatgaaatgagcatatttagaaaatttatccacgaccaccataatgcaattgtatcggtgagaagtgggtaatccagaaatgaagtcgagactgataacttgccaagcatgctctgggatcggcaatggttgaagtaaacctggatacttgctacggtccggcttagcttgctgacagaccacacaggtttggacaaactccttgatatgctttttcatgccagtccagctgaacaccgacttaactctgcagtaagtaacgggaaacccggaatgacctcccacagcactgtcatggagtgccgatatcaccttagtctgtaaaccagtgttgtgtcccaaccagactcggtccttgtgtctaatgactccagcaaccaaggtataatgttccaccttctggccagtagccaatgcacccaaaagcatcttagttgactcatctgaatcataagcttgaataacttctgttagccattgaggaaccatggaagaagtgttcagcatctgcaattgcaaaagggttgcatccttatgaaaatcagaccgcctggaaagcgcatcagccacgcggttatcaactcctttcttatagactatatgaaaagtcaatcccattaactttgttaaagccttttgttgccatgtggtcgtcacccgctgatcatccagatgtgtaagactttgttggtctgtcttgatcacaaattcagcatgctgaaggtagggtctccactgctcgacagcaaataagatagctagacactccttctcataagtagagagacccaaattcttcggtccaagtgctttgcttatgtacgcaatggaatgaccctcctgatgtaatacagcaccaatgcccaacctgctagcatcagtctcgatgacaaaaaccttagaaaaatcagggatagccaacaccggagcctgcaccagcgctgttttcaaagcttcaaacgccttctgagcatcaatagtccaaataaacagttgattcttctttaacagattggt

SEQ ID NO: 40954 - DNA, 1731 bp, Zea Mays
ctggaaacaggcaaacagagcgagccggaaaaaagacaaaaattcggaatttcctgcgacgagagcaagatattattaattaacgggcaagtgggcatggccgagtttctggaggcttcctgcgtcgcgtggaggcagacagagctcagggagggagggaggggaagaacgaagcagcagcaacagcgccatccgctcgcttccttccccttctctccctcctcccccaccgccggcgtcgcctctacgcgcgcgcgccccgccgggggctgccgtcgctgcacccgtggcccgtgggcggcggccgcgtacctgtacctacgtgctgccgggggggggggggggggggggagctacgcgtctcctctcgccatggacgccggtgtagagaagtgcggcgacgcggcggcggagggcggcggcgacctctacgctgtcctcgggctcaagaaggagtgctccgacgccgacctcaaggtcgcttaccggaagctcgccaagaaatggcacccggacaaatgctcctcctcctccatcagcgtgaagcacatggaggaagccaaggagaagttccaagagatccagggcgcctattcggtactctccgacgccaataaacggctcctctacgatgtgggagtatatgatgacgaggacgacgaggatagcatgcaggggatgggggacttcattggtgagatgacccagatgatgagccaggtgcggccgatgaggcaggaaagctttgaggagctgcagcagctttttgtcgacatgttccagtctgatattgattcaggattctgcaatgggactgctaagggccatcaggttcaggggcaagccaaaagtagaacatgctcaccacggtcccctcctactactatagtaaaggaggcagaggtgtcatcatgtaatggcttcaataagcggggttcatcagcaatggactcaggaaagcctccaaggcctgttgaatgtggtgcaggtcagagccaggctggattttgttttggggtgagcgacacgccaaagccgcgaggtccgaacgccaaccggaagaggaacggccggaaacagaagctgttccccaagcactacgttacatccgaagatgatacggccggttcctagcatcagcagcacggtagcagtttgaccgttggctttggtgatgtcagcagtagggagggcacatcatgtcgcctctgccagctgctgtgatctgaagaggcgtttagctcatcatatgcctttagtcttttgagaggtctttagggttgaaaggtacttcgaaaaccgaaccagcgtctacaggcctaagagggatttccattgaaactcgtcgatgatactacagttttctttccccatctgtgccggttgtgttgtactaccactaccagtgacagtgagtgacttctaagctattcatttttttaactggagaagttgataccatgataattaaaaaaaattgggtgtgtattgaactattaccaagaaaatagtacttggattgtgatgttctgaacattatgttttgtaggcaatcgtgacttgaaagcggtcgaggtatatcttgttattttgtttccctccgatttttcaatatccgattgattttgttttgaagcaaatagagagcatgtccgtgagaatagtcatgaagcaaatagagaacatgtccgtgagaattgtcggttaatataatttttagtttttaatttg

SEQ ID NO: 40955 - DNA, 1640 bp, Zea Mays
gtgggcatggccgagtttctggaggcttcctgcgtcgcgtggaggcagacagagctcagggagggagggaggggaagaacgaagcagcagcaacagcgccatccgctcgcttccttccccttctctccctcctcccccaccgccggcgtcgcctctacgcgcgcgcgccccgccgggggctgccgtcgctgcacccgtggcccgtgggcggcggccgcgtacctgtacctacgtgctgccgggggggggggggggggggggagctacgcgtctcctctcgccatggacgccggtgtagagaagtgcggcgacgcggcggcggagggcggcggcgacctctacgctgtcctcgggctcaagaaggagtgctccgacgccgacctcaaggtcgcttaccggaagctcgccaagaaatggcacccggacaaatgctcctcctcctccatcagcgtgaagcacatggaggaagccaaggagaagttccaagagatccagggcgcctattcggtactctccgacgccaataaacggctcctctacgatgtgggagtatatgatgacgaggacgacgaggatagcatgcaggggatgggggacttcattggtgagatgacccagatgatgagccaggtgcggccgatgggcaggaaagctttgaggagctgcagcagctttttgtcgacatgttccagtctgatattgattcaggattctgcaatgggactgctaagggccatcaggttcaggggcaagccaaaagtagaacatgctcaccacggtcccctcctactactatagtaaaggaggcagaggtgtcatcatgtaatggcttcaataagcggggttcatcagcaatggactcaggaaagcctccaaggcctgttgaatgtggtgcaggtcagagccaggctggattttgttttggggtgagcgacacgccaaagccgcgaggtccgaacgccaaccggaagaggaacggccggaaacagaagctgttccccaagcactacgttacatccgaagatgatacggccggttcctagcatcagcagcacggtagcagtttgaccgttggctttggtgatgtcagcagtagggagggcacatcatgtcgcctctgccagctgctgtgatctgaagaggcgtttagctcatcatatgcctttagtcttttgagaggtctttagggttgaaaggtacttcgaaaaccgaaccagcgtctacaggcctaagagggatttccattgaaactcgtcgatgatactacagttttctttccccatctgtgccggttgtgttgtactaccactaccagtgacagtgagtgacttctaagctattcatttttttaactggagaagttgataccatgataattaaaaaaaattgggtgtgtattgaactattaccaagaaaatagtacttggattgtgatgttctgaacattatgttttgtaggcaatcgtgacttgaaagcggtcgaggtatatcttgttattttgtttccctccgatttttcaatatccgattgattttgttttgaagcaaatagagagcatgtccgtgagaatagtcatgaagcaaatagagaacatgtccgtgagaattgtcggttaatataatttttagtttttaatttg

SEQ ID NO: 40956 - DNA, 1620 bp, Zea Mays
gccgagtttctggaggcttcctgcgtcgcgtggaggcagacagagctcagggagggagggaggggaagaacgaagcagcagcaacagcgccatccgctcgcttccttccccttctctccctcctcccccaccgccggcgtcgcctctacgcgcgcgcgccccgccgggggctgccgtcgctgcacccgtggcccgtgggcggcggccgcgtacctgtacctacgtgctgccgggggggggggggggggggggagctacgcgtctcctctcgccatggacgccggtgtagagaagtgcggcgacgcggcggcggagggcggcggcgacctctacgctgtcctcgggctcaagaaggagtgctccgacgccgacctcaaggtcgcttaccggaagctcgccaagaaatggcacccggacaaatgctcctcctcctccatcagcgtgaagcacatggaggaagccaaggagaagttccaagagatccagggcgcctattcggtactctccgacgccaataaacggctcctctacgatgtgggagtatatgatgacgaggacgacgaggatagcatgcaggggatgggggacttcattggtgagatgacccagatgatgagccagaggcaggaaagctttgaggagctgcagcagctttttgtcgacatgttccagtctgatattgattcaggattctgcaatgggactgctaagggccatcaggttcaggggcaagccaaaagtagaacatgctcaccacggtcccctcctactactatagtaaaggaggcagaggtgtcatcatgtaatggcttcaataagcggggttcatcagcaatggactcaggaaagcctccaaggcctgttgaatgtggtgcaggtcagagccaggctggattttgttttggggtgagcgacacgccaaagccgcgaggtccgaacgccaaccggaagaggaacggccggaaacagaagctgttccccaagcactacgttacatccgaagatgatacggccggttcctagcatcagcagcacggtagcagtttgaccgttggctttggtgatgtcagcagtagggagggcacatcatgtcgcctctgccagctgctgtgatctgaagaggcgtttagctcatcatatgcctttagtcttttgagaggtctttagggttgaaaggtacttcgaaaaccgaaccagcgtctacaggcctaagagggatttccattgaaactcgtcgatgatactacagttttctttccccatctgtgccggttgtgttgtactaccactaccagtgacagtgagtgacttctaagctattcatttttttaactggagaagttgataccatgataattaaaaaaaattgggtgtgtattgaactattaccaagaaaatagtacttggattgtgatgttctgaacattatgttttgtaggcaatcgtgacttgaaagcggtcgaggtatatcttgttattttgtttccctccgatttttcaatatccgattgattttgttttgaagcaaatagagagcatgtccgtgagaatagtcatgaagcaaatagagaacatgtccgtgagaattgtcggttaatataatttttagtttttaatttg

SEQ ID NO: 40957 - DNA, 1191 bp, Zea Mays
ctggaggcttcctgcgtcgcgtggaggcagacagagctcagggagggagggaggggaagaacgaagcagcagcaacagcgccatccgctcgcttccttccccttctctccctcctcccccaccgccggcgtcgcctctacgcgcgcgcgccccgccgggggctgccgtcgctgcacccgtggcccgtgggcggcggccgcgtacctgtacctacgtgctgccgggggggggggggggggggggagctacgcgtctcctctcgccatggacgccggtgtagagaagtgcggcgacgcggcggcggagggcggcggcgacctctacgctgtcctcgggctcaagaaggagtgctccgacgccgacctcaaggtcgcttaccggaagctcgccaagtactctccgacgccaataaacggctcctctacgatgtgggagtatatgatgacgaggacgacgaggatagcatgcaggggatgggggacttcattggtgagatgacccagatgatgagccaggtgcggccgatgaggcaggaaagctttgaggagctgcagcagctttttgtcgacatgttccagtctgatattgattcaggattctgcaatgggactgctaagggccatcaggttcaggggcaagccaaaagtagaacatgctcaccacggtcccctcctactactatagtaaaggaggcagaggtgtcatcatgtaatggcttcaataagcggggttcatcagcaatggactcaggaaagcctccaaggcctgttgaatgtggtgcaggtcagagccaggctggattttgttttgggcttgcttctgacgaacggtcatgcaattgaccaaacatgtaccataagcaaatgtgatgtaggagattgttatgtaaagagacttttgtggccactttgatgttttgttttatgcgtaccttttttgaaaaaaaaaatgattgtggtgctatgtgagtgcctttttctcatcataattttaggcgtctgtagattcacttgagaagtatgaagtccctaggtggttattaaaagaagttagcagctatgtaaaagttagctacagtggcgagtctttaagtgctgatattccttgatagtatgctcatgtgttcacgtcatttttctgttactctctattactgcttcctgtgttgtgaaatatattattttgccctgg

SEQ ID NO: 40958 - DNA, 1366 bp, Zea Mays
ctggaggcttcctgcgtcgcgtggaggcagacagagctcagggagggagggaggggaagaacgaagcagcagcaacagcgccatccgctcgcttccttccccttctctccctcctcccccaccgccggcgtcgcctctacgcgcgcgcgccccgccgggggctgccgtcgctgcacccgtggcccgtgggcggcggccgcgtacctgtacctacgtgctgccgggggggggggggggggggggagctacgcgtctcctctcgccatggacgccggtgtagagaagtgcggcgacgcggcggcggagggcggcggcgacctctacgctgtcctcgggctcaagaaggagtgctccgacgccgacctcaaggtcgcttaccggaagctcgccaagaaatggcacccggacaaatgctcctcctcctccatcagcgtgaagcacatggaggaagccaaggagaagttccaagagatccagggcgcctattcggtactctccgacgccaataaacggctcctctacgatgtgggagtatatgatgacgaggacgacgaggatagcatgcaggggatgggggacttcattggtgagatgacccagatgatgagccaggtgcggccgatggcttaaaaaagacggaattgttatgaaagctccttatcctccatggttttttgtggatactaaaagctgaacttttagaggcaggaaagctttgaggagctgcagcagctttttgtcgacatgttccagtctgatattgattcaggattctgcaatgggactgctaagggccatcaggttcaggggcaagccaaaagtagaacatgctcaccacggtcccctcctactactatagtaaaggaggcagaggtgtcatcatgtaatggcttcaataagcggggttcatcagcaatggactcaggaaagcctccaaggcctgttgaatgtggtgcaggtcagagccaggctggattttgttttgggcttgcttctgacgaacggtcatgcaattgaccaaacatgtaccataagcaaatgtgatgtaggagattgttatgtaaagagacttttgtggccactttgatgttttgttttatgcgtaccttttttgaaaaaaaaaatgattgtggtgctatgtgagtgcctttttctcatcataattttaggcgtctgtagattcacttgagaagtatgaagtccctaggtggttattaaaagaagttagcagctatgtaaaagttagctacagtggcgagtctttaagtgctgatattccttgatagtatgctcatgtgttcacgtcatttttctgttactctctattactgcttcctgtgttgtgaaatatattattttgccctgg

SEQ ID NO: 40959 - DNA, 1276 bp, Zea Mays
ctggaggcttcctgcgtcgcgtggaggcagacagagctcagggagggagggaggggaagaacgaagcagcagcaacagcgccatccgctcgcttccttccccttctctccctcctcccccaccgccggcgtcgcctctacgcgcgcgcgccccgccgggggctgccgtcgctgcacccgtggcccgtgggcggcggccgcgtacctgtacctacgtgctgccgggggggggggggggggggggagctacgcgtctcctctcgccatggacgccggtgtagagaagtgcggcgacgcggcggcggagggcggcggcgacctctacgctgtcctcgggctcaagaaggagtgctccgacgccgacctcaaggtcgcttaccggaagctcgccaagaaatggcacccggacaaatgctcctcctcctccatcagcgtgaagcacatggaggaagccaaggagaagttccaagagatccagggcgcctattcggtactctccgacgccaataaacggctcctctacgatgtgggagtatatgatgacgaggacgacgaggatagcatgcaggggatgggggacttcattggtgagatgacccagatgatgagccagaggcaggaaagctttgaggagctgcagcagctttttgtcgacatgttccagtctgatattgattcaggattctgcaatgggactgctaagggccatcaggttcaggggcaagccaaaagtagaacatgctcaccacggtcccctcctactactatagtaaaggaggcagaggtgtcatcatgtaatggcttcaataagcggggttcatcagcaatggactcaggaaagcctccaaggcctgttgaatgtggtgcaggtcagagccaggctggattttgttttgggcttgcttctgacgaacggtcatgcaattgaccaaacatgtaccataagcaaatgtgatgtaggagattgttatgtaaagagacttttgtggccactttgatgttttgttttatgcgtaccttttttgaaaaaaaaaatgattgtggtgctatgtgagtgcctttttctcatcataattttaggcgtctgtagattcacttgagaagtatgaagtccctaggtggttattaaaagaagttagcagctatgtaaaagttagctacagtggcgagtctttaagtgctgatattccttgatagtatgctcatgtgttcacgtcatttttctgttactctctattactgcttcctgtgttgtgaaatatattattttgccctgg

SEQ ID NO: 40960 - DNA, 1617 bp, Zea Mays
ctggaggcttcctgcgtcgcgtggaggcagacagagctcagggagggagggaggggaagaacgaagcagcagcaacagcgccatccgctcgcttccttccccttctctccctcctcccccaccgccggcgtcgcctctacgcgcgcgcgccccgccgggggctgccgtcgctgcacccgtggcccgtgggcggcggccgcgtacctgtacctacgtgctgccgggggggggggggggggggggagctacgcgtctcctctcgccatggacgccggtgtagagaagtgcggcgacgcggcggcggagggcggcggcgacctctacgctgtcctcgggctcaagaaggagtgctccgacgccgacctcaaggtcgcttaccggaagctcgccaagaaatggcacccggacaaatgctcctcctcctccatcagcgtgaagcacatggaggaagccaaggagaagttccaagagatccagggcgcctattcggtactctccgacgccaataaacggctcctctacgatgtgggagtatatgatgacgaggacgacgaggatagcatgcaggggatgggggacttcattggtgagatgacccagatgatgagccaggtgcggccgatggaaagctttgaggagctgcagcagctttttgtcgacatgttccagtctgatattgattcaggattctgcaatgggactgctaagggccatcaggttcaggggcaagccaaaagtagaacatgctcaccacggtcccctcctactactatagtaaaggaggcagaggtgtcatcatgtaatggcttcaataagcggggttcatcagcaatggactcaggaaagcctccaaggcctgttgaatgtggtgcaggtcagagccaggctggattttgttttggggtgagcgacacgccaaagccgcgaggtccgaacgccaaccggaagaggaacggccggaaacagaagctgttccccaagcactacgttacatccgaagatgatacggccggttcctagcatcagcagcacggtagcagtttgaccgttggctttggtgatgtcagcagtagggagggcacatcatgtcgcctctgccagctgctgtgatctgaagaggcgtttagctcatcatatgcctttagtcttttgagaggtctttagggttgaaaggtacttcgaaaaccgaaccagcgtctacaggcctaagagggatttccattgaaactcgtcgatgatactacagttttctttccccatctgtgccggttgtgttgtactaccactaccagtgacagtgagtgacttctaagctattcatttttttaactggagaagttgataccatgataattaaaaaaaattgggtgtgtattgaactattaccaagaaaatagtacttggattgtgatgttctgaacattatgttttgtaggcaatcgtgacttgaaagcggtcgaggtatatcttgttattttgtttccctccgatttttcaatatccgattgattttgttttgaagcaaatagagagcatgtccgtgagaatagtcatgaagcaaatagagaacatgtccgtgagaattgtcggttaatataatttttagtttttaatttg

SEQ ID NO: 40961 - DNA, 1617 bp, Zea Mays
ctggaggcttcctgcgtcgcgtggaggcagacagagctcagggagggagggaggggaagaacgaagcagcagcaacagcgccatccgctcgcttccttccccttctctccctcctcccccaccgccggcgtcgcctctacgcgcgcgcgccccgccgggggctgccgtcgctgcacccgtggcccgtgggcggcggccgcgtacctgtacctacgtgctgccgggggggggggggggggggggagctacgcgtctcctctcgccatggacgccggtgtagagaagtgcggcgacgcggcggcggagggcggcggcgacctctacgctgtcctcgggctcaagaaggagtgctccgacgccgacctcaaggtcgcttaccggaagctcgccaagaaatggcacccggacaaatgctcctcctcctccatcagcgtgaagcacatggaggaagccaaggagaagttccaagagatccagggcgcctattcggtactctccgacgccaataaacggctcctctacgatgtgggagtatatgatgacgaggacgacgaggatagcgggatgggggacttcattggtgagatgacccagatgatgagccaggtgcggccgatgaggcaggaaagctttgaggagctgcagcagctttttgtcgacatgttccagtctgatattgattcaggattctgcaatgggactgctaagggccatcaggttcaggggcaagccaaaagtagaacatgctcaccacggtcccctcctactactatagtaaaggaggcagaggtgtcatcatgtaatggcttcaataagcggggttcatcagcaatggactcaggaaagcctccaaggcctgttgaatgtggtgcaggtcagagccaggctggattttgttttggggtgagcgacacgccaaagccgcgaggtccgaacgccaaccggaagaggaacggccggaaacagaagctgttccccaagcactacgttacatccgaagatgatacggccggttcctagcatcagcagcacggtagcagtttgaccgttggctttggtgatgtcagcagtagggagggcacatcatgtcgcctctgccagctgctgtgatctgaagaggcgtttagctcatcatatgcctttagtcttttgagaggtctttagggttgaaaggtacttcgaaaaccgaaccagcgtctacaggcctaagagggatttccattgaaactcgtcgatgatactacagttttctttccccatctgtgccggttgtgttgtactaccactaccagtgacagtgagtgacttctaagctattcatttttttaactggagaagttgataccatgataattaaaaaaaattgggtgtgtattgaactattaccaagaaaatagtacttggattgtgatgttctgaacattatgttttgtaggcaatcgtgacttgaaagcggtcgaggtatatcttgttattttgtttccctccgatttttcaatatccgattgattttgttttgaagcaaatagagagcatgtccgtgagaatagtcatgaagcaaatagagaacatgtccgtgagaattgtcggttaatataatttttagtttttaatttg

SEQ ID NO: 40962 - DNA, 1694 bp, Zea Mays
ctggaggcttcctgcgtcgcgtggaggcagacagagctcagggagggagggaggggaagaacgaagcagcagcaacagcgccatccgctcgcttccttccccttctctccctcctcccccaccgccggcgtcgcctctacgcgcgcgcgccccgccgggggctgccgtcgctgcacccgtggcccgtgggcggcggccgcgtacctgtacctacgtgctgccgggggggggggggggggggggagctacgcgtctcctctcgccatggacgccggtgtagagaagtgcggcgacgcggcggcggagggcggcggcgacctctacgctgtcctcgggctcaagaaggagtgctccgacgccgacctcaaggtcgcttaccggaagctcgccaagtactctccgacgccaataaacggctcctctacgatgtgggagtatatgatgacgaggacgacgaggatagcgtaagcatctgtagctgaactgttctttgtgttgcataattctggatataacagagggtgacgtactgacgttttctgctgttgctgcagatgcaggggatgggggacttcattggtgagatgacccagatgatgagccaggtgcggccgatggcttaaaaaagacggaattgttatgaaagctccttatcctccatggttttttgtggatactaaaagctgaacttttagaggcaggaaagctttgaggagctgcagcagctttttgtcgacatgttccagtctgatattgattcaggattctgcaatgggactgctaagggccatcaggttcaggggcaagccaaaagtagaacatgctcaccacggtcccctcctactactatagtaaaggaggcagaggtgtcatcatgtaatggcttcaataagcggggttcatcagcaatggactcaggaaagcctccaaggcctgttgaatgtggtgcaggtcagagccaggctggattttgttttggggtgagcgacacgccaaagccgcgaggtccgaacgccaaccggaagaggaacggccggaaacagaagctgttccccaagcactacgttacatccgaagatgatacggccggttcctagcatcagcagcacggtagcagtttgaccgttggctttggtgatgtcagcagtagggagggcacatcatgtcgcctctgccagctgctgtgatctgaagaggcgtttagctcatcatatgcctttagtcttttgagaggtctttagggttgaaaggtacttcgaaaaccgaaccagcgtctacaggcctaagagggatttccattgaaactcgtcgatgatactacagttttctttccccatctgtgccggttgtgttgtactaccactaccagtgacagtgagtgacttctaagctattcatttttttaactggagaagttgataccatgataattaaaaaaaattgggtgtgtattgaactattaccaagaaaatagtacttggattgtgatgttctgaacattatgttttgtaggcaatcgtgacttgaaagcggtcgaggtatatcttgttattttgtttccctccgatttttcaatatccgattgattttgttttgaagcaaatagagagcatgtccgtgagaatagtcatgaagcaaatagagaacatgtccgtgagaattgtcggttaatataatttttagtttttaatttg

SEQ ID NO: 40963 - DNA, 1455 bp, Zea Mays
ctggaggcttcctgcgtcgcgtggaggcagacagagctcagggagggagggaggggaagaacgaagcagcagcaacagcgccatccgctcgcttccttccccttctctccctcctcccccaccgccggcgtcgcctctacgcgcgcgcgccccgccgggggctgccgtcgctgcacccgtggcccgtgggcggcggccgcgtacctgtacctacgtgctgccgggggggggggggggggggggagctacgcgtctcctctcgccatggacgccggtgtagagaagtgcggcgacgcggcggcggagggcggcggcgacctctacgctgtcctcgggctcaagaaggagtgctccgacgccgacctcaaggtcgcttaccggaagctcgccaagatgcaggggatgggggacttcattggtgagatgacccagatgatgagccaggtgcggccgatgaggcaggaaagctttgaggagctgcagcagctttttgtcgacatgttccagtctgatattgattcaggattctgcaatgggactgctaagggccatcaggttcaggggcaagccaaaagtagaacatgctcaccacggtcccctcctactactatagtaaaggaggcagaggtgtcatcatgtaatggcttcaataagcggggttcatcagcaatggactcaggaaagcctccaaggcctgttgaatgtggtgcaggtcagagccaggctggattttgttttggggtgagcgacacgccaaagccgcgaggtccgaacgccaaccggaagaggaacggccggaaacagaagctgttccccaagcactacgttacatccgaagatgatacggccggttcctagcatcagcagcacggtagcagtttgaccgttggctttggtgatgtcagcagtagggagggcacatcatgtcgcctctgccagctgctgtgatctgaagaggcgtttagctcatcatatgcctttagtcttttgagaggtctttagggttgaaaggtacttcgaaaaccgaaccagcgtctacaggcctaagagggatttccattgaaactcgtcgatgatactacagttttctttccccatctgtgccggttgtgttgtactaccactaccagtgacagtgagtgacttctaagctattcatttttttaactggagaagttgataccatgataattaaaaaaaattgggtgtgtattgaactattaccaagaaaatagtacttggattgtgatgttctgaacattatgttttgtaggcaatcgtgacttgaaagcggtcgaggtatatcttgttattttgtttccctccgatttttcaatatccgattgattttgttttgaagcaaatagagagcatgtccgtgagaatagtcatgaagcaaatagagaacatgtccgtgagaattgtcggttaatataatttttagtttttaatttg

SEQ ID NO: 40964 - DNA, 1526 bp, Zea Mays
ctggaggcttcctgcgtcgcgtggaggcagacagagctcagggagggagggaggggaagaacgaagcagcagcaacagcgccatccgctcgcttccttccccttctctccctcctcccccaccgccggcgtcgcctctacgcgcgcgcgccccgccgggggctgccgtcgctgcacccgtggcccgtgggcggcggccgcgtacctgtacctacgtgctgccgggggggggggggggggggggagctacgcgtctcctctcgccatggacgccggtgtagagaagtgcggcgacgcggcggcggagggcggcggcgacctctacgctgtcctcgggctcaagaaggagtgctccgacgccgacctcaaggtcgcttaccggaagctcgccaagtactctccgacgccaataaacggctcctctacgatgtgggagtatatgatgacgaggacgacgaggatagcatgcaggggatgggggacttcattggtgagatgacccagatgatgagccaggtgcggccgatgaggcaggaaagctttgaggagctgcagcagctttttgtcgacatgttccagtctgatattgattcaggattctgcaatgggactgctaagggccatcaggttcaggggcaagccaaaagtagaacatgctcaccacggtcccctcctactactatagtaaaggaggcagaggtgtcatcatgtaatggcttcaataagcggggttcatcagcaatggactcaggaaagcctccaaggcctgttgaatgtggtgcaggtcagagccaggctggattttgttttggggtgagcgacacgccaaagccgcgaggtccgaacgccaaccggaagaggaacggccggaaacagaagctgttccccaagcactacgttacatccgaagatgatacggccggttcctagcatcagcagcacggtagcagtttgaccgttggctttggtgatgtcagcagtagggagggcacatcatgtcgcctctgccagctgctgtgatctgaagaggcgtttagctcatcatatgcctttagtcttttgagaggtctttagggttgaaaggtacttcgaaaaccgaaccagcgtctacaggcctaagagggatttccattgaaactcgtcgatgatactacagttttctttccccatctgtgccggttgtgttgtactaccactaccagtgacagtgagtgacttctaagctattcatttttttaactggagaagttgataccatgataattaaaaaaaattgggtgtgtattgaactattaccaagaaaatagtacttggattgtgatgttctgaacattatgttttgtaggcaatcgtgacttgaaagcggtcgaggtatatcttgttattttgtttccctccgatttttcaatatccgattgattttgttttgaagcaaatagagagcatgtccgtgagaatagtcatgaagcaaatagagaacatgtccgtgagaattgtcggttaatataatttttagtttttaatttg

SEQ ID NO: 40965 - DNA, 1701 bp, Zea Mays
ctggaggcttcctgcgtcgcgtggaggcagacagagctcagggagggagggaggggaagaacgaagcagcagcaacagcgccatccgctcgcttccttccccttctctccctcctcccccaccgccggcgtcgcctctacgcgcgcgcgccccgccgggggctgccgtcgctgcacccgtggcccgtgggcggcggccgcgtacctgtacctacgtgctgccgggggggggggggggggggggagctacgcgtctcctctcgccatggacgccggtgtagagaagtgcggcgacgcggcggcggagggcggcggcgacctctacgctgtcctcgggctcaagaaggagtgctccgacgccgacctcaaggtcgcttaccggaagctcgccaagaaatggcacccggacaaatgctcctcctcctccatcagcgtgaagcacatggaggaagccaaggagaagttccaagagatccagggcgcctattcggtactctccgacgccaataaacggctcctctacgatgtgggagtatatgatgacgaggacgacgaggatagcatgcaggggatgggggacttcattggtgagatgacccagatgatgagccaggtgcggccgatggcttaaaaaagacggaattgttatgaaagctccttatcctccatggttttttgtggatactaaaagctgaacttttagaggcaggaaagctttgaggagctgcagcagctttttgtcgacatgttccagtctgatattgattcaggattctgcaatgggactgctaagggccatcaggttcaggggcaagccaaaagtagaacatgctcaccacggtcccctcctactactatagtaaaggaggcagaggtgtcatcatgtaatggcttcaataagcggggttcatcagcaatggactcaggaaagcctccaaggcctgttgaatgtggtgcaggtcagagccaggctggattttgttttggggtgagcgacacgccaaagccgcgaggtccgaacgccaaccggaagaggaacggccggaaacagaagctgttccccaagcactacgttacatccgaagatgatacggccggttcctagcatcagcagcacggtagcagtttgaccgttggctttggtgatgtcagcagtagggagggcacatcatgtcgcctctgccagctgctgtgatctgaagaggcgtttagctcatcatatgcctttagtcttttgagaggtctttagggttgaaaggtacttcgaaaaccgaaccagcgtctacaggcctaagagggatttccattgaaactcgtcgatgatactacagttttctttccccatctgtgccggttgtgttgtactaccactaccagtgacagtgagtgacttctaagctattcatttttttaactggagaagttgataccatgataattaaaaaaaattgggtgtgtattgaactattaccaagaaaatagtacttggattgtgatgttctgaacattatgttttgtaggcaatcgtgacttgaaagcggtcgaggtatatcttgttattttgtttccctccgatttttcaatatccgattgattttgttttgaagcaaatagagagcatgtccgtgagaatagtcatgaagcaaatagagaacatgtccgtgagaattgtcggttaatataatttttagtttttaatttg

SEQ ID NO: 40966 - DNA, 892 bp, Zea Mays
tttaattctttattatgagttcattaccagtttggcatgtgaacagatagatcggtcacacgtcattttgttcacggtccccttagtatatagtaccttaaattgccattcacctggatgcctctgatgctccatgtttgttcttttctttgagtacccgacaaaactagtggtgctggtgagcgacacgccaaagccgcgaggtccgaacgccaaccggaagaggaacggccggaaacagaagctgttccccaagcactacgttacatccgaagatgatacggccggttcctagcatcagcagcacggtagcagtttgaccgttggctttggtgatgtcagcagtagggagggcacatcatgtcgcctctgccagctgctgtgatctgaagaggcgtttagctcatcatatgcctttagtcttttgagaggtctttagggttgaaaggtacttcgaaaaccgaaccagcgtctacaggcctaagagggatttccattgaaactcgtcgatgatactacagttttctttccccatctgtgccggttgtgttgtactaccactaccagtgacagtgagtgacttctaagctattcatttttttaactggagaagttgataccatgataattaaaaaaaattgggtgtgtattgaactattaccaagaaaatagtacttggattgtgatgttctgaacattatgttttgtaggcaatcgtgacttgaaagcggtcgaggtatatcttgttattttgtttccctccgatttttcaatatccgattgattttgttttgaagcaaatagagagcatgtccgtgagaatagtcatgaagcaaatagagaacatgtccgtgagaattgtcggttaatataatttttagtttttaatttg

SEQ ID NO: 40967 - DNA, 851 bp, Zea Mays
ataacttgtttttctacaagatggtcggagtaaacttattttgtatgtattttaacttagcaacagatatataatttagtacatagtcatatggtcataattaggaacctaccctctgtagcttgagcatctaatacaaatctatcaagtacaggggcagttgcaagttgcaacacaatcagagtagcataaggtatttaagctgtaacaagataggtcttgaaacatatcaaagcatcgaacattcttaagcggcgatggtagcggaagccttggaagcggcagaaagcttggacctcctcttggccaagctctcgcggtctctctattccttcagcctctgagcaagaagcttttggtactcggcagcctcagacttcttcttggcgatcctcttcttcttgccaacgactctagtgcgcttcctctaaagggtcaaggggtcacaagccactggatctcggtgtgcttctaacttcatgtttcattgattcgatgacgccaagactgaactgtatctagaagcacactgaaaccactgctttgtgacatggtgttgtccagctggatttgcattgaaatgaaaacttgacaacctcataaacctgcatatcataaaaagcctatagattactaaaatagacaggggtcatcctcatgggcacttaggcaggacagttacatgtatcccatttagaagtgtaagtcaacaaatgtattagtaatcttgaggcaattcaagaaaagtttcggttgtctgcacacagaagaatcttcacttctttcgttcaactcttgattagcataggtcaatatttgatcattctgtaacagtccaataactattttac

SEQ ID NO: 40968 - DNA, 4251 bp, Zea Mays
atcaaagcccacttgtccttgtcccttctcccctccggcctcagcttcccttccccgtcgtctatccgcgtcagtttcgactttcgattcccctcgccctcgccgacggccagacgccgaacgtctcgccctctcccgacgctccccgcctcccccttgatccgccgagcgcggcggccgccgccgccgccgaacccgatctccccccctcccgcgtgacaggcacggcctcccctcggttggaagggtttgctgtatcatgcattttttgtggataatcttcattttctcttgagtcaccgattcttttgttgtcttcaaaatgtcgggcttgctgaactcaaaccttaatagttcggcatcaaatctttcagactcagctggaaggccatttacagcatccttttcgggtcaatctggatcaattccaggttttcatcattctggcttgcataacactcatggaagttacaatcttccgagtatgcctggatcacttgcacaaaggaatgctgccatgagtggccttccgtcctctggggttcaacaacctggaggtagcattcctgggagattcccttcaaacaaccttccagttggcatgcctcagattcctcatgcacattcaggtgtcagtggtagagggatgaattttggcgcaggtccggcatttagtagcagcatgaatattggtggtaacatccaaggcttatcctcgggcttgggctccggtggtaatcgcaattctgttcatgggatgccagtatcttcatctataggaaactcgggtcaacggataagttctgtaggaaatatggtaagtgcaagcaatattggaagaaatataggcactggtggtttgtccgtgccaagtattgcatcacgaatcaatttgaatggtagtggtgggagtggtagtctgaatgtgcaaggatccagtcgaatgatgaatggattgcttcatcaacaagcattaaggatgaaacagagcacctcttagggaaggaggatgagatcagacatatatgtgcgtaggacccaagaatttgaggttagaggcattgaaaaggatgaaagggagtaaggcgaggggccctgatggtttcttaattgagacatggagacacctcaaggacacatttatagtagggctaaccaagttattcaaccatatctgccgattaaacaagatgactaacgaatggagaagtatattggtatcgatctacgaaagtaagggagatattcaaagttgtactaattattggagaaattatttgattagccatactatgaagctatgggggagagttaccgaacattgtctgaaaggaatgatgaggatatctatgaaccaatttggtttcatgcccgaaaggtcaaccatgaaaaccattttcttaataagacaagtgatagggcattatagggagcagaaggacatgcacatgtttttcattgacttggaggatgcttacaacagaatactatggaaataatggaatattatttggtgggctttagagaaatataaaattccaatgaagtatgtttgactcattaaggacatgtacaacaatgttgtgactagtgttcaaacaagtgatggagacatagatgacttttcgattagaataagattacatcaagtatcagttttgacttttgagcccttacttttttccttagtgatggataatgtcacaagggacatacaagggggtatcacttcgtgtatgttttttgcggatgatgtagtgctagttgatgaaagttgggtaggagtaaatatgaaactacaaaactagagttgtggtgggagactctagagtcaaaggttttcgactcggtagaactgaaactgaatatacaagatgtgacttcaacgttactactcacgaggaaggatatgttagtttggaagatcaagtagtgccaaggatggatacctttcagtatttaggatcaatgctatagaaagatatggatatttatgatattagacgtagaatcaaagcagggtggatgaagtggtatcaaatggcgttctatatgactagaggccaagtgggtaccacagaagctaaaaagacaagttttataggacaatgattagacctgctatgctgtatgatacggaatatcggtctacaaaaagatgacatattcaatagagaagttttgttgaaatgcttatgttgtgttggatctatggccatacaagaagggatcaagtccaaaacgatgctatacatggtaggctagaggttgcaccaattgaatttttttttgtccaacatcgattgagatggtttgaacatgcccaatggagacctccaagaggcaccattgtgtagttgaaatttaagacatgatagcaatgaccaatgggaagatagatagagaggaagatcaagatcaatgtgggaagaggcagtaaaaggagacttgaagggttggaatataactaaagatttagccttgaataagagtgcatgaaaagtagctatccacgtgcatgaagccatgaacctttgagttgtggtttttgttgggtttcaactctagcttaccccaacttgtttggaacaaaaaaagctttgatattgtgaaacaagccttcaaaaattctgatggttaagaagtgtgctgtttattacgtatctgtttatcagagtgcatgtctcatccagcttttttaatctctgaaaccagcaactcctcagttgataaatatgcttggaagttcatatccaacatctggaggttcattatcacagagccaaattcaagcaggaaataattcttttagttctatggggatgttgcatgatgccagtgacactgctccatttgacataaatgattttccccaattgtctggtcgacctagttctgctggtggtccgcaaggacaatatggatcactgcgcaagcaaggagttggtgttaatacccttgtgcaacaaaaccaggaattcagcattcaaaatgaagacttcccggctttgcctggatataaaggtaacccttcggattataatgctatagagttgcatcacaaggaacaactccacgataatgtacctgtaattcaagcacagcagtatcctatggcaaggtcaggcttaggaagtagctacctacccaatcgacaacaacaccagcaaggtgctaattcagtccagaatggcggatcccacaatattttactgagaccacccagtcaaacttctagtttgggatcatatgatccatttctgcagcaataccagcagcctcagcctcaaaatcatttcagattgcagcagatgtcttcagctgcacattcatatcgggatcagattcaaaagattcaggcgggaccgacaccacctgatccatatggcttgttaggatttttgggtgttataaggatgaatgatgctgatttagcatctcttgctttaggaatagatttgacagcattgggtttgaacttgaactcgccagataatctatacaagacatttggctcaccctggtcgaatgacccagcaaaaggagatactgattttcgaattccagcttgttacctctttgacaaaactcctccactacagaccttactttttcagaggtttcacatagtaacactatttttcgtcttctatagcatgccaaaagatgaagctcagctgtactctgccaatgaactgtataatcggggatggttttaccataaagaagtgcacttatggctcaccagaatttcaaatgtggaacctctagtaaaaactcacctctatgaacgtggatcttactattgctttgacccagaatcctgggacacaatacgcaaggacaactttgttctccactatgagatggtagagaaaaggccagttctgccttcaacatcaccaaaccttagatgaaaagaaaatctaggacggggagaggaacaaagaaacatataacgatctgcaggaaggactaaggaggcaggaagtcgcagaacagaattggggatgtccaattaacaccccttgtaattactaaaactgtgagcgaatgttgcgtttttcttgcactccccccttcgccctcctaattaaactgcctaatgttcaggattagtttttctccagcttcaaaataacaacgcatagatggttttgatgttctgtcctctgtccaaccatatcatgtcgatgctcagcgaaagataaaatcataccatgtcgatgatcagcagtgtgcacaaagtcg

SEQ ID NO: 40969 - DNA, 1290 bp, Zea Mays
catcttttctgatgcaccaaaatgaaacaaggtttacaatatgaaacaaacttttgcaataaggtaacccttcggattataatgctatagagttgcatcacaaggaacaactccacgataatgtacctgtaattcaagcacagcagtatcctatggcaaggtcaggcttaggaagtagctacctacccaatcgacaacaacaccagcaaggtgctaattcagtccagaatggcggatcccacaatattttactgagaccacccagtcaaacttctagtttgggatcatatgatccatttctgcagcaataccagcagcctcagcctcaaaatcatttcagattgcagcagatgtcttcagctgcacattcatatcgggatcagattcaaaagattcaggcgggaccgacaccacctgatccatatggcttgttaggatttttgggtgttataaggatgaatgatgctgatttagcatctcttgctttaggaatagatttgacagcattgggtttgaacttgaactcgccagataatctatacaagacatttggctcaccctggtcgaatgacccagcaaaaggagatactgattttcgaattccagcttgttacctctttgacaaaactcctccactacagaccttactttttcagaggtttcacatagtaacactatttttcgtcttctatagcatgccaaaagatgaagctcagctgtactctgccaatgaactgtataatcggggatggttttaccataaagaagtgcacttatggctcaccagaatttcaaatgtggaacctctagtaaaaactcacctctatgaacgtggatcttactattgctttgacccagaatcctgggacacaatacgcaaggacaactttgttctccactatgagatggtagagaaaaggccagttctgccttcaacatcaccaaaccttagatgaaaagaaaatctaggacggggagaggaacaaagaaacatataacgatctgcaggaaggactaaggaggcaggaagtcgcagaacagaattggggatgtccaattaacaccccttgtaattactaaaactgtgagcgaatgttgcgtttttcttgcactccccccttcgccctcctaattaaactgcctaatgttcaggattagtttttctccagcttcaaaataacaacgcatagatggttttgatgttctgtcctctgtccaaccatatcatgtcgatgctcagcgaaagataaaatcataccatgtcgatgatcagcagtgtgcacaaagtcg

SEQ ID NO: 40970 - DNA, 592 bp, Zea Mays
cctcctcggttggagctcaggttgtgtattctaagtacgctggaaccgaggtcgcgttgaacgatcacagccatctggttctcaaagaggatgacgttataggtatcttagaaactgatgacgtgaaagacatgaagcctctgaacgaccgtgttctaatcaaggttgctgaagctgaagacaaaactccaggaggcctactgcttacggaaactgccaaggagaagccatctatcggaacggtcgtagcggttggcccaggccccctggacgaggatggcgagaggctcgcgctgtccgtctccgcggggagcactgtcctgtactccaagtacgccggcagcgagttcaagggcgccgacggcacgaactacatcgtgctgagggcgtcggatctgatggccgttctctcctgaactgggcttgggctggaggacgaacgaggtgcaggtgcaggagcaggcttagcaataccgtaggattcctcgcggctttcccgtcccctcccccctcctacttggttgtcttgtttgactgtcttctgaggaaccgaacaacagtaataagcacaccgatgccgttcatacagatt

SEQ ID NO: 40971 - DNA, 998 bp, Zea Mays
agaatcgtggcgtctccctggggataaagtacttctccagctcctctgcgtcttccgccgctcttgctgtcctctgtgctatccgctagggtttatctgctcgaggaatggcgtcggtgcaggtctccggcgcgggggtcggtgccgcggccttctctgtgaaggggaaggcctccaccggtgcgctccggcttcgctctacgttgaccttcggcgaggtctgcccggcgcggcgggcgttccgcggcctcgtcgtcagggccgctaccgtcgtcgcccccaagtatacaacacttaagcccttggctgatagagtgcttgtaaagattaactcttccgaggagaagacaactggtagttgctgttggagaaggaaggataattggggataagaaagttgatgtcagcattcaggttggagctcaggttgtgtattctaagtacgctggaaccgaggtcgcgttgaacgatcacagccatctggttctcaaagaggatgacgttataggtatcttagaaactgatgacgtgaaagacatgaagcctctgaacgaccgtgttctaatcaaggttgctgaagctgaagacaaaactccaggaggcctactgcttacggaaactgccaaggagaagccatctatcggaacggtcgtagcggttggcccaggccccctggacgaggatggcgagaggctcgcgctgtccgtctccgcggggagcactgtcctgtactccaagtacgccggcagcgagttcaagggcgccgacggcacgaactacatcgtgctgagggcgtcggatctgatggccgttctctcctgaactgggcttgggctggaggacgaacgaggtgcaggtgcaggagcaggcttagcaataccgtaggattcctcgcggctttcccgtcccctcccccctcctacttggttgtcttgtttgactgtcttctgaggaaccgaacaacagtaataagcacaccgatgccgttcatacagatt

SEQ ID NO: 40972 - DNA, 3396 bp, Zea Mays
ctcatcgctgggccccgcgatactggaccggccgagccgagcccacgcgcagtggcagcagatcgagccccagttccagcagagtcccactccgccacgggaaaaactcgctttcgaaatctctcctctcctgtccaaacccaacgaaatctgcgcgattcataacgaatcgccatagttaatcgaagcattaaactggggaaaaacagagggagaagagaagataggggagagagggagagggagagggagagggagggaggaggccatcgcatccgccggctggtcctgatcccggtcccgggtcgtatttgggcgccgccgcacgcagcaggaggaagacatcagcgcggggcatttaggatggtggacaagaatgatgggtcagagggtattaaattcaacacatcaaacctcattcaaacaaccgaagaggttgcaagagcgtttatcgctgcggcctcggctgccactgcacagtctgcacggacatctgtagtgtattcatccaaagatgagagtggcagcccaatgcagaagcttcagcagcatttttcgaaaatcatgaaagggttttcgtccgcaccagacctgtcaggaacttacaatccggaagtccttacaacgcaaaagcggcagtggtcgaggtaccagatgaagtcattgggtgataggtgcatcagagaaccatcacatctgttcgagagcatagtgattgttgggcttccacctcacgcagatatccaggagctggaaaacattgcattagggagaaatgatgaagatggaaaaagatcaaaaaatttatttggcaatagtcaccaccaagttcacgcaataacaaatttggaaccacaggttctttttgcataccctccagagaagcctcttccactcaagtacaaggataccctctctttctgccttcccggaggtgtacaggttcatgctgtcgaacgtactccttcgttcagtgagctgaatgaaattctcctgggacaggaacagcttaaagaaagcaaccaatcatttgtgttccgcctacaggtggctgataactctgcattatatggatgctgtgtgcttgttgaagagatcgtacagagaccatcaaagttggtatcgatgctcatgaatgaaaaacccgtctttccacgccggagtcgatatgtgataactacgccccggtgttattgcatcctatccaggcttccattctttgaactacattttggggtgttgcagagtattcttatggaagaacgtcttgaatggctcacagatggtgttagcatgctaacttccttatcgcttgaggaatcctgtgagaacgatatctgtgaaggaactgcagttacagcacagaaacattatttagatagcaacacaactgatgtggataaatcatctgaatctagcaatggagtttcgtcaacggagctgtctgatactgacagcagttctgggtgtagagaaaaccagcttgactttgtttctaaagaacaacagcaaaatagttcttgtgaagaacagagtaattttaaaagagaaatagtcacttgttctgatgcttccgaagtgtctgatcattttgttccagaagatacatcatctgatcagtctggagttaagcaccatgaacttcattctgcaccaagtatcccggatgaatctggtgcaaggaactgtgatgattccccgaaggaaaatgtggatgatgaggagcttgatctcttcattatagatactattttaccacttatgcgatctcgcctttgtgaagattgtgaatcatctccaagggttctccttctgaaggcagaaattttgacacccaagaatcggattcagaggagccatcttccattggtgatggagacttagttaaacacaacaacatactgcagtgggctaaggcaaaaaaatatggttctttgcaagttgtctgtcaatactaccagttacagtgtcctgctaggggttcaacacttgcttttcatcccttggagcatttgcattctttgagttttcaccggcctggtgaaacagttcttcacattgctggttctactattgagcttaggtcacgtgatacaagcttagaggttgctgagatgcgcaatgcactctttgctgaggaggaatcgactgctttgtccacatgggcagtggcatccatttgtggatgcctcaggttggaacatgtaatgacactttttgctgccgcactcctggagaaacagattgttattgtctgttctaatctgggaatgttatcggcttcagttttgtccatcttacctctaatacgaccgtatcagtggcagagtctcctcatgacggttttgcctaatgacatgatggattttctggatgccccagttccatacatagtgggcgtacaaaacaagacatctgatgtgctcaaccggctaacaaatgccgtagtcattgatgccaacaggaatcagattaagtcctcttcagtcccacaactaccacagcacagagagttgctttctgccttgcgcccgtatcattcaatacttgttggcgaaagttatcttgcaagaaaacgccctgtttatgaatgcacagatgcccaggtggaaggggctaaaggtttcttggcagtgcttagagactaccttgacacactatgctcgaacttgagatctcatacaattaccaatgtgcaatctaacaatgacaaggtttccttacttttaaaagagagctttattggttctttcccaagccgggataggccttttatgaagctttttgtggacacccagttgttctcagtacatacagacctagttctctctttttatcagaaggactaagtgtctggcagacttgaatgtctgcctcgtcttgccaagcctttagatgttgagctaaactgtacatatcggcagctcagtgtttgtgcaaagagctcgaaggagaagccatataccgtcagaaaaaagtggtagattgccaggatccagttatgggtattgaagaagaatgcttgtagctgcttaagttagtctggtgcggtaatccaaggttttgttggctgtagttggtgcccccataagaagccttgtatggattgttcctgcaaatgcctgtgctgtaacggaaccgtgtctgtggcaaaatctccgaacatgaatgcgtccatttggcaaatctaagcgtgcaatgggacatcgaagaaaatgtaataattcgtggtactccctccaggccgaatcagttgacgctatggtatttaataacggtcgagctttcttattttaaactggatttgtagaaatattaacaatatttgtattattagaaaagtttattactaaaacagattcagagatttatataacaatactagttatgtgcttt

SEQ ID NO: 40973 - DNA, 3790 bp, Zea Mays
ctcatcgctgggccccgcgatactggaccggccgagccgagcccacgcgcagtggcagcagatcgagccccagttccagcagagtcccactccgccacgggaaaaactcgctttcgaaatctctcctctcctgtccaaacccaacgaaatctgcgcgattcataacgaatcgccatagttaatcgaagcattaaactggggaaaaacagagggagaagagaagataggggagagagggagagggagagggagagggagggaggaggccatcgcatccgccggctggtcctgatcccggtcccgggtcgtatttgggcgccgccgcacgcagcaggaggaagacatcagcgcggggcgaagcgtcgagcccatctccgccgcgggaaccactggcatttaggatggtggacaagaatgatgggtcagagggtattaaattcaacacatcaaacctcattcaaacaaccgaagaggttgcaagagcgtttatcgctgcggcctcggctgccactgcacagtctgcacggacatctgtagtgtattcatccaaagatgagagtggcagcccaatgcagaagcttcagcagcatttttcgaaaatcatgaaagggttttcgtccgcaccagacctgtcaggaacttacaatccggaagtccttacaacgcaaaagcggcagtggtcgagggtgataggtgcatcagagaaccatcacatctgttcgagagcatagtgattgttgggcttccacctcacgcagatatccaggagctggaaaacattgcattagggagaaatgatgaagatggaaaaagatcaaaaaatttatttggcaatagtcaccaccaagttcacgcaataacaaatttggaaccacaggttctttttgcataccctccagagaagcctcttccactcaagtacaaggataccctctctttctgccttcccggaggtgtacaggttcatgctgtcgaacgtactccttcgttcagtgagctgaatgaaattctcctgggacaggaacagcttaaagaaagcaaccaatcatttgtgttccgcctacaggtggctgataactctgcattatatggatgctgtgtgcttgttgaagagatcgtacagagaccatcaaagttggtatcgatgctcatgaatgaaaaacccgtctttccacgccggagtcgatatgtgataactacgccccggtgttattgcatcctatccaggcttccattctttgaactacattttggggtgttgcagagtattcttatggaagaacgtcttgaatggctcacagatggtgttagcatgctaacttccttatcgcttgaggaatcctgtgagaacgatatctgtgaaggaactgcagttacagcacagaaacattatttagatagcaacacaactgatgtggataaatcatctgaatctagcaatggagtttcgtcaacggagctgtctgatactgacagcagttctgggtgtagagaaaaccagcttgactttgtttctaaagaacaacagcaaaatagttcttgtgaagaacagagtaattttaaaagagaaatagtcacttgttctgatgcttccgaagtgtctgatcattttgttccagaagatacatcatctgatcagtctggagttaagcaccatgaacttcattctgcaccaagtatcccggatgaatctggtgcaaggaactgtgatgattccccgaaggaaaatgtggatgatgaggagcttgatctcttcattatagatactattttaccacttatgcgatctcgcctttgtgaagattgtgaatcatctccaagttcacagggttctccttctgaaggcagaaattttgacacccaagaatcggattcagaggagccatcttccattggtgatggagacttagttaaacacaacaacatactgcagtgggctaaggcaaaaaaatatggttctttgcaagttgtctgtcaatactaccagttacagtgtcctgctaggggttcaacacttgcttttcatcccttggagcatttgcattctttgagttttcaccggcctggtgaaacagttcttcacattgctggttctactattgagcttaggtcacgtgatacaagcttagaggttgctgagatgcgcaatgcactctttgctgaggaggaatcgactgctttgtccacatgggcagtggcatccatttgtggatgcctcaggttggaacatgtcagtgggccttttagaagacgaacaaacaaaatttctcgacgggcgttagcgctatcttgtttgtttttgtcaactgaagtcgcgcatatttcccatcaactgattgctggtagagtgcagagccccgagcccaagcaagcagagccatttctttctactgtcgtcaaaagaaaagaaaaaagtattgcaataaaaatatgtagtagtaccttgtacaggatcattttgtcttttttttaatgtgatcagtgatctagaattaacattgttgggcatgtgctttatctgtttcggataaaaaaaacgtagattatataaagctatattacattgttgtacgatttctaaagcaatagttttggcaggtaatgacactttttgctgccgcactcctggagaaacagattgttattgtctgttctaatctgggaatgttatcggcttcagttttgtccatcttacctctaatacgaccgtatcagtggcagagtctcctcatgacggttttgcctaatgacatgatggattttctggatgccccagttccatacatagtgggcgtacaaaacaagacatctgatgtgctcaaccggctaacaaatgccgtagtcattgatgccaacaggaatcagattaagtcctcttcagtcccacaactaccacagcacagagagttgctttctgccttgcgcccgtatcattcaatacttgttggcgaaagttatcttgcaagaaaacgccctgtttatgaatgcacagatgcccaggtggaaggggctaaaggtttcttggcagtgcttagagactaccttgacacactatgctcgaacttgagatctcatacaattaccaatgtgcaatctaacaatgacaaggtttccttacttttaaaagagagctttattggttctttcccaagccgggataggccttttatgaagctttttgtggacacccagttgttctcagtacatacagacctagttctctctttttatcagaaggactaagtgtctggcagacttgaatgtctgcctcgtcttgccaagcctttagatgttgagctaaactgtacatatcggcagctcagtgtttgtgcaaagagctcgaaggagaagccatataccgtcagaaaaaagtggtagattgccaggatccagttatgggtattgaagaagaatgcttgtagctgcttaagttagtctggtgcggtaatccaaggttttgttggctgtagttggtgcccccataagaagccttgtatggattgttcctgcaaatgcctgtgctgtaacggaaccgtgtctgtggcaaaatctccgaacatgaatgcgtccatttggcaaatctaagcgtgcaatgggacatcgaagaaaatgtaataattcgtggtactccctccaggccgaatcagttgacgctatggtatttaataacggtcgagctttcttattttaaactggatttgtagaaatattaacaatatttgtattattagaaaagtttattactaaaacagattcagagatttatataacaatactagttatgtgcttt

SEQ ID NO: 40974 - DNA, 3441 bp, Zea Mays
ctcatcgctgggccccgcgatactggaccggccgagccgagcccacgcgcagtggcagcagatcgagccccagttccagcagagtcccactccgccacgggaaaaactcgctttcgaaatctctcctctcctgtccaaacccaacgaaatctgcgcgattcataacgaatcgccatagttaatcgaagcattaaactggggaaaaacagagggagaagagaagataggggagagagggagagggagagggagagggagggaggaggccatcgcatccgccggctggtcctgatcccggtcccgggtcgtatttgggcgccgccgcacgcagcaggaggaagacatcagcgcggggcgaagcgtcgagcccatctccgccgcgggaaccactggcatttaggatggtggacaagaatgatgggtcagagggtattaaattcaacacatcaaacctcattcaaacaaccgaagaggttgcaagagcgtttatcgctgcggcctcggctgccactgcacagtctgcacggacatctgtagtgtattcatccaaagatgagagtggcagcccaatgcagaagcttcagcagcatttttcgaaaatcatgaaagggttttcgtccgcaccagacctgtcaggaacttacaatccggaagtccttacaacgcaaaagcggcagtggtcgaggtaccagatgaagtcattgggtgataggtgcatcagagaaccatcacatctgttcgagagcatagtgattgttgggcttccacctcacgcagatatccaggagctggaaaacattgcattagggagaaatgatgaagatggaaaaagatcaaaaaatttatttggcaatagtcaccaccaagttcacgcaataacaaatttggaaccacaggttctttttgcataccctccagagaagcctcttccactcaagtacaaggataccctctctttctgccttcccggaggtgtacaggttcatgctgtcgaacgtactccttcgttcagtgagctgaatgaaattctcctgggacaggaacagcttaaagaaagcaaccaatcatttgtgttccgcctacaggtggctgataactctgcattatatggatgctgtgtgcttgttgaagagatcgtacagagaccatcaaagttggtatcgatgctcatgaatgaaaaacccgtctttccacgccggagtcgatatgtgataactacgccccggtgttattgcatcctatccaggcttccattctttgaactacattttggggtgttgcagagtattcttatggaagaacgtcttgaatggctcacagatggtgttagcatgctaacttccttatcgcttgaggaatcctgtgagaacgatatctgtgaaggaactgcagttacagcacagaaacattatttagatagcaacacaactgatgtggataaatcatctgaatctagcaatggagtttcgtcaacggagctgtctgatactgacagcagttctgggtgtagagaaaaccagcttgactttgtttctaaagaacaacagcaaaatagttcttgtgaagaacagagtaattttaaaagagaaatagtcacttgttctgatgcttccgaagtgtctgatcattttgttccagaagatacatcatctgatcagtctggagttaagcaccatgaacttcattctgcaccaagtatcccggatgaatctggtgcaaggaactgtgatgattccccgaaggaaaatgtggatgatgaggagcttgatctcttcattatagatactattttaccacttatgcgatctcgcctttgtgaagattgtgaatcatctccaagttcacagggttctccttctgaaggcagaaattttgacacccaagaatcggattcagaggagccatcttccattggtgatggagacttagttaaacacaacaacatactgcagtgggctaaggcaaaaaaatatggttctttgcaagttgtctgtcaatactaccagttacagtgtcctgctaggggttcaacacttgcttttcatcccttggagcatttgcattctttgagttttcaccggcctggtgaaacagttcttcacattgctggttctactattgagcttaggtcacgtgatacaagcttagaggttgctgagatgcgcaatgcactctttgctgaggaggaatcgactgctttgtccacatgggcagtggcatccatttgtggatgcctcaggttggaacatgtaatgacactttttgctgccgcactcctggagaaacagattgttattgtctgttctaatctgggaatgttatcggcttcagttttgtccatcttacctctaatacgaccgtatcagtggcagagtctcctcatgacggttttgcctaatgacatgatggattttctggatgccccagttccatacatagtgggcgtacaaaacaagacatctgatgtgctcaaccggctaacaaatgccgtagtcattgatgccaacaggaatcagattaagtcctcttcagtcccacaactaccacagcacagagagttgctttctgccttgcgcccgtatcattcaatacttgttggcgaaagttatcttgcaagaaaacgccctgtttatgaatgcacagatgcccaggtggaaggggctaaaggtttcttggcagtgcttagagactaccttgacacactatgctcgaacttgagatctcatacaattaccaatgtgcaatctaacaatgacaaggtttccttacttttaaaagagagctttattggttctttcccaagccgggataggccttttatgaagctttttgtggacacccagttgttctcagtacatacagacctagttctctctttttatcagaaggactaagtgtctggcagacttgaatgtctgcctcgtcttgccaagcctttagatgttgagctaaactgtacatatcggcagctcagtgtttgtgcaaagagctcgaaggagaagccatataccgtcagaaaaaagtggtagattgccaggatccagttatgggtattgaagaagaatgcttgtagctgcttaagttagtctggtgcggtaatccaaggttttgttggctgtagttggtgcccccataagaagccttgtatggattgttcctgcaaatgcctgtgctgtaacggaaccgtgtctgtggcaaaatctccgaacatgaatgcgtccatttggcaaatctaagcgtgcaatgggacatcgaagaaaatgtaataattcgtggtactccctccaggccgaatcagttgacgctatggtatttaataacggtcgagctttcttattttaaactggatttgtagaaatattaacaatatttgtattattagaaaagtttattactaaaacagattcagagatttatataacaatactagttatgtgcttt

SEQ ID NO: 40975 - DNA, 2750 bp, Zea Mays
gcgggaaccactgggtgataggtgcatcagagaaccatcacatctgttcgagagcatagtgattgttgggcttccacctcacgcagatatccaggagctggaaaacattgcattagggagaaatgatgaagatggaaaaagatcaaaaaatttatttggcaatagtcaccaccaagttcacgcaataacaaatttggaaccacaggttctttttgcataccctccagagaagcctcttccactcaagtacaaggataccctctctttctgccttcccggaggtgtacaggttcatgctgtcgaacgtactccttcgttcagtgagctgaatgaaattctcctgggacaggaacagcttaaagaaagcaaccaatcatttgtgttccgcctacaggtggctgataactctgcattatatggatgctgtgtgcttgttgaagagatcgtacagagaccatcaaagttggtatcgatgctcatgaatgaaaaacccgtctttccacgccggagtcgatatgtgataactacgccccggtgttattgcatcctatccaggcttccattctttgaactacattttggggtgttgcagagtattcttatggaagaacgtcttgaatggctcacagatggtgttagcatgctaacttccttatcgcttgaggaatcctgtgagaacgatatctgtgaaggaactgcagttacagcacagaaacattatttagatagcaacacaactgatgtggataaatcatctgaatctagcaatggagtttcgtcaacggagctgtctgatactgacagcagttctgggtgtagagaaaaccagcttgactttgtttctaaagaacaacagcaaaatagttcttgtgaagaacagagtaattttaaaagagaaatagtcacttgttctgatgcttccgaagtgtctgatcattttgttccagaagatacatcatctgatcagtctggagttaagcaccatgaacttcattctgcaccaagtatcccggatgaatctggtgcaaggaactgtgatgattccccgaaggaaaatgtggatgatgaggagcttgatctcttcattatagatactattttaccacttatgcgatctcgcctttgtgaagattgtgaatcatctccaagttcacagggttctccttctgaaggcagaaattttgacacccaagaatcggattcagaggagccatcttccattggtgatggagacttagttaaacacaacaacatactgcagtgggctaaggcaaaaaaatatggttctttgcaagttgtctgtcaatactaccagttacagtgtcctgctaggggttcaacacttgcttttcatcccttggagcatttgcattctttgagttttcaccggcctggtgaaacagttcttcacattgctggttctactattgagcttaggtcacgtgatacaagcttagaggttgctgagatgcgcaatgcactctttgctgaggaggaatcgactgctttgtccacatgggcagtggcatccatttgtggatgcctcaggttggaacatgtaatgacactttttgctgccgcactcctggagaaacagattgttattgtctgttctaatctgggaatgttatcggcttcagttttgtccatcttacctctaatacgaccgtatcagtggcagagtctcctcatgacggttttgcctaatgacatgatggattttctggatgccccagttccatacatagtgggcgtacaaaacaagacatctgatgtgctcaaccggctaacaaatgccgtagtcattgatgccaacaggaatcagattaagtcctcttcagtcccacaactaccacagcacagagagttgctttctgccttgcgcccgtatcattcaatacttgttggcgaaagttatcttgcaagaaaacgccctgtttatgaatgcacagatgcccaggtggaaggggctaaaggtttcttggcagtgcttagagactaccttgacacactatgctcgaacttgagatctcatacaattaccaatgtgcaatctaacaatgacaaggtttccttacttttaaaagagagctttattggttctttcccaagccgggataggccttttatgaagctttttgtggacacccagttgttctcagtacatacagacctagttctctctttttatcagaaggactaagtgtctggcagacttgaatgtctgcctcgtcttgccaagcctttagatgttgagctaaactgtacatatcggcagctcagtgtttgtgcaaagagctcgaaggagaagccatataccgtcagaaaaaagtggtagattgccaggatccagttatgggtattgaagaagaatgcttgtagctgcttaagttagtctggtgcggtaatccaaggttttgttggctgtagttggtgcccccataagaagccttgtatggattgttcctgcaaatgcctgtgctgtaacggaaccgtgtctgtggcaaaatctccgaacatgaatgcgtccatttggcaaatctaagcgtgcaatgggacatcgaagaaaatgtaataattcgtggtactccctccaggccgaatcagttgacgctatggtatttaataacggtcgagctttcttattttaaactggatttgtagaaatattaacaatatttgtattattagaaaagtttattactaaaacagattcagagatttatataacaatactagttatgtgcttt

SEQ ID NO: 40976 - DNA, 1666 bp, Zea Mays
acacacagcttcgcttgattcagtaaatgaatagttcaaaccagcccactaataacttagatagtggcccttccactttattatagttgaccctacctattgacttcaaggtaagaccctttttttctcgaaagttcaggagaactgcgcatcattatattaagaagaaagatatatggtgcccctagagggccattacagcagagcagtcaaggttcataggaaggggaaaccaagacgtagtgggatgtaggcttcagttgtttcggtacttttgcactacctacgtcttattatttattttgtaactggcttttcaccggcaggtcagtgggccttttagaagacgaacaaacaaaatttctcgacgggcgttagcgctatcttgtttgtttttgtcaactgaagtcgcgcatatttcccatcaactgattgctggtagagtgcagagccccgagcccaagcaagcagagccatttctttctactgtcgtcaaaagaaaagaaaaaagtaatgacactttttgctgccgcactcctggagaaacagattgttattgtctgttctaatctgggaatgttatcggcttcagttttgtccatcttacctctaatacgaccgtatcagtggcagagtctcctcatgacggttttgcctaatgacatgatggattttctggatgccccagttccatacatagtgggcgtacaaaacaagacatctgatgtgctcaaccggctaacaaatgccgtagtcattgatgccaacaggaatcagattaagtcctcttcagtcccacaactaccacagcacagagagttgctttctgccttgcgcccgtatcattcaatacttgttggcgaaagttatcttgcaagaaaacgccctgtttatgaatgcacagatgcccaggtggaaggggctaaaggtttcttggcagtgcttagagactaccttgacacactatgctcgaacttgagatctcatacaattaccaatgtgcaatctaacaatgacaaggtttccttacttttaaaagagagctttattggttctttcccaagccgggataggccttttatgaagctttttgtggacacccagttgttctcagtacatacagacctagttctctctttttatcagaaggactaagtgtctggcagacttgaatgtctgcctcgtcttgccaagctcagtgtttgtgcaaagagctcgaaggagaagccatataccgtcagaaaaaagtggtagattgccaggatccagttatgggtattgaagaagaatgcttgtagctgcttaagttagtctggtgcggtaatccaaggttttgttggctgtagttggtgcccccataagaagccttgtatggattgttcctgcaaatgcctgtgctgtaacggaaccgtgtctgtggcaaaatctccgaacatgaatgcgtccatttggcaaatctaagcgtgcaatgggacatcgaagaaaatgtaataattcgtggtactccctccaggccgaatcagttgacgctatggtatttaataacggtcgagctttcttattttaaactggatttgtagaaatattaacaatatttgtattattagaaaagtttattactaaaacagattcagagatttatataacaatactagttatgtgcttt

SEQ ID NO: 40977 - DNA, 2661 bp, Zea Mays
gagatacggccgtgcaaccgtgacgtcagcgcacaatgacagccgttcaatacacttgtacttccgatccgacggctactactatcgaagcatcagccagccatcagtgtgtgacctttttcttcctccggaaggaggcacgacgccatcgaaccgcctctccccgagtcccgtaccgtactcttgcggtcttgccgctccaacatttcagcccccacccctcatcaatttttcctcatccgccttcgtcccgcacgcttgccgtccaaccgctcccacaggtcgaggcggggagggggaggaggaggagttgctggtgggtgtggattcgccgtcgattcgagtctgcgatggcggcggcgaagctgacaggcaacgccgtggcggcggcgatggcgggggacaccaacctcaagccggtggtgcaggtcgtcgacctccggagcatcgcggtcaccggggccccgggctccgggcccaggttccgcgccatcatctccgatggcgtcgccacggggcacgcgctcttcgcctcgcagctctgcgacctcgcgcgctccggcgtcgtccgccgcggctcggtcgtgcagctcctcgactacatcgttaacaacgtcggccccacccggaacagaaaagtgtgagattattggaaatccagcactacctcctgaatctggagattctagttcaaattccctgagagcagaccagtttaatggagcacctccaaatggttcaatggcagggagtactttgaacaaagtgataaagccctctgacaatgctccagtaatccagagatcgatgacaggtaactctttgaacatggttcctaggccaagtgacaatgcacaggtcttccaaccaaccgtacagccatcctatcgtcctgcacccaaatacagaagccatggcacaatcatgaaaaacgatgctcctgctagaataatccccatacctgctctaaatccttatcagggccgctgggctatcaaggctcgagtaactgccaaaggagagatccgccggtaccataatgcaaaaggtgatggcaaagtgttctcttttgacctgcttgatactgatggtggtgagattcgggctacatgtttcaatgctcttgttgatcgcttctatgaagttgtggaagttggtaaggtctatgtggtatctagaggaaacttgaaacccgcaaagaaggactacaaccatctgaataatgagtgggagattttcttggaacctcagtcaactattgaactttgtcttgatgagaacagctctattcctgcccagcggtttagcttctcatcgattgataaaattgaaaattcagagaacaatgcaattgttgatgtcattggtgttgttacatctgtcaaccctagtactacaatacagaggaaaaatggtatggaagctcagaaaaggaccatcaccctgaatgatatgtctggtcgaagtgttgagcttaccatgtggggtgacttctgcaacagagaaggctcgcagctgcaagaaatggttgaatgtggggcgtttcctgtgctcgctgtcaaagctggaaaagtcaatgattacagtgggaagtctgttggcacaatttcttcatctcaactccacataaaccctgatcttgctgaggctcattctctcaggcagtggtttgattgtggaggaagagatgcttctactcagtctatatccagggattttactccttcagcatcatggaatgaggtccgaaagacagtagcacagataaaggatgatggtcttggaatgggggacaaacccgattgggtcacggtgaaggctgctatttcgttcatcaaaaccgattccttctgctacacagcttgccccaatgtgattggagacaggcaatgtggtaaaaaggtgacaaagtctgattcaggcaactggctatgtgacaagtgcaatcaagagtttccagagtgtgattacaggtatctcctacagttgaacattcaagaccacacgggaacaacttctgtgacagcatttcaagatcgtggacaggagatacttggttgctcagctcgagagctcaacatttttaaagagaacaaagatcctcgctacacagatgtcttgatcaattgcttgtatcagaactatttgttcaggctaaaagtgaaagaagaacaatatggcgatgtacgacaagtgaaaaacactgtggccaaggtggagagggtggatcctttggctgagagtaaatttctgcttgattccatttcaaggtttataccatgagagttttgttcttacatctatcagctgctggtaagtgtgctgcccgcttagaagtggtaattaatatgtagctttccctattcacacgcccggaggtttctttgtcggatagaattctatcattcagcagtagagttttctccacttttggtctgccagatacctgcagcttgaagctatgtgttctttcataattaactgaacgcttgtaagtgtgattatgagagttctgtttagctcagctactttgtggttactactattttggtttagtttggtatagtcggacattcctactgctccaatagtgggcatgaatcaaccattaatgcgatggagaaaccattgtcttttgtgccaaagcaatttataaagcac

SEQ ID NO: 40978 - DNA, 802 bp, Zea Mays
ggaagataccctgcgaacgaaacccacaccacttcacccgcttgcgtgtacggccacgacaaaaacaactcgcaacaggctgcaaacccacgagctagaactagaagctacccgggccggccgctctatataaagcaggcgacgactaccgacctctctcccgccatcatctcatcgatcacacacacccatacgccgcgaatccacacgcatctccctctccagtctccagttctccaccttgccagcgtctctccacgtacgccatggacgggtcggcgttcccgtcgctgtcgccggagctccgcgacgcgctcgccaaggtggccgtgttcgtgctcgtccaggggctggtctacctcatcctccgcagctcctccgacgtcttctccaaggacggccggctcaggtccctcagcttccgccccatgcgctccatgagcgtcaggcgcgtgctggcgccgctctccgacgtccccgtcggcaccgacgacgcctctccatcgttgtcgcccgccgcgacgtcgtcgcaccgcaaagctgcccgcgaggattgaaatggccgccacttctgggcagcttgcagttgcagcctcttgctggaaacgagtcagaagagaaattaaattgccagactggatagacttcagcggctatgatatgacagggacgtgaaaagtttagcttattgaccattgcaactttttattgtcacgcatctctacgtatcaattgcacgggtcaggatcaatgtttttcaagttacaaggcattcacggtttcttggaagaaaggaatgaat

SEQ ID NO: 40979 - DNA, 1103 bp, Zea Mays
atggctaacagtggtggtgccagaataggggaagatggggctcttagatggtctgagtggttagcaaaagacgaggagagtagacaaaaattgtctacgcaagaaaattcacaagagactgaaacaggaggctggagtggttggtttgatccttctctgggtaatactgacgcaaatgatttgtcaaagaaatcactggaaccatcattgagcgacggaaaaggtgcggaagaccttgatgctgagaactcacctgcacaagatgatgttgaatccttgctgaaaaagcctggtatcgctgtagatgcagaatcctatagtgaagctaaagatgcagaaacctggaatagatgggccttgatggagttgtcacgggacaatgagccatggatgcctcttcatgaaaaatatagcaattagagtttgtctcaattattactagattctttttttgtttgaggtcaacttaatgctggcactgggtgtgtgtgtgttttttccccgattggatagggttccatttctattattcacataactgacttcctgttttgtttgaggatgtaactgatcagttcctgttttctatatcttcagaggaggcccacttttctccgatatgccaattcattggtttatatcggtggcaaaatctcaagatggtatccttgttttcttgcttataagctatggtcactcccttcacaaaagaagaaattaatcaagacattgtttcactgaagatgtgcttattcaaaaactttccaaggtattctttcaccaagctctgggacgcaggtattctctcatgagccatggaaccacggtgctgcggtgcaaactgttgaggttcaggttggacatcccttatatttacctaaaattcctaggctgcattttttttaaaaaaaaaacttttctgcagcatattatgtacgatgtacgttcaattcaaatgtagtgggagttttagctagttaattactagtagtagagaaggcagaagcctgcactgaaaaccaacccggagggtgtatttacaaccgtagcagccaatgtaccatgattaccctggacaacaggcatggcgacctaaaaacaag

SEQ ID NO: 40980 - DNA, 1327 bp, Zea Mays
gttttttttccacacaggataatgaaaacatggatttgaaatcttcttctttagttcagctagaagtggggttagtggatatatttgttaacctgtggcaatttaagtggcagacaggacatcgggaattagcaactgggctatttcagacaaaaatggagtttatcttatttggtttagctctgtatctgatgacaagcagtaaacaaaggcgctttgaacacttctagaacagtggtggtgccagaataggggaagatggggctcttagatggtctgagtggttagcaaaagacgaggagagtagacaaaaattgtctacgcaagaaaattcacaagagactgaaacaggaggctggagtggttggtttgatccttctctgggtaatactgacgcaaatgatttgtcaaagaaatcactggaaccatcattgagcgacggaaaaggtgcggaagaccttgatgctgagaactcacctgcacaagatgatgttgaatccttgctgaaaaagcctggtatcgctgtagatgcagaatcctatagtgaagctaaagatgcagaaacctggaatagatgggccttgatggagttgtcacgggacaatgagccatggatgcctcttcatgaaaaatatagcaattagagtttgtctcaattattactagattctttttttgtttgaggtcaacttaatgctggcactgggtgtgtgtgtgttttttccccgattggatagggttccatttctattattcacataactgacttcctgttttgtttgaggatgtaactgatcagttcctgttttctatatcttcagaggaggcccacttttctccgatatgccaattcattggtttatatcggtggcaaaatctcaagatggtatccttgttttcttgcttataagctatggtcactcccttcacaaaagaagaaattaatcaagacattgtttcactgaagatgtgcttattcaaaaactttccaaggtattctttcaccaagctctgggacgcaggtattctctcatgagccatggaaccacggtgctgcggtgcaaactgttgaggttcaggttggacatcccttatatttacctaaaattcctaggctgcattttttttaaaaaaaaaacttttctgcagcatattatgtacgatgtacgttcaattcaaatgtagtgggagttttagctagttaattactagtagtagagaaggcagaagcctgcactgaaaaccaacccggagggtgtatttacaaccgtagcagccaatgtaccatgattaccctggacaacaggcatggcgacctaaaaacaag

SEQ ID NO: 40981 - DNA, 829 bp, Zea Mays
cgcatcgccgcgtcggcgtcggcgtcgtccacgttctttcgatctcctagacaatggtcgcgactgccacgtgccggagccggtgacgatccaggccggagagcgtcgtctcagcaacggcgtcggcgcagcagcggtggcgacaacgacgacagcaacagcgggcgcgaaggcgacgaggcagcagcaagaggcaaagcaggataccggcggcggcgcgaggagggccgcgcggggccctgcaggcgcgctgatggaggggtcgcggtgcagccggaagaacgggcgcgggtggcggtgcagccagccgacgctggtgggctacgctctctgccagtaccacctcggcaagggccgtatgcggagcgggagcgccgcgaccggcgggcgcggcccaggccagctcggacgcaccgagcacgcgaagaaaacctccgccgctgcgcccaaggcggacgtgccgctgccgctgccgccgccgagcgtgcagcgctgctagaggcgcgcgcacatggctgtgatccgtcgaccatggggaacgcaagattcttggacatcgtggtggggttgcatatcatcctggcggtgcagtggtggcgactggaattcttttgttgcgtttctaaacattaattaatttaaatgttgtcctgcccacgtaccgtggctgttgttggctcagctttggcttgcggtccttgtggtggcgcatcgaagccccagtgcatttgccgcagctcgtttctttgttttactcggattattctaacccatgaaatttcaaaatgtttttgcatgaacagaacgcagtgcattgagccagggaaca

SEQ ID NO: 40982 - DNA, 1405 bp, Zea Mays
ctcccttccattttccttcccaactcccaattctcaaccctgtatccaaatcccaagctgaagcgcgactgcgtgagtaccaagacgccggtgggagcgacggctacatgggctcctccaaggacaagactgatggaggcggcggcggggacaggggaacaggaggaggtggacgagctgctggccgcgctcgggtacaaggtgcgttcgtcggatatggcggacgtcgctcaaaagctggagcagctcgagatggccatggggagcggcgcacagaggggaagagaaccagcgagagagagagagacggaaagaggaagatgagtcaggagcctgaggatcctggtgaagttcctccgtgagacagcgggtcacgtggtgacggtggagttgaagaccggcgaggtgtaccgacggtccactcaagtgcgaggataactagaattgccagctcaagaacattaccttcaccgctaagatggggacatttcgcacctggagcatgtattcatcagaggaagcagagacaaaggatcaactattggagttggctgtggtcgtgctgttgcaatgcgtgctcagagttcaaaagttgttcaagatggcagtaatccttacaccttggaagggacagatggctagaaattttagcaaaacttcagcgcttttgtatacgaaattaaaaatatagaactttgatatatagaaaaggatctgagtttagcatatgtcttttgtatatgtaagcttttatattaagctctcacattgcaccgaacacatgtagctttgttccatttaagggcttgttcggttagctctcaatccatgtggattgagcgggattggatgagtttaaatcccaaacaagtcaaacttcttcataattttttccaatcccatccaatccatgtgtattgggaataaccgaacaagtcctaattgatttataagatgtatgcattctcttatctgttctttgtaatctctcctaaaagaagcagatgctaacagcaagacatggggagggaaggagaacggatgcagctactgaatgcatagcttgcagtagtagttgctactgcatctgatccagttcctaatgacatttatttggtcccctcatttatgtgtgatgacagttcatatttttttattgtcaagtacctcctccattctattttattttgtcgtgttttagttaaaaaataaactagccggcgacgaatattcgagaacgggggtagtaagatatatgactcgaaagtttctgcctcccaggacacaacctctgtccctcatcctcgatctaaaaatcgggtacagttcatctatttttcatctgcgactaaattgtaacagttcatctgtttttttcccatttatgtgtgatgatagttcatct

SEQ ID NO: 40983 - DNA, 1646 bp, Zea Mays
cccaactcccaattctcaaccctgtatccaaatcccaagctgaagcgcgactgcgtgagtaccaagacgccggtgggagcgacggctacatgggctcctccaaggacaagactgatggaggcggcggcggggacaggggaacaggaggaggtggacgagctgctggccgcgctcgggtacaagaggggaagagaaccagcgagagagagagagacggaaagaggaagatgagtcaggagcctgaggatcctggtgaagttcctccgtgagacagcgggtcacgtggtgacggtggagttgaagaccggcgaggtgtaccgacggtccactcaagtgcgaggataactagaattgccagctcaagaacattaccttcaccgctaaggtatactctctctgcctgcgctaccttcggatccgagatagaaccccacgggttctgttcccctgagtatttttcttcatttttgttgattaatctgcaagatggggacatttcgcacctggagcatgtattcatcagaggaagcagagtgagttaatggaaaaactagatttatttcgtgatgcaatgttgttgagttatggtggcctaattatttttgtgactgatgattcctgtactgcttagtgtcttactgcgagaaaaaacaatggtgatatggtacataatttgcttgttttgtcgaatgtaggacaaaggatcaactattggagttggctgtggtcgtgctgttgcaatgcgtgctcagagttcaaaagttgttcaagatggcagtaatccttacaccttggaagggacagatggctagaaattttagcaaaacttcagcgtacgtataggtaaattatataagctgaactgacttgacaaattataatctctaaattattttgtttgcaggcttttgtatacgaaattaaaaatatagaactttgatatatagaaaaggatctgagtttagcatatgtcttttgtatatgtaagcttttatattaagctctcacattgcaccgaacacatgtagctttgttccatttaagggcttgttcggttagctctcaatccatgtggattgagcgggattggatgagtttaaatcccaaacaagtcaaacttcttcataattttttccaatcccatccaatccatgtgtattgggaataaccgaacaagtcctaattgatttataagatgtatgcattctcttatctgttctttgtaatctctcctaaaagaagcagatgctaacagcaagacatggggagggaaggagaacggatgcagctactgaatgcatagcttgcagtagtagttgctactgcatctgatccagttcctaatgacatttatttggtcccctcatttatgtgtgatgacagttcatatttttttattgtcaagtacctcctccattctattttattttgtcgtgttttagttaaaaaataaactagccggcgacgaatattcgagaacgggggtagtaagatatatgactcgaaagtttctgcctcccaggacacaacctctgtccctcatcctcgatctaaaaatcgggtacagttcatctatttttcatctgcgactaaattgtaacagttcatctgtttttttcccatttatgtgtgatgatagttcatct

SEQ ID NO: 40984 - DNA, 1411 bp, Zea Mays
cccaactcccaattctcaaccctgtatccaaatcccaagctgaagcgcgactgcgtgagtaccaagacgccggtgggagcgacggctacatgggctcctccaaggacaagactgatggaggcggcggcggggacaggggaacaggaggaggtggacgagctgctggccgcgctcgggtacaaggtgcgttcgtcggatatggcggacgtcgctcaaaagctggagcagctcgagatggccatggggagcggcgcacagaggggaagagaaccagcgagagagagagagacggaaagaggaagatgagtcaggagcctgaggatcctggtgaagttcctccgtgagacagcgggtcacgtggtgacggtggagttgaagaccggcgaggtgtaccgacggtccactcaagtgcgaggataactagaattgccagctcaagaacattaccttcaccgctaaggacaaaggatcaactattggagttggctgtggtcgtgctgttgcaatgcgtgctcagagttcaaaagttgttcaagatggcagtaatccttacaccttggaagggacagatggctagaaattttagcaaaacttcagcgtacgtataggtaaattatataagctgaactgacttgacaaattataatctctaaattattttgtttgcaggcttttgtatacgaaattaaaaatatagaactttgatatatagaaaaggatctgagtttagcatatgtcttttgtatatgtaagcttttatattaagctctcacattgcaccgaacacatgtagctttgttccatttaagggcttgttcggttagctctcaatccatgtggattgagcgggattggatgagtttaaatcccaaacaagtcaaacttcttcataattttttccaatcccatccaatccatgtgtattgggaataaccgaacaagtcctaattgatttataagatgtatgcattctcttatctgttctttgtaatctctcctaaaagaagcagatgctaacagcaagacatggggagggaaggagaacggatgcagctactgaatgcatagcttgcagtagtagttgctactgcatctgatccagttcctaatgacatttatttggtcccctcatttatgtgtgatgacagttcatatttttttattgtcaagtacctcctccattctattttattttgtcgtgttttagttaaaaaataaactagccggcgacgaatattcgagaacgggggtagtaagatatatgactcgaaagtttctgcctcccaggacacaacctctgtccctcatcctcgatctaaaaatcgggtacagttcatctatttttcatctgcgactaaattgtaacagttcatctgtttttttcccatttatgtgtgatgatagttcatct

SEQ ID NO: 40985 - DNA, 389 bp, Zea Mays
gctacgcagcaaacagagcagtggtggtggtggtagcgggaggtacgcggcagtaatctcgctggtcctgacggagcagcacgctacagctcaggagctaggaggggagggggggtcgaatggaggcgctctctcgcgccaggaagaaagaagggatgtggtgtcgatcgatcaagtctccgcttgttcctcctgtgctggcgccattaattccgttccacccttaactctcgctcgctctctggtgagagtgagagcgagagtggacactgagacaggcggcagcaggggagtgagtgagtagtatgaccggagacctcgctctcgcctccctgggtttgcgttgctgcgctatgcgcttttgccttggtggcgcgcgtcggaagtgg

SEQ ID NO: 40986 - DNA, 583 bp, Zea Mays
gtgccgcgcgtggctgaactcgtcgcctatcagaggaaagcgagccacggcacatacagattatatatggcatgaagcaagctagcaagcgttacaggttcttctctcgcgcggcgccaccgtccaccgtcacctcgtgcgtgaccagaggcgctctctcactctcttcatgcttggcactgccaattccatctactacacatcatttcacatctccccagacgatcccaagctccccagacctataagtacgtgtcctgcctgccatcaggatcgatcagcaggcagtagtatgacagtgagtaccgatcgagacatcgatgacgcagggcgccgccgacaggaagctgctgagtagcggcacaatcctcctccggtgcacgttcgtcgggggcgacgacgagcgcggcgacttcacgggcgagcagctcagggaagttttcgccttggtggtgctggacatgcgtggagggcagattcattaagtttgggttgatttcttcctttgctgttccatctggaggaggcgttggagaggaggctgtgtaggtgactgaaactttaccaaaaacacgcatatgat

SEQ ID NO: 40987 - DNA, 2634 bp, Zea Mays
acagaacccaattccctcgcgcgctcccccttcggcccttgagcccttccaccctctcccaggcatcacacattccaccaccaccgccgccgccatcaccactgtgaccaccagccccacactcgtatgtgattattggcacccggacgccaccgcctccgcctccaccaccgactgcgccatgggcgactcctcggtggccggcgcgcttgtgccgtccgtgcccaagccggagaccgcgccgtccggtgacaactctacggcggcgctggcgctgccggaagaggcggggacgcgcgcggcgtcggcgtcgccgcagggacctgcggaggaagagggccccgccgatagggacctcctctgcccgatctgcatggccgtcatcaaggatgccttcctcaccgcctgcggccacagcttctgctacatgtgcgtcgtcacgcacctcagcaacaagagcgactgcccctgctgcgggcactaccttaccaaggcccagctctacccaaactttctccttgacaaggttctgaagaaaatatcagcccgacaaatcgcaaaaacagcgtcaccggtcgatcaatttcgatgtgcattgcaacagggaaatgaaatgggagttaaagagttagatagccttatgactttgattgctgagaagaagcggcaaatggaacaacaagaatcggagacaaatatgcaaatattgttagtcttcttgcactgccttagaaagcaaaagctggaagagttgaatgagatccaaagtgatctacagtacatcaaagaggatataagtgctgtggagagacatagggtagaattataccgcacaaaagaaaggtactccatgaagctgcgcatgcttttagatgagcctactgcacaaaaaatgtggccctctcctatggacaaagctagttgtcgctttcctcccaactctcggacaccacttggcggatcatgtccaggaactttacagaataagaagcttgatccgaaagctcaagtaagccatcaaggatttcaaaggagagatgctctaacttcttctgaccctcctaactcctctattcaatcgggtaatgtcattgctaggaagagacgagttcaagcacagttcaatgagcttcaagaatactacctgcaaagacggcgtactggagcacaggcacgcagacaagaagaaagagagaccgttgcaatgaatagagaaggctatcatgcaggtcttcaggatttccagtctgtgctaacaacattcactcgatatagtcgtctacgtgtcattgcggaactaagacatggagacttgtttcactctgccaatattgtgtccagtattgaatttgatcgtgatgatgaactatttgctactgctggagtctcgaaacgtattaaagtcttcgaattttctactgttgttaatgaaccatcagatgtgcattgcccggttgttgaaatggctaccagatctaaacttagctgcctaagctggaacaagtactcaaaaaatattatcgcaagcagtgactatgagggtatagtaactgtgtgggatgtccagacccgccagagtgtgatggaatatgaagagcatgagaaaagagcatggagtgttgatttttctcgaacagagccttcaatgctagtatctgggagtgacgattgcaaggtgaaagtgtggtgcacaaaacaagaagcaagcgtgatcaatattgatatgaaagcaaatatttgttcggttaaatataatcctgggtcaagcttctatgttgcagtcggatctgctgatcaccatattcattacttcgatttacgtaatccaagtgcgcctgtccatgtttttggggggcacaagaaagcagtatcgtatgtcaaattcttatctaacaatgagcttgcatctgcatcaacagatagcacgttacgtttatgggatgtcaaggataatttgccggtacggacattcagagggcacaaaaatgaaaagaacttcgttggattgtctgtgaacaatgagtatattgcttgtggaagtgaaacaaatgaggtttttgtttatcacaagcaagccatagatttgtatcctctaacctggatgatgccgatgatgatcctggttcttatttcattagtgctgtctgctggaagagtgatagccccaccatgttagctgctaacagtcagggaaccataaaagttcatgtacttgctccttgatgtcgtggagggcgttcaagagatttacagccagcgcgtgtatgtcgtactgtccaggtgttccctttcgtgccattatattccccaaaagcgagaatggaggcattattgatctccggttagggcatgaatttttgcagacgatggccagctgacgtagggttttgaggtatcagaatgtgcataatcatgtttatgttgtacaggtgtaaatcagccaagttattgattacaagtgtgacatgagaaatacacattaataaaaactccagctcggttgtacagagattgtgtttgaacccagaaattcatgtggttatgtcgtttgataatatatgtacctggcaggggtgaagctaggcctttttttgtcagctggccttgataattttctggatatctaatgaaaaa

SEQ ID NO: 40988 - DNA, 2496 bp, Zea Mays
tagcgccgtccctctgtttctttctgccgcgagcagctccctggtgctcggacccagctccgcgcgcttcctgctcccatggccagcggtgctctagcccctgtgtcgcgcgtctgagtcgccctccagcgccgcgcccgactccagccagccctgctcctctttctccctgccgtgcgcttgccaactcggattttgccggccgccattctctaacctatgtgtcggtcggtgtcgtggagtttttgtttgatcaactcgtcgtcgcgtcgtttaccgtcgagtcgtcaaacacgtcatcctctgctcaaaccccacctcaccagctcgctcccgacgtcagctgaaagtcgttgtcgttccgcgcgtcagcaagaaatctcaagaatcgggtgaagacggaattaacagcgcgatattcccaagcgctcgacaaattgcctcgatcagaaaatcgctaccgatctcgcggattcgtgtcagctgttgaaacggtaagctgatgaagtgtttagaatagttcgaacattaaataaattaatgtgttagtgcgatgctcattaggtgctcgataaattgcgtgagtcacgaaactctcgtcgacttcgcagttcttgcgattatcgagccaggttcagttatagcgaattatttcgctatttcggtcaattagctggattagtgtaccgagtagaatattaataggcctatgtgatgatgaaatattttaatcacttataaacatgaagtataatttataaagcaagggattagttcagaatttaattaattaactgataagttgtgattaggctaattgtattttatgtgtatagtttgttgttagtgatgtttgcgttcgattcgattaatctagagaagcgcaattattgcgctcagtcgtacgttaataactagtgtttccggataaaatagtgcaacacatcgtcgctaggtgtttaattcgctatcgcgtagcactatttagatttgtgctattcctgcctatatgcattcatgtgcattatgcaaatcatttaggttcgttggttgactgcgtgatgcggaagatgagccaagtcgaccccaagcgcgggctaatccgcaggatgatgctgatggacaaacctgaagatggttaaatcaagcgaatgttcggtcgagggatactcgtcaagcggacgtcatctaacaaacactaacctagtgtttattccaggcaagccccggtgcatgcaaccccttccttgtgtttttaaataatttttgcacactttaagtctagtgaaatgtgcattaggtttataggagttgcttggaaaccctttgatgcattgccttccttgatatccatacctttatagatacttctggtgaagtatcaaaatatgatttacaaaaatgcttagccctgctcagatcttgtggatagaggttgtcttttgcattaaggcctagctcaggggttatcttgaggaaagatggcttctacctgcaagaatatttttcattgggagcgtggtgggatcttactgcaaagttccctataatgctcttttcatcctaaggaatacaaacaatcctaaggatggaagtacttaaatcgggacttgggttaggaacaggtgatgctccacctaggttaattaaggattggatgcgtatgtaggcctgtatgatcaaggactatcttaactggccacatgccctggaaatgggacagggtaagcttgaacccggctattccatacatgaaaagacaatcgcgcactgggagtggagagatggcgagagtgacacgtaccctcctggcaaaggaccgcctaaaaagggtggtgtgctctcgggtggcgcggacctgttcatgcagtggaggatccgtgggaatggttgacatatgcaagggttaagtgctacatatgtcgtgtggttagagatcctcagctgagtaaatcgatttggatcgccgttatatccccggagagtggaacttgatcgctgccctgcaacctaagtcaggatgtaaacattatgaataaaaatgatgttgtattgatgagatggtgaaattagactagatgctaccagagtatattaatatttaatctggcgttaaaatattgaaagtaaggactcactttagtaagctatttctgcaaaagtatctaagttgattcttgctaaagccttttccttgattcctacttaaccagcatatccttgagagttttttctttagtcgggtaagtcttgctgagtaattccatactcagggttttatcccctattgtttttcaggtcatagttttgtgctgctgatgatggtgttacgtgccggtgggctcgaccttcttattagtctaagtagcccttctatacttcttactgaggatggtcacttgagctagcatatatttcaaacttatacttttgtaatcactccgataaaataatgtaaattttttgtaacctgtaaaatttggtaataagatttcc

SEQ ID NO: 40989 - DNA, 7101 bp, Zea Mays
cgatcccattcccagcctcgcagctccgaaatcggtcactttttcccgcccattcccacccccgagatctccaaagcccgaccgcaaaatttccccaaccgggcttcttcggtcatccacctagacggcaatggaggccgccgctgccgacctcatcgccgccctctcgtccccatcctcattcgctggcctctactctcgcttcgccgcctacctacagcccttcaccccctacctgcacagctcaaaccctaacaccaagccaccgcagaagagggcgacgaagcagaacaagcagccgccgcctcccgacgcggccaccctccgcccccttgcgaagcgattcctgccgtttctcggtcgcgcgctccacctcctcccgccgctcgtccgcgcttgtcctgtttcgggcgataagggcggcgaagccgccgacgaactgcttgagatctacggcctcctcttggactgcctagaggccatatcaccctgccttgcggggaaaccctactccgtgttgctccaacgcggccgcttcatctgttgcctcgagtcgcgcggtcacttcgcacgcgccagtgcggaggctgccgctaccctcgacgccctccgctccgcgctctctccacccaccacgagcaccaagtcgcgacgtggtgctgcaggcgttgatcccgtcctccttccggaccccggcagcgctggggaggctggcacggatcctgaagtcaccctccttgcggttgagctcactgtttgccttgctaattgttccagcaagggcaaggtgaaggaacctaccccttatgaacgactcatcagccttttcaaacagctaaaaccatggcttcgtattcttactaatgaagtcagcaggaagtatctcccgttgcttatgaatgccatgagccggtgtaccctttttctggtttctgagtcttcccttttcaatactgatctagtgcatggattctgtcgttacacgatgcaagagtgtgtgggggaggggatgattgagcttttgccagcaattgctcgcaagatttgctcttctgtagatttgacttggggagggagcacacagcttttgctccatgtgctaaaaactgtcactgattctgttgtacgtttaaaggatgatttaccaaaatctgtaaatgagcttctggtatttgtggcgtatttttgccggttcattctttctgccaatagggatttatctgttggcgcttcagaactactttataaacaaggtggttatttctctgaggtttcctctcctactgcctcaatgcttcttctttatgcgactgggttatacttgagtgcccagcaagcagaaagtgaaataccaccctatttatcggtgggtattcccaaggatcaaaagtatctacatgccttagagaagggtcttggcacattagcacgatgcccacatgataatacatctttggtcacatacttggactctttggagtttattagcaagatattatcacagcaagtgaatacactttggaaggacttctctgaaggaaaaccaacccattattctggtaacatggactatgtcttgacagcactgcatcagttcattgattcgagcttcacgtcttttagctgtaggcaaatgtctcaaggggacaacgagagacagcatgaacaacatggaaccttactgacagtccttgtttccgcgatcaagttttcctttcttaccaagaaagatatccagaagagcttgggtttcatcgtctgtgccatttcaagtaaatggtttacacttgaggagctcaaattcttgataccttcacttggcaacatcggagtgacacttcataacactggacatgttaaagaggcaccaaaggctttagaactgtgctgccaaacaatatgggcacacatcagccttttttactatagactatcttcaagaacaaaaggaaacgacattatgacagatctgtcgatggatacactgaaggatatggatatcattttggatgcattttcaagaattgcaaagatggttgatgctctctgtagatgtggcacagagatagaaacaccacttgtgattgttgcgaagagtttgtctataatgttgcctgatggcgacaattctgaatataacaaatgttcttttatactgatcaaggcatgggttaaggcagtacacaaggattttagggatactaaggtggatgatgctccacttctctatccctttcttctgaaatatcggtctccatggccaattaagctgataggcttaatagtagagcaggagttattagcatatggattaactgaagcccgaagcatagaattctgctctaaaatgcagataaggatcatagatgttctgcttcataaaatttactgtacgaaagaacattttttggagagatcaagggttcttattagaaaggcaggtgcacttcgtgcatctggagtggaaaacataaaaaactgccttgagtctctacgtgatgccatatctttactgcaaaagatctcacatgattcaactcgtaccaacactactgcaaacaatcagttggccattgcgtactgtttgtatgcgcagtgtgctcaggaagacaaacttggtggggaggtaatatttgatagcgctgagaaagcacttaacttgtggttggacatggaggcttttgaccattcttcttctgatatggtcttgcaacagccatcaaaaactattgtaccacttatttgtttcctggttgatttgttgtctatgaagggctgttttgagcttcagtttaagttgtgcaaggttatgataatgatatggaagcaagaaaaattacccattgagaagttgttgtccttgctgagaacgctgcctagtgccttatttattcctcaatcatgtaagcatccctttggaaggcagttcagtttcgtcacgagtgttgatgaagtcagcaaagttgcctcatctctggtatctggagatacttcaaatgagcaatctacctttctagctggatgtttatactatgacttgtcagaaaaagttttttcacgcggacaacttttccaggccttttcatatggaaacaaagccctccatttgcgcaaaaagctcctaaaaaagaagttcaaaatcaattcgggcatatctggaaatatggaaagacaacactgtgggcaggacatctctcttgaagtgtgtggccctacaatagttgagatttggccaaattccagcagttcagtcaacactaaagattttttccttaccccatggaatgtccttaggtgctatcttgagagcactttacaggttgctatgatgcacgaattgattggcaatggtgctgaagctgaagttctcttacagacaggaaaagagatatcaaatttccatggtttatcagttttctgtattgtatttacatcatttctaggtcaactatattgtaagcggcagctatgggatgaagcggagagtgagcttaattatgcccgagatcttgtgaaaaatgatgcaacaatttcatgtaagctctgcagtctgactttggggatatctgttgacatgcaagttggtgatctgtcttggagtctgtttgaaaaaaaaattcataaacagattacagctggtttgtctaacactttaggcatgtaccaatctgcaatagacaaattgaatagcactaacttggaatattgtaacgggtcctttgatagacatacaactggttatcttgtgtgcagcaaagactgtataccgagcaagtatgaagcttgtaatttgggggcagaacccctaacttcaaatgatggattgttatctccatgtagtgtttgcatggtaatacaagttcgaaggaaaaactcagggaatgctgaagctggtccacctttagatgcaaaagcaaggaggtcatcaagaaattcatcacgtttagctaagggacagaatgtagagactcttgcaaagactagaactcgctctagtaaacgaaatgcatgtatgaaaagtgagaaggttttaactgagctaaatagtaaaaataacgtaactgggagtaaggaattggctgcagatgcttctgtttgtggtgaagcagagtgttttcctgatggcattgatcacagcaaagacgacctatgcaatatgtttggttgctggagctgccttttcattaaatccctcaattcggggtgcattcagaatattttgcagctgagattggactatgttcaccgacactaccttgtgtcacttcttttaaaaaaagctagagccttgggatctcatagcaatggggactgtgaagttcatagtgtctattggaagtgcatatcactgctgttcttcaggtcccttccacaagattgctgtaggacttatgggccttatttaattggactaatcatggataggagcattggtgattttcttcctttagagtgtgcagaaatactattcaatatgagcttcttcttgctaaaaagccccctttctgaacagtcaagggacatctgctgtatcttctctagtgtaacaatggcagacgttgtcccctggttgctcaaagcttttgttctatccagagagagcccctcacttgttcaggaggtttgcaagttacttgcatgcatattcttgctatcaactacagattcctcaattcaactgcctttgggttctcataaagaatctctttctttgaatcactgggccacatacttccatcaagtttctgtgggaactaatctcaattgtcattactttgctagcttacaagcatcgtccgaggaaaaggttccaaaggacacctataaagatttcagaaatgagacagatgacaatgtctcgaaatttctcaggttgtcatcaagggacatcaaatatattgagaaacatatgacagaattcttccaaaaacttcctgatgtaccagttctgtgcattagtatgcttggaggtgattatgttaatgcccttctgaaattccattgccatcctccgttttttcctgcttggatgttgctttcaaggtttgattcaacaaatgaacccacaacattgcttcttccagtggattctatttcagcagaaatgcaatttgaagattcctgcaccaaagatttgggcaatccaacgagagttttagataagtggcaatgcccttggggctatggaattactgactatgtagccccagtttttagaaatatactcgaggagaattttatgtccctctccagcgcaacccttactattgatgatgtaaatgcagatcgtgtcaggtggtggtcccatagaatgaagctcaacaattaccttgctaacacattgaaagacattgaagattcttggtttggaccctggaaatgccttctgttgggccatcaattatctgatgaacacattgagactgcctcatcaatgattatcactggtctggatacagaattcgaatttgaagtcaatccaatgctcatcaaggctatccttggtggtgctgtgtcagtggatgaagtacaagaatgttttctccaactcattttgtataaaggttactttggaaggggaggatgctgtgggaaagatagacttaaagctttctcttcctgccaaatggatgatggatctatggagacactcaaacgtataataacggatgcatcatatgagttgcctcagccagctgatagagatccagttattttagttcttgatgtcaatgttcagatgcttccttgggagaacctgcctgtactaaggaatcaagaaatttatcgcatgccgtcaatgggtagcatctttttagcattatctcgaaccaataatgattacaaagatcacagttctccttttcctgtcatcgatcctttcaatacatattatctgttgaatcctagcggtgatctgagtagcacacaagaagaatttgttcagttattcagaaactatgagtggaagggagtggctgggaattctccgaaggctgacgagctggttttggccttgacaaatcatgacctattcctgtactttgggcatggaagtggaacccagtatatttctagtaaggaagtcgaaaagatagataactgtgcagctgctcttcttatgggatgtagcagtggaacacttcattgcaaaggaagttatgctcctcgaggggccccattatcatatttatttgctggttcccctgctatcattgcgaatctctgggatgtttcagacaaggacattgacaggtttagtaaggctttgctcaattcatggttgcatgacaaatctctagatggcaacaattgttcaaaatgttgccagctaacaatggagcttgagtccatgagtattgcttccaaggaaaatggtaaagcaagacgacaaggcacacgaggaaagaagcaacaacatataaatgatagtaccaagtgctgcagctgcaagcagaggcgaatagcttcatatataagtgaagctaggagggcttgcaggcttccacttttgataggcgcatctcctgtgtgttacggcgtgcctacaatcattaggaagaaagtaatgacggattctaccacgagagagatgacctaaaagtgtggtagtatcggcatggtattggtgactattgatagtgtgatctatggcgttgatggagttggcacgaaagtgtgccagctcaaatgcactgactaatttatgctttatacccagtgcttggacgcatggtcttgctggacgacctgcagtgggcgtgcacctattggtattccagagctgtaacgagtgtatattgaagtaaatgttctgtacaatggcgctgtacataactgtaatgtcactggagcatcacttagagaaagtatgttgaggctattgatttcaattgtataacgtgtactatagttttgtccaggaacatagagaatgcatgttgaggcagttaatttcaattgtataaaatgtgtactacagttttgacccttgtaagttacttataagaagctgttgtctatactgtactgaattctacatgaagttacgtaggcagtatgacggaagttttgaaagcatgtaggatgtttggtttcaat

SEQ ID NO: 40990 - DNA, 7098 bp, Zea Mays
cgatcccattcccagcctcgcagctccgaaatcggtcactttttcccgcccattcccacccccgagatctccaaagcccgaccgcaaaatttccccaaccgggcttcttcggtcatccacctagacggcaatggaggccgccgctgccgacctcatcgccgccctctcgtccccatcctcattcgctggcctctactctcgcttcgccgcctacctacagcccttcaccccctacctgcacagctcaaaccctaacaccaagccaccgcagaagagggcgacgaagcagaacaagcagccgccgcctcccgacgcggccaccctccgcccccttgcgaagcgattcctgccgtttctcggtcgcgcgctccacctcctcccgccgctcgtccgcgcttgtcctgtttcgggcgataagggcggcgaagccgccgacgaactgcttgagatctacggcctcctcttggactgcctagaggccatatcaccctgccttgcggggaaaccctactccgtgttgctccaacgcggccgcttcatctgttgcctcgagtcgcgcggtcacttcgcacgcgccagtgcggaggctgccgctaccctcgacgccctccgctccgcgctctctccacccaccacgagcaccaagtcgcgacgtggtgctgcaggcgttgatcccgtcctccttccggaccccggcagcgctggggaggctggcacggatcctgaagtcaccctccttgcggttgagctcactgtttgccttgctaattgttccagcaagggcaaggtgaaggaacctaccccttatgaacgactcatcagccttttcaaacagctaaaaccatggcttcgtattcttactaatgaagtcagcaggaagtatctcccgttgcttatgaatgccatgagccggtgtaccctttttctggtttctgagtcttcccttttcaatactgatctagtgcatggattctgtcgttacacgatgcaagagtgtgtgggggaggggatgattgagcttttgccagcaattgctcgcaagatttgctcttctgtagatttgacttggggagggagcacacagcttttgctccatgtgctaaaaactgtcactgattctgttgtacgtttaaaggatgatttaccaaaatctgtaaatgagcttctggtatttgtggcgtatttttgccggttcattctttctgccaatagggatttatctgttggcgcttcagaactactttataaacaaggtggttatttctctgaggtttcctctcctactgcctcaatgcttcttctttatgcgactgggttatacttgagtgcccagcaagcagaaagtgaaataccaccctatttatcggtgggtattcccaaggatcaaaagtatctacatgccttagagaagggtcttggcacattagcacgatgcccacatgataatacatctttggtcacatacttggactctttggagtttattagcaagatattatcacagcaagtgaatacactttggaaggacttctctgaaggaaaaccaacccattattctggtaacatggactatgtcttgacagcactgcatcagttcattgattcgagcttcacgtcttttagctgtaggcaaatgtctcaaggggacaacgagagacagcatgaacaacatggaaccttactgacagtccttgtttccgcgatcaagttttcctttcttaccaagaaagatatccagaagagcttgggtttcatcgtctgtgccatttcaagtaaatggtttacacttgaggagctcaaattcttgataccttcacttggcaacatcggagtgacacttcataacactggacatgttaaagaggcaccaaaggctttagaactgtgctgccaaacaatatgggcacacatcagccttttttactatagactatcttcaagaacaaaaggaaacgacattatgacagatctgtcgatggatacactgaaggatatggatatcattttggatgcattttcaagaattgcaaagatggttgatgctctctgtagatgtggcacagagatagaaacaccacttgtgattgttgcgaagagtttgtctataatgttgcctgatggcgacaattctgaatataacaaatgttcttttatactgatcaaggcatgggttaaggcagtacacaaggattttagggatactaaggtggatgatgctccacttctctatccctttcttctgaaatatcggtctccatggccaattaagctgataggcttaatagtagagcaggagttattagcatatggattaactgaagcccgaagcatagaattctgctctaaaatgcagataaggatcatagatgttctgcttcataaaatttactgtacgaaagaacattttttggagagatcaagggttcttattagaaaggcaggtgcacttcgtgcatctggagtggaaaacataaaaaactgccttgagtctctacgtgatgccatatctttactgcaaaagatctcacatgattcaactcgtaccaacactactgcaaacaatcagttggccattgcgtactgtttgtatgcgcagtgtgctcaggaagacaaacttggtggggaggtaatatttgatagcgctgagaaagcacttaacttgtggttggacatggaggcttttgaccattcttcttctgatatggtcttgcaacagccatcaaaaactattgtaccacttatttgtttcctggttgatttgttgtctatgaagggctgttttgagcttcagtttaagttgtgcaaggttatgataatgatatggaagcaagaaaaattacccattgagaagttgttgtccttgctgagaacgctgcctagtgccttatttattcctcaatcatgtaagcatccctttggaaggcagttcagtttcgtcacgagtgttgatgaagtcagcaaagttgcctcatctctggtatctggagatacttcaaatgagcaatctacctttctagctggatgtttatactatgacttgtcagaaaaagttttttcacgcggacaacttttccaggccttttcatatggaaacaaagccctccatttgcgcaaaaagctcctaaaaaagaagttcaaaatcaattcgggcatatctggaaatatggaaagacaacactgtgggcaggacatctctcttgaagtgtgtggccctacaatagttgagatttggccaaattccagcagttcagtcaacactaaagattttttccttaccccatggaatgtccttaggtgctatcttgagagcactttacaggttgctatgatgcacgaattgattggcaatggtgctgaagctgaagttctcttacagacaggaaaagagatatcaaatttccatggtttatcagttttctgtattgtatttacatcatttctaggtcaactatattgtaagcggcagctatgggatgaagcggagagtgagcttaattatgcccgagatcttgtgaaaaatgatgcaacaatttcatgtaagctctgcagtctgactttggggatatctgttgacatgcaagttggtgatctgtcttggagtctgtttgaaaaaaaaattcataaacagattacagctggtttgtctaacactttaggcatgtaccaatctgcaatagacaaattgaatagcactaacttggaatattgtaacgggtcctttgatagacatacaactggttatcttgtgtgcagcaaagactgtataccgagcaagtatgaagcttgtaatttgggggcagaacccctaacttcaaatgatggattgttatctccatgtagtgtttgcatggtaatacaagttcgaaggaaaaactcagggaatgctgaagctggtccacctttagatgcaaaagcaaggaggtcatcaagaaattcatcacgtttagctaagggacagaatgtagagactcttgcaaagactagaactcgctctagtaaacgaaatgcatgtatgaaaagtgagaaggttttaactgagctaaatagtaaaaataacgtaactgggagtaaggaattggctgcagatgcttctgtttgtggtgaagcagagtgttttcctgatggcattgatcacagcaaagacgacctatgcaatatgtttggttgctggagctgccttttcattaaatccctcaattcggggtgcattcagaatattttgcagctgagattggactatgttcaccgacactaccttgtgtcacttcttttaaaaaaagctagagccttgggatctcatagcaatggggactgtgaagttcatagtgtctattggaagtgcatatcactgctgttcttcaggtcccttccacaagattgctgtaggacttatgggccttatttaattggactaatcatggataggagcattggtgattttcttcctttagagtgtgcagaaatactattcaatatgagcttcttcttgctaaaaagccccctttctgaacagtcaagggacatctgctgtatcttctctagtgtaacaatggcagacgttgtcccctggttgctcaaagcttttgttctatccagagagagcccctcacttgttcaggaggtttgcaagttacttgcatgcatattcttgctatcaactacagattcctcaattcaactgcctttgggttctcataaagaatctctttctttgaatcactgggccacatacttccatcaagtttctgtgggaactaatctcaattgtcattactttgctagcttacaagcatcgtccgaggaaaaggttccaaaggacacctataaagatttcagaaatgagacagatgacaatgtctcgaaatttctcaggttgtcatcaagggacatcaaatatattgagaaacatatgacagaattcttccaaaaacttcctgatgtaccagttctgtgcattagtatgcttggaggtgattatgttaatgcccttctgaaattccattgccatcctccgttttttcctgcttggatgttgctttcaaggtttgattcaacaaatgaacccacaacattgcttcttccagtggattctatttcagaaatgcaatttgaagattcctgcaccaaagatttgggcaatccaacgagagttttagataagtggcaatgcccttggggctatggaattactgactatgtagccccagtttttagaaatatactcgaggagaattttatgtccctctccagcgcaacccttactattgatgatgtaaatgcagatcgtgtcaggtggtggtcccatagaatgaagctcaacaattaccttgctaacacattgaaagacattgaagattcttggtttggaccctggaaatgccttctgttgggccatcaattatctgatgaacacattgagactgcctcatcaatgattatcactggtctggatacagaattcgaatttgaagtcaatccaatgctcatcaaggctatccttggtggtgctgtgtcagtggatgaagtacaagaatgttttctccaactcattttgtataaaggttactttggaaggggaggatgctgtgggaaagatagacttaaagctttctcttcctgccaaatggatgatggatctatggagacactcaaacgtataataacggatgcatcatatgagttgcctcagccagctgatagagatccagttattttagttcttgatgtcaatgttcagatgcttccttgggagaacctgcctgtactaaggaatcaagaaatttatcgcatgccgtcaatgggtagcatctttttagcattatctcgaaccaataatgattacaaagatcacagttctccttttcctgtcatcgatcctttcaatacatattatctgttgaatcctagcggtgatctgagtagcacacaagaagaatttgttcagttattcagaaactatgagtggaagggagtggctgggaattctccgaaggctgacgagctggttttggccttgacaaatcatgacctattcctgtactttgggcatggaagtggaacccagtatatttctagtaaggaagtcgaaaagatagataactgtgcagctgctcttcttatgggatgtagcagtggaacacttcattgcaaaggaagttatgctcctcgaggggccccattatcatatttatttgctggttcccctgctatcattgcgaatctctgggatgtttcagacaaggacattgacaggtttagtaaggctttgctcaattcatggttgcatgacaaatctctagatggcaacaattgttcaaaatgttgccagctaacaatggagcttgagtccatgagtattgcttccaaggaaaatggtaaagcaagacgacaaggcacacgaggaaagaagcaacaacatataaatgatagtaccaagtgctgcagctgcaagcagaggcgaatagcttcatatataagtgaagctaggagggcttgcaggcttccacttttgataggcgcatctcctgtgtgttacggcgtgcctacaatcattaggaagaaagtaatgacggattctaccacgagagagatgacctaaaagtgtggtagtatcggcatggtattggtgactattgatagtgtgatctatggcgttgatggagttggcacgaaagtgtgccagctcaaatgcactgactaatttatgctttatacccagtgcttggacgcatggtcttgctggacgacctgcagtgggcgtgcacctattggtattccagagctgtaacgagtgtatattgaagtaaatgttctgtacaatggcgctgtacataactgtaatgtcactggagcatcacttagagaaagtatgttgaggctattgatttcaattgtataacgtgtactatagttttgtccaggaacatagagaatgcatgttgaggcagttaatttcaattgtataaaatgtgtactacagttttgacccttgtaagttacttataagaagctgttgtctatactgtactgaattctacatgaagttacgtaggcagtatgacggaagttttgaaagcatgtaggatgtttggtttcaat

SEQ ID NO: 40991 - DNA, 7155 bp, Zea Mays
cagcctcgcagctccgaaatcggtcactttttcccgcccattcccacccccgagatctccaaagcccgaccgcaaaatttccccaaccgggcttcttcggtcatccacctagacggcaatggaggccgccgctgccgacctcatcgccgccctctcgtccccatcctcattcgctggcctctactctcgcttcgccgcctacctacagcccttcaccccctacctgcacagctcaaaccctaacaccaagccaccgcagaagagggcgacgaagcagaacaagcagccgccgcctcccgacgcggccaccctccgcccccttgcgaagcgattcctgccgtttctcggtcgcgcgctccacctcctcccgccgctcgtccgcgcttgtcctgtttcgggcgataagggcggcgaagccgccgacgaactgcttgagatctacggcctcctcttggactgcctagaggccatatcaccctgccttgcggggaaaccctactccgtgttgctccaacgcggccgcttcatctgttgcctcgagtcgcgcggtcacttcgcacgcgccagtgcggaggctgccgctaccctcgacgccctccgctccgcgctctctccacccaccacgagcaccaagtcgcgacgtggtgctgcaggcgttgatcccgtcctccttccggaccccggcagcgctggggaggctggcacggatcctgaagtcaccctccttgcggttgagctcactgtttgccttgctaattgttccagcaagggcaaggtgaaggaacctaccccttatgaacgactcatcagccttttcaaacagctaaaaccatggcttcgtattcttactaatgaagtcagcaggaagtatctcccgttgcttatgaatgccatgagccggtgtaccctttttctggtttctgagtcttcccttttcaatactgatctagtgcatggattctgtcgttacacgatgcaagagtgtgtgggggaggggatgattgagcttttgccagcaattgctcgcaagatttgctcttctgtagatttgacttggggagggagcacacagcttttgctccatgtgctaaaaactgtcactgattctgttgtacgtttaaaggatgatttaccaaaatctgtaaatgagcttctggtatttgtggcgtatttttgccggttcattctttctgccaatagggatttatctgttggcgcttcagaactactttataaacaaggtggttatttctctgaggtttcctctcctactgcctcaatgcttcttctttatgcgactgggttatacttgagtgcccagcaagcagaaagtgaaataccaccctatttatcggtgggtattcccaaggatcaaaagtatctacatgccttagagaagggtcttggcacattagcacgatgcccacatgataatacatctttggtcacatacttggactctttggagtttattagcaagatattatcacagcaagtgaatacactttggaaggacttctctgaaggaaaaccaacccattattctggtaacatggactatgtcttgacagcactgcatcagttcattgattcgagcttcacgtcttttagctgtaggcaaatgtctcaaggggacaacgagagacagcatgaacaacatggaaccttactgacagtccttgtttccgcgatcaagttttcctttcttaccaagaaagatatccagaagagcttgggtttcatcgtctgtgccatttcaagtaaatggtttacacttgaggagctcaaattcttgataccttcacttggcaacatcggagtgacacttcataacactggacatgttaaagaggcaccaaaggctttagaactgtgctgccaaacaatatgggcacacatcagccttttttactatagactatcttcaagaacaaaaggaaacgacattatgacagatctgtcgatggatacactgaaggatatggatatcattttggatgcattttcaagaattgcaaagatggttgatgctctctgtagatgtggcacagagatagaaacaccacttgtgattgttgcgaagagtttgtctataatgttgcctgatggcgacaattctgaatataacaaatgttcttttatactgatcaaggcatgggttaaggcagtacacaaggattttagggatactaaggtggatgatgctccacttctctatccctttcttctgaaatatcggtctccatggccaattaagctgataggcttaatagtagagcaggagttattagcatatggattaactgaagcccgaagcatagaattctgctctaaaatgcagataaggatcatagatgttctgcttcataaaatttactgtacgaaagaacattttttggagagatcaagggttcttattagaaaggcaggtgcacttcgtgcatctggagtggaaaacataaaaaactgccttgagtctctacgtgatgccatatctttactggaagacaaacttggtggggaggtaatatttgatagcgctgagaaagcacttaacttgtggttggacatggaggcttttgaccattcttcttctgatatggtcttgcaacagccatcaaaaactattgtaccacttatttgtttcctggttgatttgttgtctatgaagggctgttttgagcttcagtttaagttgtgcaaggttatgataatgatatggaagcaagaaaaattacccattgagaagttgttgtccttgctgttcaccagtgggcgccttagtcatgcatgctgttatctcccactggatgagcgatttctttctattgccaaagagcatcttggtgtatgttgccatgatattgaattttggataaactgtttcaaaggagaccatccttctctctgtatgtttcttcagagaacgctgcctagtgccttatttattcctcaatcatgtaagcatccctttggaaggcagttcagtttcgtcacgagtgttgatgaagtcagcaaagttgcctcatctctggtatctggagatacttcaaatgagcaatctacctttctagctggatgtttatactatgacttgtcagaaaaagttttttcacgcggacaacttttccaggccttttcatatggaaacaaagccctccatttgcgcaaaaagctcctaaaaaagaagttcaaaatcaattcgggcatatctggaaatatggaaagacaacactgtgggcaggacatctctcttgaagtgtgtggccctacaatagttgagatttggccaaattccagcagttcagtcaacactaaagattttttccttaccccatggaatgtccttaggtgctatcttgagagcactttacaggttgctatgatgcacgaattgattggcaatggtgctgaagctgaagttctcttacagacaggaaaagagatatcaaatttccatggtttatcagttttctgtattgtatttacatcatttctaggtcaactatattgtaagcggcagctatgggatgaagcggagagtgagcttaattatgcccgagatcttgtgaaaaatgatgcaacaatttcatgtaagctctgcagtctgactttggggatatctgttgacatgcaagttggtgatctgtcttggagtctgtttgaaaaaaaaattcataaacagattacagctggtttgtctaacactttaggcatgtaccaatctgcaatagacaaattgaatagcactaacttggaatattgtaacgggtcctttgatagacatacaactggttatcttgtgtgcagcaaagactgtataccgagcaagtatgaagcttgtaatttgggggcagaacccctaacttcaaatgatggattgttatctccatgtagtgtttgcatggtaatacaagttcgaaggaaaaactcagggaatgctgaagctggtccacctttagatgcaaaagcaaggaggtcatcaagaaattcatcacgtttagctaagggacagaatgtagagactcttgcaaagactagaactcgctctagtaaacgaaatgcatgtatgaaaagtgagaaggttttaactgagctaaatagtaaaaataacgtaactgggagtaaggaattggctgcagatgcttctgtttgtggtgaagcagagtgttttcctgatggcattgatcacagcaaagacgacctatgcaatatgtttggttgctggagctgccttttcattaaatccctcaattcggggtgcattcagaatattttgcagctgagattggactatgttcaccgacactaccttgtgtcacttcttttaaaaaaagctagagccttgggatctcatagcaatggggactgtgaagttcatagtgtctattggaagtgcatatcactgctgttcttcaggtcccttccacaagattgctgtaggacttatgggccttatttaattggactaatcatggataggagcattggtgattttcttcctttagagtgtgcagaaatactattcaatatgagcttcttcttgctaaaaagccccctttctgaacagtcaagggacatctgctgtatcttctctagtgtaacaatggcagacgttgtcccctggttgctcaaagcttttgttctatccagagagagcccctcacttgttcaggaggtttgcaagttacttgcatgcatattcttgctatcaactacagattcctcaattcaactgcctttgggttctcataaagaatctctttctttgaatcactgggccacatacttccatcaagtttctgtgggaactaatctcaattgtcattactttgctagcttacaagcatcgtccgaggaaaaggttccaaaggacacctataaagatttcagaaatgagacagatgacaatgtctcgaaatttctcaggttgtcatcaagggacatcaaatatattgagaaacatatgacagaattcttccaaaaacttcctgatgtaccagttctgtgcattagtatgcttggaggtgattatgttaatgcccttctgaaattccattgccatcctccgttttttcctgcttggatgttgctttcaaggtttgattcaacaaatgaacccacaacattgcttcttccagtggattctatttcagaaatgcaatttgaagattcctgcaccaaagatttgggcaatccaacgagagttttagataagtggcaatgcccttggggctatggaattactgactatgtagccccagtttttagaaatatactcgaggagaattttatgtccctctccagcgcaacccttactattgatgatgtaaatgcagatcgtgtcaggtggtggtcccatagaatgaagctcaacaattaccttgctaacacattgaaagacattgaagattcttggtttggaccctggaaatgccttctgttgggccatcaattatctgatgaacacattgagactgcctcatcaatgattatcactggtctggatacagaattcgaatttgaagtcaatccaatgctcatcaaggctatccttggtggtgctgtgtcagtggatgaagtacaagaatgttttctccaactcattttgtataaaggttactttggaaggggaggatgctgtgggaaagatagacttaaagctttctcttcctgccaaatggatgatggatctatggagacactcaaacgtataataacggatgcatcatatgagttgcctcagccagctgatagagatccagttattttagttcttgatgtcaatgttcagatgcttccttgggagaacctgcctgtactaaggaatcaagaaatttatcgcatgccgtcaatgggtagcatctttttagcattatctcgaaccaataatgattacaaagatcacagttctccttttcctgtcatcgatcctttcaatacatattatctgttgaatcctagcggtgatctgagtagcacacaagaagaatttgttcagttattcagaaactatgagtggaagggagtggctgggaattctccgaaggctgacgagctggttttggccttgacaaatcatgacctattcctgtactttgggcatggaagtggaacccagtatatttctagtaaggaagtcgaaaagatagataactgtgcagctgctcttcttatgggatgtagcagtggaacacttcattgcaaaggaagttatgctcctcgaggggccccattatcatatttatttgctggttcccctgctatcattgcgaatctctgggatgtttcagacaaggacattgacaggtttagtaaggctttgctcaattcatggttgcatgacaaatctctagatggcaacaattgttcaaaatgttgccagctaacaatggagcttgagtccatgagtattgcttccaaggaaaatggtaaagcaagacgacaaggcacacgaggaaagaagcaacaacatataaatgatagtaccaagtgctgcagctgcaagcagaggcgaatagcttcatatataagtgaagctaggagggcttgcaggcttccacttttgataggcgcatctcctgtgtgttacggcgtgcctacaatcattaggaagaaagtaatgacggattctaccacgagagagatgacctaaaagtgtggtagtatcggcatggtattggtgactattgatagtgtgatctatggcgttgatggagttggcacgaaagtgtgccagctcaaatgcactgactaatttatgctttatacccagtgcttggacgcatggtcttgctggacgacctgcagtgggcgtgcacctattggtattccagagctgtaacgagtgtatattgaagtaaatgttctgtacaatggcgctgtacataactgtaatgtcactggagcatcacttagagaaagtatgttgaggctattgatttcaattgtataacgtgtactatagttttgtccaggaacatagagaatgcatgttgaggcagttaatttcaattgtataaaatgtgtactacagttttgacccttgtaagttacttataagaagctgttgtctatactgtactgaattctacatgaagttacgtaggcagtatgacggaagttttgaaagcatgtaggatgtttggtttcaat

SEQ ID NO: 40992 - DNA, 7205 bp, Zea Mays
ctttttcccgcccattcccacccccgagatctccaaagcccgaccgcaaaatttccccaaccgggcttcttcggtcatccacctagacggcaatggaggccgccgctgccgacctcatcgccgccctctcgtccccatcctcattcgctggcctctactctcgcttcgccgcctacctacagcccttcaccccctacctgcacagctcaaaccctaacaccaagccaccgcagaagagggcgacgaagcagaacaagcagccgccgcctcccgacgcggccaccctccgcccccttgcgaagcgattcctgccgtttctcggtcgcgcgctccacctcctcccgccgctcgtccgcgcttgtcctgtttcgggcgataagggcggcgaagccgccgacgaactgcttgagatctacggcctcctcttggactgcctagaggccatatcaccctgccttgcggggaaaccctactccgtgttgctccaacgcggccgcttcatctgttgcctcgagtcgcgcggtcacttcgcacgcgccagtgcggaggctgccgctaccctcgacgccctccgctccgcgctctctccacccaccacgagcaccaagtcgcgacgtggtgctgcaggcgttgatcccgtcctccttccggaccccggcagcgctggggaggctggcacggatcctgaagtcaccctccttgcggttgagctcactgtttgccttgctaattgttccagcaagggcaaggtgaaggaacctaccccttatgaacgactcatcagccttttcaaacagctaaaaccatggcttcgtattcttactaatgaagtcagcaggaagtatctcccgttgcttatgaatgccatgagccggtgtaccctttttctggtttctgagtcttcccttttcaatactgatctagtgcatggattctgtcgttacacgatgcaagagtgtgtgggggaggggatgattgagcttttgccagcaattgctcgcaagatttgctcttctgtagatttgacttggggagggagcacacagcttttgctccatgtgctaaaaactgtcactgattctgttgtacgtttaaaggatgatttaccaaaatctgtaaatgagcttctggtatttgtggcgtatttttgccggttcattctttctgccaatagggatttatctgttggcgcttcagaactactttataaacaaggtttcctctcctactgcctcaatgcttcttctttatgcgactgggttatacttgagtgcccagcaagcagaaagtgaaataccaccctatttatcggtgggtattcccaaggatcaaaagtatctacatgccttagagaagggtcttggcacattagcacgatgcccacatgataatacatctttggtcacatacttggactctttggagtttattagcaagatattatcacagcaagtgaatacactttggaaggacttctctgaaggaaaaccaacccattattctggtaacatggactatgtcttgacagcactgcatcagttcattgattcgagcttcacgtcttttagctgtaggcaaatgtctcaaggggacaacgagagacagcatgaacaacatggaaccttactgacagtccttgtttccgcgatcaagttttcctttcttaccaagaaagatatccagaagagcttgggtttcatcgtctgtgccatttcaagtaaatggtttacacttgaggagctcaaattcttgataccttcacttggcaacatcggagtgacacttcataacactggacatgttaaagaggcaccaaaggctttagaactgtgctgccaaacaatatgggcacacatcagccttttttactatagactatcttcaagaacaaaaggaaacgacattatgacagatctgtcgatggatacactgaaggatatggatatcattttggatgcattttcaagaattgcaaagatggttgatgctctctgtagatgtggcacagagatagaaacaccacttgtgattgttgcgaagagtttgtctataatgttgcctgatggcgacaattctgaatataacaaatgttcttttatactgatcaaggcatgggttaaggcagtacacaaggattttagggatactaaggtggatgatgctccacttctctatccctttcttctgaaatatcggtctccatggccaattaagctgataggcttaatagtagagcaggagttattagcatatggattaactgaagcccgaagcatagaattctgctctaaaatgcagataaggatcatagatgttctgcttcataaaatttactgtacgaaagaacattttttggagagatcaagggttcttattagaaaggcaggtgcacttcgtgcatctggagtggaaaacataaaaaactgccttgagtctctacgtgatgccatatctttactgcaaaagatctcacatgattcaactcgtaccaacactactgcaaacaatcagttggccattgcgtactgtttgtatgcgcagtgtgctcaggaagacaaacttggtggggaggtaatatttgatagcgctgagaaagcacttaacttgtggttggacatggaggcttttgaccattcttcttctgatatggtcttgcaacagccatcaaaaactattgtaccacttatttgtttcctggttgatttgttgtctatgaagggctgttttgagcttcagtttaagttgtgcaaggttatgataatgatatggaagcaagaaaaattacccattgagaagttgttgtccttgctgttcaccagtgggcgccttagtcatgcatgctgttatctcccactggatgagcgatttctttctattgccaaagagcatcttggtgtatgttgccatgatattgaattttggataaactgtttcaaaggagaccatccttctctctgtatgtttcttcagagaacgctgcctagtgccttatttattcctcaatcatgtaagcatccctttggaaggcagttcagtttcgtcacgagtgttgatgaagtcagcaaagttgcctcatctctggtatctggagatacttcaaatgagcaatctacctttctagctggatgtttatactatgacttgtcagaaaaagttttttcacgcggacaacttttccaggccttttcatatggaaacaaagccctccatttgcgcaaaaagctcctaaaaaagaagttcaaaatcaattcgggcatatctggaaatatggaaagacaacactgtgggcaggacatctctcttgaagtgtgtggccctacaatagttgagatttggccaaattccagcagttcagtcaacactaaagattttttccttaccccatggaatgtccttaggtgctatcttgagagcactttacaggttgctatgatgcacgaattgattggcaatggtgctgaagctgaagttctcttacagacaggaaaagagatatcaaatttccatggtttatcagttttctgtattgtatttacatcatttctaggtcaactatattgtaagcggcagctatgggatgaagcggagagtgagcttaattatgcccgagatcttgtgaaaaatgatgcaacaatttcatgtaagctctgcagtctgactttggggatatctgttgacatgcaagttggtgatctgtcttggagtctgtttgaaaaaaaaattcataaacagattacagctggtttgtctaacactttaggcatgtaccaatctgcaatagacaaattgaatagcactaacttggaatattgtaacgggtcctttgatagacatacaactggttatcttgtgtgcagcaaagactgtataccgagcaagtatgaagcttgtaatttgggggcagaacccctaacttcaaatgatggattgttatctccatgtagtgtttgcatggtaatacaagttcgaaggaaaaactcagggaatgctgaagctggtccacctttagatgcaaaagcaaggaggtcatcaagaaattcatcacgtttagctaagggacagaatgtagagactcttgcaaagactagaactcgctctagtaaacgaaatgcatgtatgaaaagtgagaaggttttaactgagctaaatagtaaaaataacgtaactgggagtaaggaattggctgcagatgcttctgtttgtggtgaagcagagtgttttcctgatggcattgatcacagcaaagacgacctatgcaatatgtttggttgctggagctgccttttcattaaatccctcaattcggggtgcattcagaatattttgcagctgagattggactatgttcaccgacactaccttgtgtcacttcttttaaaaaaagctagagccttgggatctcatagcaatggggactgtgaagttcatagtgtctattggaagtgcatatcactgctgttcttcaggtcccttccacaagattgctgtaggacttatgggccttatttaattggactaatcatggataggagcattggtgattttcttcctttagagtgtgcagaaatactattcaatatgagcttcttcttgctaaaaagccccctttctgaacagtcaagggacatctgctgtatcttctctagtgtaacaatggcagacgttgtcccctggttgctcaaagcttttgttctatccagagagagcccctcacttgttcaggaggtttgcaagttacttgcatgcatattcttgctatcaactacagattcctcaattcaactgcctttgggttctcataaagaatctctttctttgaatcactgggccacatacttccatcaagtttctgtgggaactaatctcaattgtcattactttgctagcttacaagcatcgtccgaggaaaaggttccaaaggacacctataaagatttcagaaatgagacagatgacaatgtctcgaaatttctcaggttgtcatcaagggacatcaaatatattgagaaacatatgacagaattcttccaaaaacttcctgatgtaccagttctgtgcattagtatgcttggaggtgattatgttaatgcccttctgaaattccattgccatcctccgttttttcctgcttggatgttgctttcaaggtttgattcaacaaatgaacccacaacattgcttcttccagtggattctatttcagcagaaatgcaatttgaagattcctgcaccaaagatttgggcaatccaacgagagttttagataagtggcaatgcccttggggctatggaattactgactatgtagccccagtttttagaaatatactcgaggagaattttatgtccctctccagcgcaacccttactattgatgatgtaaatgcagatcgtgtcaggtggtggtcccatagaatgaagctcaacaattaccttgctaacacattgaaagacattgaagattcttggtttggaccctggaaatgccttctgttgggccatcaattatctgatgaacacattgagactgcctcatcaatgattatcactggtctggatacagaattcgaatttgaagtcaatccaatgctcatcaaggctatccttggtggtgctgtgtcagtggatgaagtacaagaatgttttctccaactcattttgtataaaggttactttggaaggggaggatgctgtgggaaagatagacttaaagctttctcttcctgccaaatggatgatggatctatggagacactcaaacgtataataacggatgcatcatatgagttgcctcagccagctgatagagatccagttattttagttcttgatgtcaatgttcagatgcttccttgggagaacctgcctgtactaaggaatcaagaaatttatcgcatgccgtcaatgggtagcatctttttagcattatctcgaaccaataatgattacaaagatcacagttctccttttcctgtcatcgatcctttcaatacatattatctgttgaatcctagcggtgatctgagtagcacacaagaagaatttgttcagttattcagaaactatgagtggaagggagtggctgggaattctccgaaggctgacgagctggttttggccttgacaaatcatgacctattcctgtactttgggcatggaagtggaacccagtatatttctagtaaggaagtcgaaaagatagataactgtgcagctgctcttcttatgggatgtagcagtggaacacttcattgcaaaggaagttatgctcctcgaggggccccattatcatatttatttgctggttcccctgctatcattgcgaatctctgggatgtttcagacaaggacattgacaggtttagtaaggctttgctcaattcatggttgcatgacaaatctctagatggcaacaattgttcaaaatgttgccagctaacaatggagcttgagtccatgagtattgcttccaaggaaaatggtaaagcaagacgacaaggcacacgaggaaagaagcaacaacatataaatgatagtaccaagtgctgcagctgcaagcagaggcgaatagcttcatatataagtgaagctaggagggcttgcaggcttccacttttgataggcgcatctcctgtgtgttacggcgtgcctacaatcattaggaagaaagtaatgacggattctaccacgagagagatgacctaaaagtgtggtagtatcggcatggtattggtgactattgatagtgtgatctatggcgttgatggagttggcacgaaagtgtgccagctcaaatgcactgactaatttatgctttatacccagtgcttggacgcatggtcttgctggacgacctgcagtgggcgtgcacctattggtattccagagctgtaacgagtgtatattgaagtaaatgttctgtacaatggcgctgtacataactgtaatgtcactggagcatcacttagagaaagtatgttgaggctattgatttcaattgtataacgtgtactatagttttgtccaggaacatagagaatgcatgttgaggcagttaatttcaattgtataaaatgtgtactacagttttgacccttgtaagttacttataagaagctgttgtctatactgtactgaattctacatgaagttacgtaggcagtatgacggaagttttgaaagcatgtaggatgtttggtttcaat

SEQ ID NO: 40993 - DNA, 6957 bp, Zea Mays
caaagcccgaccgcaaaatttccccaaccgggcttcttcggtcatccacctagacggcaatggaggccgccgctgccgacctcatcgccgccctctcgtccccatcctcattcgctggcctctactctcgcttcgccgcctacctacagcccttcaccccctacctgcacagctcaaaccctaacaccaagccaccgcagaagagggcgacgaagcagaacaagcagccgccgcctcccgacgcggccaccctccgcccccttgcgaagcgattcctgccgtttctcggtcgcgcgctccacctcctcccgccgctcgtccgcgcttgtcctgtttcgggcgataagggcggcgaagccgccgacgaactgcttgagatctacggcctcctcttggactgcctagaggccatatcaccctgccttgcggggaaaccctactccgtgttgctccaacgcggccgcttcatctgttgcctcgagtcgcgcggtcacttcgcacgcgccagtgcggaggctgccgctaccctcgacgccctccgctccgcgctctctccacccaccacgagcaccaagtcgcgacgtggtgctgcaggcgttgatcccgtcctccttccggaccccggcagcgctggggaggctggcacggatcctgaagtcaccctccttgcggttgagctcactgtttgccttgctaattgttccagcaagggcaaggtgaaggaacctaccccttatgaacgactcatcagccttttcaaacagctaaaaccatggcttcgtattcttactaatgaagtcagcaggaagtatctcccgttgcttatgaatgccatgagccggtgtaccctttttctggtttctgagtcttcccttttcaatactgatctagtgcatggattctgtcgttacacgatgcaagagtgtgtgggggaggggatgattgagcttttgccagcaattgctcgcaagatttgctcttctgtagatttgacttggggagggagcacacagcttttgctccatgtgctaaaaactgtcactgattctgttgtacgtttaaaggatgatttaccaaaatctgtaaatgagcttctggtatttgtggcgtatttttgccggttcattctttctgccaatagggatttatctgttggcgcttcagaactactttataaacaaggtttcctctcctactgcctcaatgcttcttctttatgcgactgggttatacttgagtgcccagcaagcagaaagtgaaataccaccctatttatcggtgggtattcccaaggatcaaaagtatctacatgccttagagaagggtcttggcacattagcacgatgcccacatgataatacatctttggtcacatacttggactctttggagtttattagcaagatattatcacagcaagtgaatacactttggaaggacttctctgaaggaaaaccaacccattattctggtaacatggactatgtcttgacagcactgcatcagttcattgattcgagcttcacgtcttttagctgtaggcaaatgtctcaaggggacaacgagagacagcatgaacaacatggaaccttactgacagtccttgtttccgcgatcaagttttcctttcttaccaagaaagatatccagtccagaagagcttgggtttcatcgtctgtgccatttcaagtaaatggtttacacttgaggagctcaaattcttgataccttcacttggcaacatcggagtgacacttcataacactggacatgttaaagaggcaccaaaggctttagaactgtgctgccaaacaatatgggcacacatcagccttttttactatagactatcttcaagaacaaaaggaaacgacattatgacagatctgtcgatggatacactgaaggatatggatatcattttggatgcattttcaagaattgcaaagatggttgatgctctctgtagatgtggcacagagatagaaacaccacttgtgattgttgcgaagagtttgtctataatgttgcctgatggcgacaattctgaatataacaaatgttcttttatactgatcaaggcatgggttaaggcagtacacaaggattttagggatactaaggtggatgatgctccacttctctatccctttcttctgaaatatcggtctccatggccaattaagctgataggcttaatagtagagcaggagttattagcatatggattaactgaagcccgaagcatagaattctgctctaaaatgcagataaggatcatagatgttctgcttcataaaatttactgtacgaaagaacattttttggagagatcaagggttcttattagaaaggcaggtgcacttcgtgcatctggagtggaaaacataaaaaactgccttgagtctctacgtgatgccatatctttactgcaaaagatctcacatgattcaactcgtaccaacactactgcaaacaatcagttggccattgcgtactgtttgtatgcgcagtgtgctcaggaagacaaacttggtggggaggtaatatttgatagcgctgagaaagcacttaacttgtggttggacatggaggcttttgaccattcttcttctgatatggtcttgcaacagccatcaaaaactattgtaccacttatttgtttcctggttgatttgttgtctatgaagggctgttttgagcttcagtttaagttgtgcaaggttatgataatgatatggaagcaagaaaaattacccattgagaagttgttgtccttgctgttcaccagtgggcgccttagtcatgcatgctgttatctcccactggatgagcgatttctttctattgccaaagagcatcttggtgtatgttgccatgatattgaattttggataaactgtttcaaaggagaccatccttctctctgtatgtttcttcagagaacgctgcctagtgccttatttattcctcaatcatgtaagcatccctttggaaggcagttcagtttcgtcacgagtgttgatgaagtcagcaaagttgcctcatctctggtatctggagatacttcaaatgagcaatctacctttctagctggatgtttatactatgacttgtcagaaaaagttttttcacgcggacaacttttccaggccttttcatatggaaacaaagccctccatttgcgcaaaaagctcctaaaaaagaagttcaaaatcaattcgggcatatctggaaatatggaaagacaacactgtgggcaggacatctctcttgaagtgtgtggccctacaatagttgagatttggccaaattccagcagttcagtcaacactaaagattttttccttaccccatggaatgtccttaggtgctatcttgagagcactttacaggttgctatgatgcacgaattgattggcaatggtgctgaagctgaagttctcttacagacaggaaaagagatatcaaatttccatggtttatcagttttctgtattgtatttacatcatttctaggtcaactatattgtaagcggcagctatgggatgaagcggagagtgagcttaattatgcccgagatcttgtgaaaaatgatgcaacaatttcatcaaagactgtataccgagcaagtatgaagcttgtaatttgggggcagaacccctaacttcaaatgatggattgttatctccatgtagtgtttgcatggtaatacaagttcgaaggaaaaactcagggaatgctgaagctggtccacctttagatgcaaaagcaaggaggtcatcaagaaattcatcacgtttagctaagggacagaatgtagagactcttgcaaagactagaactcgctctagtaaacgaaatgcatgtatgaaaagtgagaaggttttaactgagctaaatagtaaaaataacgtaactgggagtaaggaattggctgcagatgcttctgtttgtggtgaagcagagtgttttcctgatggcattgatcacagcaaagacgacctatgcaatatgtttggttgctggagctgccttttcattaaatccctcaattcggggtgcattcagaatattttgcagctgagattggactatgttcaccgacactaccttgtgtcacttcttttaaaaaaagctagagccttgggatctcatagcaatggggactgtgaagttcatagtgtctattggaagtgcatatcactgctgttcttcaggtcccttccacaagattgctgtaggacttatgggccttatttaattggactaatcatggataggagcattggtgattttcttcctttagagtgtgcagaaatactattcaatatgagcttcttcttgctaaaaagccccctttctgaacagtcaagggacatctgctgtatcttctctagtgtaacaatggcagacgttgtcccctggttgctcaaagcttttgttctatccagagagagcccctcacttgttcaggaggtttgcaagttacttgcatgcatattcttgctatcaactacagattcctcaattcaactgcctttgggttctcataaagaatctctttctttgaatcactgggccacatacttccatcaagtttctgtgggaactaatctcaattgtcattactttgctagcttacaagcatcgtccgaggaaaaggttccaaaggacacctataaagatttcagaaatgagacagatgacaatgtctcgaaatttctcaggttgtcatcaagggacatcaaatatattgagaaacatatgacagaattcttccaaaaacttcctgatgtaccagttctgtgcattagtatgcttggaggtgattatgttaatgcccttctgaaattccattgccatcctccgttttttcctgcttggatgttgctttcaaggtttgattcaacaaatgaacccacaacattgcttcttccagtggattctatttcagaaatgcaatttgaagattcctgcaccaaagatttgggcaatccaacgagagttttagataagtggcaatgcccttggggctatggaattactgactatgtagccccagtttttagaaatatactcgaggagaattttatgtccctctccagcgcaacccttactattgatgatgtaaatgcagatcgtgtcaggtggtggtcccatagaatgaagctcaacaattaccttgctaacacattgaaagacattgaagattcttggtttggaccctggaaatgccttctgttgggccatcaattatctgatgaacacattgagactgcctcatcaatgattatcactggtctggatacagaattcgaatttgaagtcaatccaatgctcatcaaggctatccttggtggtgctgtgtcagtggatgaagtacaagaatgttttctccaactcattttgtataaaggttactttggaaggggaggatgctgtgggaaagatagacttaaagctttctcttcctgccaaatggatgatggatctatggagacactcaaacgtataataacggatgcatcatatgagttgcctcagccagctgatagagatccagttattttagttcttgatgtcaatgttcagatgcttccttgggagaacctgcctgtactaaggaatcaagaaatttatcgcatgccgtcaatgggtagcatctttttagcattatctcgaaccaataatgattacaaagatcacagttctccttttcctgtcatcgatcctttcaatacatattatctgttgaatcctagcggtgatctgagtagcacacaagaagaatttgttcagttattcagaaactatgagtggaagggagtggctgggaattctccgaaggctgacgagctggttttggccttgacaaatcatgacctattcctgtactttgggcatggaagtggaacccagtatatttctagtaaggaagtcgaaaagatagataactgtgcagctgctcttcttatgggatgtagcagtggaacacttcattgcaaaggaagttatgctcctcgaggggccccattatcatatttatttgctggttcccctgctatcattgcgaatctctgggatgtttcagacaaggacattgacaggtttagtaaggctttgctcaattcatggttgcatgacaaatctctagatggcaacaattgttcaaaatgttgccagctaacaatggagcttgagtccatgagtattgcttccaaggaaaatggtaaagcaagacgacaaggcacacgaggaaagaagcaacaacatataaatgatagtaccaagtgctgcagctgcaagcagaggcgaatagcttcatatataagtgaagctaggagggcttgcaggcttccacttttgataggcgcatctcctgtgtgttacggcgtgcctacaatcattaggaagaaagtaatgacggattctaccacgagagagatgacctaaaagtgtggtagtatcggcatggtattggtgactattgatagtgtgatctatggcgttgatggagttggcacgaaagtgtgccagctcaaatgcactgactaatttatgctttatacccagtgcttggacgcatggtcttgctggacgacctgcagtgggcgtgcacctattggtattccagagctgtaacgagtgtatattgaagtaaatgttctgtacaatggcgctgtacataactgtaatgtcactggagcatcacttagagaaagtatgttgaggctattgatttcaattgtataacgtgtactatagttttgtccaggaacatagagaatgcatgttgaggcagttaatttcaattgtataaaatgtgtactacagttttgacccttgtaagttacttataagaagctgttgtctatactgtactgaattctacatgaagttacgtaggcagtatgacggaagttttgaaagcatgtaggatgtttggtttcaat

SEQ ID NO: 40994 - DNA, 1152 bp, Zea Mays
accgattaccaatgacaacataggagtggctgggaattctccgaaggctgacgagctggttttggccttgacaaatcatgacctattcctgtactttgggcatggaagtggaacccagtatatttctagtaaggaagtcgaaaagatagataactgtgcagctgctcttcttatgggatgtagcagtggaacacttcattgcaaaggaagttatgctcctcgaggggccccattatcatatttatttgctggttcccctgctatcattgcgaatctctgggatgtttcagacaaggacattgacaggtttagtaaggctttgctcaattcatggttgcatgacaaatctctagatggcaacaattgttcaaaatgttgccagctaacaatggagcttgagtccatgagtattgcttccaaggaaaatggtaaagcaagacgacaaggcacacgaggaaagaagcaacaacatataaatgatagtaccaagtgctgcagctgcaagcagaggcgaatagcttcatatataagtgaagctaggagggcttgcaggcttccacttttgataggcgcatctcctgtgtgttacggcgtgcctacaatcattaggaagaaagtaatgacggattctaccacgagagagatgacctaaaagtgtggtagtatcggcatggtattggtgactattgatagtgtgatctatggcgttgatggagttggcacgaaagtgtgccagctcaaatgcactgactaatttatgctttatacccagtgcttggacgcatggtcttgctggacgacctgcagtgggcgtgcacctattggtattccagagctgtaacgagtgtatattgaagtaaatgttctgtacaatggcgctgtacataactgtaatgtcactggagcatcacttagagaaagtatgttgaggctattgatttcaattgtataacgtgtactatagttttgtccaggaacatagagaatgcatgttgaggcagttaatttcaattgtataaaatgtgtactacagttttgacccttgtaagttacttataagaagctgttgtctatactgtactgaattctacatgaagttacgtaggcagtatgacggaagttttgaaagcatgtaggatgtttggtttcaat

SEQ ID NO: 40995 - DNA, 2349 bp, Zea Mays
cgaactttgacagaagtgttcaggtttacacgcgcgagttgaccggagcttccttccgcatttgcttcagcggctaactcggcgtcattacgacgccgtttcgctatcgcgttcccatctccagttcgtttcatagccggcgaagaatttcttcgttactttacttccaagcggagtccagggcaaaatttcacagtagtgcgcagcttcagttcaatataccctagcgcctctcttcccccacagggctctttcccgtatgaacggggcccatatcgccgccgcctcgccggaggccggcgggtcgtcctcgtcggcctcgtcttccggcgtctcggcgtccgggcgctcctggctgctcaagggggtgcacctgcggcggcggcgccggtggcggcggcaggtggccgttaggggaggggtgagagccgatggcggcgatgtgcaggatcttgcgctgcctctcgggatgtccttcgcggcggtgcttgcccaggttgtaaatagatgcgctggttctgaagggggattacgacctgatgtcctctcaaagatgtgtacctcggcagtgaaggagtccttaacaaatatttatggtgacagatttcatagcttcatgagtaactttgagaaagcttttggtagtacattgagaaccattcaccttatcaatgaaacgcctgtttttgagcaagatgtggagcaatgttcttacaaagatgatgattctgtacctcaaatcaagttgggtggtgctgattcattacctgaaataaaggtctaatccagaaattggtcagcacatccttagtgtatttgagagatcgctgaatgagcaagctcgttcaaatgagctcaaagagcttgaaataggacttactatgagaaaattgcaattgagtcgatctcagttagctctgagctctgaatcacaaatgttagagaagatcaaagttcatatgggatttcagaaagcctcattcaaagagaagaaattcaagactgaaatggaggatacaaagcatgcagaacttttcaggaaacttatagatatgctccttactgcagtggtactcatgtctgtctgttttggatatggaacatatatttattcgtaccagcggataactgctgctacttcagcttgtgcagcaatttcaagggagtatacatcttggtggatgccaagttcagtgtcagcaatcaactccggtttgctgcttttcaaatgccatgtgatagccgcaacaaggatattctttggaattttgatgctcctactaatcggttggttgatattccagcgttctgcaatgactggaccaaacatgccagtaacattcaatgttatgatattgggagttctttgtggttattttggaagctgctgtgttgacacactgggcggggatggaaatgtatggcttatatactgggaggccctttgctccatccatttacttggaaatatttggccatctcttttacatcacatgctgtatggtcctatttctgtgactcacaggaccaaggctggtcatttgccatattgggcccgccgatacacattttacattttggtgtcacttattctgccatgcttggctggtttgctgccatttgcatctctgtcagactggaaagagcttgctgttcaatatttgaagtccagattcagtggaattaatattgaggattgattattgagagattggttgtggttaccggtgtaatctcaatcccattttgcgaaggtgtaaaggttttttctgtttgtcacatatgaattgtatatcattgtagcgaaggagggaagatttttttgtttggcttcctttcatcctcggactgaagatatgtaaacaaagttgttggaatgacaacaaaatatctcctttccttggtagtggaatatcagatgggctaggttctgatagttgtgctcctatgcgcactgctacagatatcaagagcaaggcacttcatatcgggaagcttagaaatataatacagtgtgcaatttcattgcagattttttgtgaccctttttgtgcaaggacattgtccacagtgattgttatctgatgatttctcttcccctctcttctcaatcatctaggttgcagttcttctcttcagtgggaatccactctacattgaaagttttgcttgcatatagtccttcagatgcatgtatgttgtaaaaggatgctcagaagcgcaatgtatcatttctatttagttgtacacattatttagttcctgcagcatcgattatgtgtatcagttcttcaacagaacttgcttatgtttgtccaatgctttcgttcagaataagtggagttaaaa

SEQ ID NO: 40996 - DNA, 2245 bp, Zea Mays
cgcgttcccatctccagttcgtttcatagccggcgaagaatttcttcgttactttacttccaagcggagtccagggcaaaatttcacagtagtgcgcagcttcagttcaatataccctagcgcctctcttcccccacagggctctttcccgtatgaacggggcccatatcgccgccgcctcgccggaggccggcgggtcgtcctcgtcggcctcgtcttccggcgtctcggcgtccgggcgctcctggctgctcaagggggtgcacctgcggcggcggcgccggtggcggcggcaggtggccgttaggggaggggtgagagccgatggcggcgatgtgcaggatcttgcgctgcctctcgggatgtccttcgcggcggtgcttgcccaggttgtaaatagatgcgctggttctgaagggggattacgacctgatgtcctctcaaagatgtgtacctcggcagtgaaggagtccttaacaaatatttatggtgacagatttcatagcttcatgagtaactttgagaaagcttttggtagtacattgagaaccattcaccttatcaatgaaacgcctgtttttgagcaagatgtggagcaatgttcttacaaagatgatgattctgtacctcaaatcaagttgggtggtgctgattcattacctgaaataaagcaggtctaatccagaaattggtcagcacatccttagtgtatttgagagatcgctgaatgagcaagctcgttcaaatgagctcaaagagcttgaaataggacttactatgagaaaattgcaattgagtcgatctcagttagctctgagctctgaatcacaaatgttagagaagatcaaagttcatatgggatttcagaaagcctcattcaaagagaagaaattcaagactgaaatggaggatacaaagcatgcagaacttttcaggaaacttatagatatgctccttactgcagtggtactcatgtctgtctgttttggatatggaacatatatttattcgtaccagcggataactgctgctacttcagcttgtgcagcaatttcaagggagtatacatcttggtggatgccaagttcagtgtcagcaatcaactccggtttgctgcttttcaaatgccatgtgatagccgcaacaaggatattctttggaattttgatgctcctactaatcggttggttgatattccagcgttctgcaatgactggaccaaacatgccagtaacattcaatgttatgatattgggagttctttgtggttattttggaagctgctgtgttgacacactgggcggggatggaaatgtatggcttatatactgggaggccctttgctccatccatttacttggaaatatttggccatctcttttacatcacatgctgtatggtcctatttctgtgactcacaggaccaaggctggtcatttgccatattgggcccgccgatacacattttacattttggtgtcacttattctgccatgcttggctggtttgctgccatttgcatctctgtcagactggaaagagcttgctgttcaatatttgaagtccagattcagtggaattaatattgaggattgattattgagagattggttgtggttaccggtgtaatctcaatcccattttgcgaaggtgtaaaggttttttctgtttgtcacatatgaattgtatatcattgtagcgaaggagggaagatttttttgtttggcttcctttcatcctcggactgaagatatgtaaacaaagttgttggaatgacaacaaaatatctcctttccttggtagtggaatatcagatgggctaggttctgatagttgtgctcctatgcgcactgctacagatatcaagagcaaggcacttcatatcgggaagcttagaaatataatacagtgtgcaatttcattgcagattttttgtgaccctttttgtgcaaggacattgtccacagtgattgttatctgatgatttctcttcccctctcttctcaatcatctaggttgcagttcttctcttcagtgggaatccactctacattgaaagttttgcttgcatatagtccttcagatgcatgtatgttgtaaaaggatgctcagaagcgcaatgtatcatttctatttagttgtacacattatttagttcctgcagcatcgattatgtgtatcagttcttcaacagaacttgcttatgtttgtccaatgctttcgttcagaataagtggagttaaaa

SEQ ID NO: 40997 - DNA, 2433 bp, Zea Mays
cgcgttcccatctccagttcgtttcatagccggcgaagaatttcttcgttactttacttccaagcggagtccagggcaaaatttcacagtagtgcgcagcttcagttcaatataccctagcgcctctcttcccccacagggctctttcccgtatgaacggggcccatatcgccgccgcctcgccggaggccggcgggtcgtcctcgtcggcctcgtcttccggcgtctcggcgtccgggcgctcctggctgctcaagggggtgcacctgcggcggcggcgccggtggcggcggcaggtggccgttaggggaggggtgagagccgatggcggcgatgtgcaggatcttgcgctgcctctcgggatgtccttcgcggcggtgcttgcccaggttgtaaatagatgcgctggttctgaagggggattacgacctgatgtcctctcaaaggaatgagcagcgaaggttgcgcagcagagggcatctttgtcaacgtcgcctctgcatgcacatatgtgtacctcggcagtgaaggagtccttaacaaatatttatggtgacagatttcatagcttcatgagtaactttgagaaagcttttggtagtacattgagaaccattcaccttatcaatgaaacgcctgtttttgagcaagatgtggagcaatgttcttacaaagatgatgattctgtacctcaaatcaagttgggtggtgctgattcattacctgaaataaaggttggtggtgctgattcacaaagtcagatacatgatgtccagactgacatgccctcgagttcaatgaatagccagattgttcttcatacaggcatcaatgatcagttggttcatcttacttgtagcaggtctaatccagaaattggtcagcacatccttagtgtatttgagagatcgctgaatgagcaagctcgttcaaatgagctcaaagagcttgaaataggacttactatgagaaaattgcaattgagtcgatctcagttagctctgagctctgaatcacaaatgttagagaagatcaaagttcatatgggatttcagaaagcctcattcaaagagaagaaattcaagactgaaatggaggatacaaagcatgcagaacttttcaggaaacttatagatatgctccttactgcagtggtactcatgtctgtctgttttggatatggaacatatatttattcgtaccagcggataactgctgctacttcagcttgtgcagcaatttcaagggagtatacatcttggtggatgccaagttcagtgtcagcaatcaactccggtttgctgcttttcaaatgccatgtgatagccgcaacaaggatattctttggaattttgatgctcctactaatcggttggttgatattccagcgttctgcaatgactggaccaaacatgccagtaacattcaatgttatgatattgggagttctttgtggttattttggaagctgctgtgttgacacactgggcggggatggaaatgtatggcttatatactgggaggccctttgctccatccatttacttggaaatatttggccatctcttttacatcacatgctgtatggtcctatttctgtgactcacaggaccaaggctggtcatttgccatattgggcccgccgatacacattttacattttggtgtcacttattctgccatgcttggctggtttgctgccatttgcatctctgtcagactggaaagagcttgctgttcaatatttgaagtccagattcagtggaattaatattgaggattgattattgagagattggttgtggttaccggtgtaatctcaatcccattttgcgaaggtgtaaaggttttttctgtttgtcacatatgaattgtatatcattgtagcgaaggagggaagatttttttgtttggcttcctttcatcctcggactgaagatatgtaaacaaagttgttggaatgacaacaaaatatctcctttccttggtagtggaatatcagatgggctaggttctgatagttgtgctcctatgcgcactgctacagatatcaagagcaaggcacttcatatcgggaagcttagaaatataatacagtgtgcaatttcattgcagattttttgtgaccctttttgtgcaaggacattgtccacagtgattgttatctgatgatttctcttcccctctcttctcaatcatctaggttgcagttcttctcttcagtgggaatccactctacattgaaagttttgcttgcatatagtccttcagatgcatgtatgttgtaaaaggatgctcagaagcgcaatgtatcatttctatttagttgtacacattatttagttcctgcagcatcgattatgtgtatcagttcttcaacagaacttgcttatgtttgtccaatgctttcgttcagaataagtggagttaaaa

SEQ ID NO: 40998 - DNA, 1890 bp, Zea Mays
agaactgaaggagacaggcggcgaagcgagcgcatcagtaagcactttcgtggagagataaaactaccccggtgttatggctgcggccgctcctccgtctctcgcccaccccgcacctccgcgctccacgaaagaattccaacgcgcaccgcgccatgcgccgcgggacgtcgtctcctggacgtctaccatctcgcgcgcggcgcgacagggtgacctgcatgcggcggcagcatctctctgcgctatggtctcctcccccgccgcgcccgcccccaacgacgtcacgctacttaccgttctctccgcctgcgccgactccccatcctcgccgctagccagccccctcgccctcaccctccacgcccgcgcgctcaagctattcccctcccacctcctcctctccacctgcctcgcgcggttctacctcgcgtcccgcctcccgcatctggcgctccagctgttcgactcaatgccggtccgctccgtcgtcacctacaacaccatgatctccgggcttatgcgcaacggcctcgtcgacgccgcgttcgaggtgttcgacgggatgcccggcccggacaaggtctcatggacggcgctcatcgacgggttcgtcaagaacgggcgccacgacgaggccatcgactgcttccgcgccatgctgctggacggcgtcgagacggactacatcacgttggtcgccgtcgtgtctgcgtgcgcggaggtgaacctcgcggcgcaggtgttccgctccattaggaagcggacggtggtctcttggaactcgatgatcgtcgggttcgcagccaatggccggtgcacagacgcgatcgagctcttcgaggagatgcggaggcaggggttcaagccggacgcggtgacgctcaccggcgtcctcacggcttgcagccacgccggtctcacggagcacggcctgaggtactacgacctcatgacgacagagtacggtgtcgccgcgcggatggagcactacgggtgcgtggtcgacctgctcggccgggccgggcgcctggacgaggcgatgcacgtggtggagacgatgccgatgcggcccaacgaagtggtgctcggggcactcctcgcaggctgccggacgcacgggaacctggacatggccgagcagatgatgcagcacctcttcgagctggatccccagggcgacgccaactacgtgctgctttccaacatctacgcagccgtcgggaagtgggacggcgcggggaaggtccgaagcctgatgaaagcgcgcggggtgaagaaacggccggggcacagcaccgtggagatcgacggcgacgtgcacgagttcgtgtcgggagatcagtcccatccgctggccggggagatcggacagatgcttgggctgctctggcacgagatgacgaggtatggttgtgatgtgcatggaggcagcagctttgatggggattgagttgctgatactgcgttaacgtagaagatgccatgcctgcaggctgcaatctgggttcagcgttttgcctttgcctatggatttaggaatggtgatggaataagtcttgagcatctagatgacagcctgcttttgactgtcctctgtagtcctttagcatttagaggacagcttgactgtcctctgtagtctctttagcatctagaggacatcagtcattttttgactgtcctctgtagtcgctttagcatctagaggacaatcctgttgtgtagtgtgtgtgagaaggtgtggtagtgcagcccctagggctataaatatgtgttcccaacccctctaagggtatgacattgtgtagtgtttgaggaaataaacagaaaattgccccaactcatagtgtcatcctcttgatgagagttagagtccctctacttaca

SEQ ID NO: 40999 - DNA, 2530 bp, Zea Mays
ctcctttcttccaccaccatcctgaagcaagcagtgcagcttgctctcacgaacctagctagtttcttctctgtctatatatatgctcctcagatccacttcgcatcatcacttcagctccttcgtcatgggggtttgtggggaatgttggctggctcgaggcagcatccgcgtcctagcctgctgttgccggtcgttttgcctgctaccggtcggccggacagatcgaggcgtcggaccaggcttcattcctcgcaaaccggtgcatccatggtgtcttacctatctcggctcatggttcttctagagttctagtagctagcaaccagctatagttctcttacaaacatatatcaggtagctagggatagccagccagataatttcatgcatacgtactgcctcatcatgctcggattgggttagggggattgttgtctggctcggtgtctccggtcgagacggccttgccggcgccggagctgtcgtcgaccggagatctcggaccaggcttcaatccctttaaccatgcggcattaggtcatctggatctcggcggtgtccgacaaagtacaccgcatcggccggtaagctaacctatcttgagactcgagcacataaattctcagctagcctcactttctctacatggtcattcatcagcaactcccgcgcgcgagtggctcgttttctttcccagctccagatctgctcccgctttatttgctgtgagtagctagcatgcgacgatgagatgtcgatccagctggacctggagaggtcgttgctgcaacgctgaagtcgttttgctgactactaggctactaatgacgactggttaattagcggcgtttacgtacatgcatgttgctgcatgatcatgcaatcatttgagagctagtagctagctagcggctatagctcggtagggggcgtggtgtgccgggcctgcctgcgggcgcgcataattgagagcgcgcgcggtccggccgtctggcgccccggccggcaacggggcaaaggcaggcatcggccgtggcgccgtgcggttgggcagtgcagactttcttttctcatgtcgtctccaagaacagtgcactacactgatcatccaggaccaggaccaggacgggtccttctagcttgagtgtgacaggagagagaagaggggaggccagagcctgacaagaccccctcctgagtcctgacagtgaggcctctataccttaccttcaaggtttcaacgcctcgccttgtggtagcttgctagcttgctcaggctctgtgctcgctcgcacccggacacgcacccgcacacgtaaaaacatgcatgatgtactagtctcctccattgatcctatgactcattggcttaggttttatagacatttgcagagaacgaagacaaggagataatcaagaagacatatcgacggatgaaagcagtgtctatgcaaattttctctcatttttggttggagttttacgaacattattacgttttgaggtttctagcatttcagttcgatgtcttgtttatgtttgttgtgtaggactgcactatgttaggagtgccattatctaaatagcaaacgtgttctagaaataatgaagcgtatcaacgacgatagattgcatatccatcttgtgtttctgttcttttcttgctgtgtcaaaaaaaaatgccgaacagactagctgtctcgatccaaatgtttagtttgtactatatatatcttctacattgtgaagaaataaaatcatattatggctgctatgctggccggtgctcgtctttattgtattgtacatgcgtttatgtgcgtacgtgctcgtcttgaataagagagctagcagggtctgtagcgtgccattattttttgctgtgtgcttttccctcggaactttgaggccagaaggaaaagggctttcggaagcaaggtatctctcctgcatggcatgcagaaatgggaacggcacacggcacaacgatgtgtacatgtgtgggccaccggtatagcgctgtgacgatgtagcacatcatgggacccccggccttgtgtctggtctggtgtgtatgtatgcatcactgttcacttttgcaccagcagttgatctccggttccgtcttcaccgtgtggtcaaaatgggcagtagggttgtgtgttgtacgtcatcacatgcctccggaagagacaaatcgaggagcgtggaagctgaaagcacacacagtgggagggtgacttttggtgtagaatgtagtcatgtagatatccgagatcctttaatttgaaagtaatagcacggtgaaagaactagcatttgcttaaagataacttttttttgctctcaaaagttatcttctctcctcccaaatatgtagacatgcatgtagtgttgtttcttatagaccaaacttcctttaatttttttcatcatcagtatttccatccttgaacgaattaaatcaaataataagtcggtttttaaacgttctgaccgaattttgccatggccggcgagtatgttg

SEQ ID NO: 41000 - DNA, 4157 bp, Zea Mays
atggaggttgagttgagagcattttgctcaaagcattctgcagttggttacaccagttctgtagagaacagtaaccttgcttccgaactgaatcctagaaaatctggcccagacaataccaccctcaattctggaaaaattccaatactaaggttcacgcgcaaaaacaaggataaattcaccaattgtggaaccagtacctctagttctggtaacctgatcagagtcaagactatagagcaaggtgctttagctaacacagttagaaatgcaaatactcaacctattcaaatctgggaaagaggtactggtcatccctctgttggtggggatcatatgggaagttctggtgatattgctgtagtgcttagaaagctaattgacagcggaaaaattagtgttagtgatatagcatctgaagtcggcatttcttcggaatccttggaagctgctctcgtgggtgaaactaccactttttcccatggtttgacgctgaaaattatgaagtggctccaaaattatgtgcaaatgcatagtgctcaaggagatgtttgtaaagggagctcagaggtggtgcaagagagcaaatcagacagattggtcaccacagatactgtcgatgtgaaaaatccattggtcctagatgatgacaagggtgtaggtgtacttgttgatttgctggattcctctgtaactgaacctgcacaaacaagatctgaaagcaatagtaagattttgaatgaaaatagtgcaacatgtgcaactggtgtgactattttgcaaaatggcaaaaagaacatggttaaagaaggttataatcctgagtgttctgctaaagaatttgcaaacgaatctactcaggacttctccccaatcagcaacaagtatgttttaaaggatgaacatggaatattgatactgaacgccacctctggaaacaaagaatttggtacttccacagagataccaaatgaaaaccaaggtgcattacgtggaagaaaaattaatgacttaactgatgttgaactgggcccatgcttggagaaaggagtatcttcacatgatcattgttttgttcggggtgataatggtagagatagggtagattcagttgaaaatagcttcaatgctcgtgattgtgattcaaattgctctcatggacaaccttttttcaactttgatgattcacattcttatattcatccattcattcagaaaaagatatctcatcattgggacattactttcaatcagaataaggaagctctgaatcactatatacaagagtcatcatatccttcccttgagaaagtaccaactgattcctcggtagaagtagagggtacagccgatacaactgcaacaggtcaagttttgaaagcaaggtctttaaaaattcttgagcattcacctgatgatgaagtagaaggagagatggtatacttacaatctaggctgcttgacaatgctgttgttctgaagcacagatatgaaaaattgatagcaatggttgtccaaaatctctctcgcgagctggatgccctcagtaaaagaaaatgggatcttatttttgtgaatcagttccttcgtgatgtcagagaagctaagaaacgtgggagaaaagaaaagagacataaggaagcccaagctgtactagctgcagctgcagctgctattgcatcctcctcacggaactcaaccgtgagaaaagatgcaaaggaggatgcaccaaagagttctcccaaacttgctgctggatcttcaagggttgggcaacggacttcattgccacaggctaatgattcatcaaagtcatccaacagcaaaatatcatcggataaaaaatctggaagttttcttctgccaatctcctctaaagaaaatgggttatattgtgatgtatgcatgcgaactgaaacattgctgaaccgaatatttgtctgctacagatgcaagaaatttggagaattctattgggccctggaactgtgaactttgtgaagatcaagacatttcatcagaagctgcaaccgttagcgataaatcacattgtaatggcaagaaattaccctttgcacagtgtggcatgtgccatggcacatcaggtgcatttagaaagactgtagatgggaagtgggttcatgctttctgtgctgagtggttgttggacaccaagtatgtaaggggacaagataaacctgtagaaggaacggaaagccttgtagagggaaaggacacttgttgtgtctgcctccacaatgttggcgtgtgcttaaggtgtagcagtggggattgcaacattacatttcatcctacttgcgctagaagttgtggtttttacatgaacacaaaagggtttggtactacaccacagcacaaagcatactgtggcaaacacagcgtacaacagaaagaggctgatgcacagcaatatggacctgaggagctcacgagcatgaaacgaatgagggttgaattggaaaaactacgcctgttgtgtgagaggataattaagagagagaaggtgaagagagagacggttttgtgtgatcatgaaatacttgccaaaactaaggacacagttattttctcctaccttgcatgcggagcaagctcagaatctgcaactacttcagttaataacaggtcgtacagtggagcagcacaaagatctgatgatgtcacagtagatagtactatttctgggaagaaaaccataaggttttctctgaataacagaggtgctgatagaaacacagctgacagctcgaggacattgctatcattcaaacgcaagttgagtgagaggggaccacgagctggtaagcaacttccgcagaggccaactattgctgcagagaaattagaagatgaagacaagaagacaactgataagaagataactatgcaacagagagaaatgtttcaaaaggagctcattatgacatctgatcaagcttctacacagaacctacgccttcctaaaggatatgcttatgttcctcgggactctttatctaaagagaagctatggaaacaaaatacacagccccataatccacaggagcctggtggataggatcagttgaaatcaagccggttcatttctatcgaggaaggccataaaaaacttgtgcaagcttgttctttgcaactgaaaactacaagcggcaagcagggcaggccagcgctattgccacaagggtaacagcgaatccgtgatcttttttggaccgaagttgcataatggtgcagactgtgctatttgtgtgaacgtatggtgtggcaccataacaagaaggctgcctcccacccacccacacaccaggtaccttgaatatgaccagcaatatgggtgaattgacctacctgtgctataccaaagagagcgtgccaactgtatatatgagtttaatttgtgcgcagattttgtaaatttgccctgtacattcttttcctttgcatatgctagtttagttgtgcaggaaaaagggaattatgaatccttttaggttggataagaaaaggaattagcttggttctttatcatggttcagaagaaaatgcggtggtgcttgcggacaacattgggcaggagtgttggtttgatacatgtactctgtagggatggtgaaggtgccaaaaataaggtcatgccactgctttaacgcaactatttgttgttggttactgggaagtggtatcgtacaggctgagaaacaatgttttactgttttagataattgtcgccggtggctttccatgtccccttatgttattgggaaacactagtccctttagggctcgtttgatggacatgaaaatggagatcattgcctcattgggaagggatccccttgctattcaattttgaataacaaggggatctccttcatttcactgtccaccaaactaacccgaactggtttcgagatgtcaagatagcaacaatgttgaaataggcctgtaagttctttggtcgagaaggtatggtagctgacattattttttaatttatacatggggtatattgtatctgggacgggctgttttctgcttgccgtccagattatagccttggttaggcgtatttagtaatttgctcataatttagtggttcatgttttgaattcttttgctcgaaatctggaaaggtc

SEQ ID NO: 41001 - DNA, 4075 bp, Zea Mays
atggaggttgagttgagagcattttgctcaaagcattctgcagttggttacaccagttctgtagagaacagtaaccttgcttccgaactgaatcctagaaaatctggcccagacaataccaccctcaattctggaaaaattccaatactaaggttcacgcgcaaaaacaaggataaattcaccaattgtggaaccagtacctctagttctggtaacctgatcagagtcaagactatagagcaaggtgctttagctaacacagttagaaatgcaaatactcaacctattcaaatctgggaaagaggtactggtcatccctctgttggtggggatcatatgggaagttctggtgatattgctgtagtgcttagaaagctaattgacagcggaaaaattagtgttagtgatatagcatctgaagtcggcatttcttcggaatccttggaagctgctctcgtgggtgaaactaccactttttcccatggtttgacgctgaaaattatgaagtggctccaaaattatgtgcaaatgcatagtgctcaaggagatgtttgtaaagggagctcagaggtggtgcaagagagcaaatcagacagattggtcaccacagatactgtcgatgtgaaaaatccattggtcctagatgatgacaagggtgtaggtgtacttgttgatttgctggattcctctgtaactgaacctgcacaaacaagatctgaaagcaatagtaagattttgaatgaaaatagtgcaacatgtgcaactggtgtgactattttgcaaaatggcaaaaagaacatggttaaagaaggttataatcctgagtgttctgctaaagaatttgcaaacgaatctactcaggacttctccccaatcagcaacaagtatgttttaaaggatgaacatggaatattggtgcattacgtggaagaaaaattaatgacttaactgatgttgaactgggcccatgcttggagaaaggagtatcttcacatgatcattgttttgttcggggtgataatggtagagatagggtagattcagttgaaaatagcttcaatgctcgtgattgtgattcaaattgctctcatggacaaccttttttcaactttgatgattcacattcttatattcatccattcattcagaaaaagatatctcatcattgggacattactttcaatcagaataaggaagctctgaatcactatatacaagagtcatcatatccttcccttgagaaagtaccaactgattcctcggtagaagtagagggtacagccgatacaactgcaacaggtcaagttttgaaagcaaggtctttaaaaattcttgagcattcacctgatgatgaagtagaaggagagatggtatacttacaatctaggctgcttgacaatgctgttgttctgaagcacagatatgaaaaattgatagcaatggttgtccaaaatctctctcgcgagctggatgccctcagtaaaagaaaatgggatcttatttttgtgaatcagttccttcgtgatgtcagagaagctaagaaacgtgggagaaaagaaaagagacataaggaagcccaagctgtactagctgcagctgcagctgctattgcatcctcctcacggaactcaaccgtgagaaaagatgcaaaggaggatgcaccaaagagttctcccaaacttgctgctggatcttcaagggttgggcaacggacttcattgccacaggctaatgattcatcaaagtcatccaacagcaaaatatcatcggataaaaaatctggaagttttcttctgccaatctcctctaaagaaaatgggttatattgtgatgtatgcatgcgaactgaaacattgctgaaccgaatatttgtctgctacagatgcaagaaatttggagaattctattgggccctggaactgtgaactttgtgaagatcaagacatttcatcagaagctgcaaccgttagcgataaatcacattgtaatggcaagaaattaccctttgcacagtgtggcatgtgccatggcacatcaggtgcatttagaaagactgtagatgggaagtgggttcatgctttctgtgctgagtggttgttggacaccaagtatgtaaggggacaagataaacctgtagaaggaacggaaagccttgtagagggaaaggacacttgttgtgtctgcctccacaatgttggcgtgtgcttaaggtgtagcagtggggattgcaacattacatttcatcctacttgcgctagaagttgtggtttttacatgaacacaaaagggtttggtactacaccacagcacaaagcatactgtggcaaacacagcgtacaacagaaagaggctgatgcacagcaatatggacctgaggagctcacgagcatgaaacgaatgagggttgaattggaaaaactacgcctgttgtgtgagaggataattaagagagagaaggtgaagagagagacggttttgtgtgatcatgaaatacttgccaaaactaaggacacagttattttctcctaccttgcatgcggagcaagctcagaatctgcaactacttcagttaataacaggtcgtacagtggagcagcacaaagatctgatgatgtcacagtagatagtactatttctgggaagaaaaccataaggttttctctgaataacagaggtgctgatagaaacacagctgacagctcgaggacattgctatcattcaaacgcaagttgagtgagaggggaccacgagctggtaagcaacttccgcagaggccaactattgctgcagagaaattagaagatgaagacaagaagacaactgataagaagagagaaatgtttcaaaaggagctcattatgacatctgatcaagcttctacacagaacctacgccttcctaaaggatatgcttatgttcctcgggactctttatctaaagagaagctatggaaacaaaatacacagccccataatccacaggagcctggtggataggatcagttgaaatcaagccggttcatttctatcgaggaaggccataaaaaacttgtgcaagcttgttctttgcaactgaaaactacaagcggcaagcagggcaggccagcgctattgccacaagggtaacagcgaatccgtgatcttttttggaccgaagttgcataatggtgcagactgtgctatttgtgtgaacgtatggtgtggcaccataacaagaaggctgcctcccacccacccacacaccaggtaccttgaatatgaccagcaatatgggtgaattgacctacctgtgctataccaaagagagcgtgccaactgtatatatgagtttaatttgtgcgcagattttgtaaatttgccctgtacattcttttcctttgcatatgctagtttagttgtgcaggaaaaagggaattatgaatccttttaggttggataagaaaaggaattagcttggttctttatcatggttcagaagaaaatgcggtggtgcttgcggacaacattgggcaggagtgttggtttgatacatgtactctgtagggatggtgaaggtgccaaaaataaggtcatgccactgctttaacgcaactatttgttgttggttactgggaagtggtatcgtacaggctgagaaacaatgttttactgttttagataattgtcgccggtggctttccatgtccccttatgttattgggaaacactagtccctttagggctcgtttgatggacatgaaaatggagatcattgcctcattgggaagggatccccttgctattcaattttgaataacaaggggatctccttcatttcactgtccaccaaactaacccgaactggtttcgagatgtcaagatagcaacaatgttgaaataggcctgtaagttctttggtcgagaaggtatggtagctgacattattttttaatttatacatggggtatattgtatctgggacgggctgttttctgcttgccgtccagattatagccttggttaggcgtatttagtaatttgctcataatttagtggttcatgttttgaattcttttgctcgaaatctggaaaggtc

SEQ ID NO: 41002 - DNA, 4183 bp, Zea Mays
atggaggttgagttgagagcattttgctcaaagcattctgcagttggttacaccagttctgtagagaacagtaaccttgcttccgaactgaatcctagaaaatctggcccagacaataccaccctcaattctggaaaaattccaatactaaggttcacgcgcaaaaacaaggataaattcaccaattgtggaaccagtacctctagttctggtaacctgatcagagtcaagactatagagcaaggtgctttagctaacacagttagaaatgcaaatactcaacctattcaaatctgggaaagaggtactggtcatccctctgttggtggggatcatatgggaagttctggtgatattgctgtagtgcttagaaagctaattgacagcggaaaaattagtgttagtgatatagcatctgaagtcggcatttcttcggaatccttggaagctgctctcgtgggtgaaactaccactttttcccatggtttgacgctgaaaattatgaagtggctccaaaattatgtgcaaatgcatagtgctcaaggagatgtttgtaaagggagctcagaggtggtgcaagagagcaaatcagacagattggtcaccacagatactgtcgatgtgaaaaatccattggtcctagatgatgacaagggtgtaggtgtacttgttgatttgctggattcctctgtaactgaacctgcacaaacaagatctgaaagcaatagtaagattttgaatgaaaatagtgcaacatgtgcaactggtgtgactattttgcaaaatggcaaaaagaacatggttaaagaaggttataatcctgagtgttctgctaaagaatttgcaaacgaatctactcaggacttctccccaatcagcaacaagtatgttttaaaggatgaacatggaatattgatactgaacgccacctctggaaacaaagaatttggtacttccacagagataccaaatgaaaaccaaggtgcattacgtggaagaaaaattaatgacttaactgatgttgaactgggcccatgcttggagaaaggagtatcttcacatgatcattgttttgttcggggtgataatggtagagatagggtagattcagttgaaaatagcttcaatgctcgtgattgtgattcaaattgctctcatggacaaccttttttcaactttgatgattcacattcttatattcatccattcattcagaaaaagatatctcatcattgggacattactttcaatcagaataaggaagctctgaatcactatatacaagagtcatcatatccttcccttgagaaagtaccaactgattcctcggtagaagtagagggtacagccgatacaactgcaacaggtcaagttttgaaagcaaggtctttaaaaattcttgagcattcacctgatgatgaagtagaaggagagatggtatacttacaatctaggctgcttgacaatgctgttgttctgaagcacagatatgaaaaattgatagcaatggttgtccaaaatctctctcgcgagctggatgccctcagtaaaagaaaatgggatcttatttttgtgaatcagttccttcgtgatgtcagagaagctaagaaacgtgggagaaaagaaaagagacataaggaagcccaagctgtactagctgcagctgcagctgctattgcatcctcctcacggaactcaaccgtgagaaaagatgcaaaggaggatgcaccaaagagttctcccaaacttgctgctggatcttcaagggttgggcaacggacttcattgccacaggctaatgattcatcaaagtcatccaacagcaaaatatcatcggataaaaaatctggaagttttcttctgccaatctcctctaaagaaaatgggttatattgtgatgtatgcatgcgaactgaaacattgctgaaccgaatatttgtctgctacagatgcaaggctgctgtgcacataaattgctacagaaatttggagaattctattgggccctggaactgtgaactttgtgaagatcaagacatttcatcagaagctgcaaccgttagcgataaatcacattgtaatggcaagaaattaccctttgcacagtgtggcatgtgccatggcacatcaggtgcatttagaaagactgtagatgggaagtgggttcatgctttctgtgctgagtggttgttggacaccaagtatgtaaggggacaagataaacctgtagaaggaacggaaagccttgtagagggaaaggacacttgttgtgtctgcctccacaatgttggcgtgtgcttaaggtgtagcagtggggattgcaacattacatttcatcctacttgcgctagaagttgtggtttttacatgaacacaaaagggtttggtactacaccacagcacaaagcatactgtggcaaacacagcgtacaacagaaagaggctgatgcacagcaatatggacctgaggagctcacgagcatgaaacgaatgagggttgaattggaaaaactacgcctgttgtgtgagaggataattaagagagagaaggtgaagagagagacggttttgtgtgatcatgaaatacttgccaaaactaaggacacagttattttctcctaccttgcatgcggagcaagctcagaatctgcaactacttcagttaataacaggtcgtacagtggagcagcacaaagatctgatgatgtcacagtagatagtactatttctgggaagaaaaccataaggttttctctgaataacagaggtgctgatagaaacacagctgacagctcgaggacattgctatcattcaaacgcaagttgagtgagaggggaccacgagctggtaagcaacttccgcagaggccaactattgctgcagagaaattagaagatgaagacaagaagacaactgataagaagataactatgcaacagagagaaatgtttcaaaaggagctcattatgacatctgatcaagcttctacacagaacctacgccttcctaaaggatatgcttatgttcctcgggactctttatctaaagagaagctatggaaacaaaatacacagccccataatccacaggagcctggtggataggatcagttgaaatcaagccggttcatttctatcgaggaaggccataaaaaacttgtgcaagcttgttctttgcaactgaaaactacaagcggcaagcagggcaggccagcgctattgccacaagggtaacagcgaatccgtgatcttttttggaccgaagttgcataatggtgcagactgtgctatttgtgtgaacgtatggtgtggcaccataacaagaaggctgcctcccacccacccacacaccaggtaccttgaatatgaccagcaatatgggtgaattgacctacctgtgctataccaaagagagcgtgccaactgtatatatgagtttaatttgtgcgcagattttgtaaatttgccctgtacattcttttcctttgcatatgctagtttagttgtgcaggaaaaagggaattatgaatccttttaggttggataagaaaaggaattagcttggttctttatcatggttcagaagaaaatgcggtggtgcttgcggacaacattgggcaggagtgttggtttgatacatgtactctgtagggatggtgaaggtgccaaaaataaggtcatgccactgctttaacgcaactatttgttgttggttactgggaagtggtatcgtacaggctgagaaacaatgttttactgttttagataattgtcgccggtggctttccatgtccccttatgttattgggaaacactagtccctttagggctcgtttgatggacatgaaaatggagatcattgcctcattgggaagggatccccttgctattcaattttgaataacaaggggatctccttcatttcactgtccaccaaactaacccgaactggtttcgagatgtcaagatagcaacaatgttgaaataggcctgtaagttctttggtcgagaaggtatggtagctgacattattttttaatttatacatggggtatattgtatctgggacgggctgttttctgcttgccgtccagattatagccttggttaggcgtatttagtaatttgctcataatttagtggttcatgttttgaattcttttgctcgaaatctggaaaggtc

SEQ ID NO: 41003 - DNA, 4413 bp, Zea Mays
gttaatcatttttttaaggctggaagcatgttcagtttcaaactcatatggtttccctcagcttgtgttcttctaaaaattactgtgaccttagttttaactaatttctaacccaaaggaatactgtcttccaatacttcttaccaagttttgtttggttttcagggacgtgtcggacgccctttcaccctgtatgtgcaagagagtcaaagcatcaaatggagatatgggggaaatccagacaccctaatgttgagttgagagcattttgctcaaagcattctgcagttggttacaccagttctgtagagaacagtaaccttgcttccgaactgaatcctagaaaatctggcccagacaataccaccctcaattctggaaaaattccaatactaaggttcacgcgcaaaaacaaggataaattcaccaattgtggaaccagtacctctagttctggtaacctgatcagagtcaagactatagagcaaggtgctttagctaacacagttagaaatgcaaatactcaacctattcaaatctgggaaagaggtactggtcatccctctgttggtggggatcatatgggaagttctggtgatattgctgtagtgcttagaaagctaattgacagcggaaaaattagtgttagtgatatagcatctgaagtcggcatttcttcggaatccttggaagctgctctcgtgggtgaaactaccactttttcccatggtttgacgctgaaaattatgaagtggctccaaaattatgtgcaaatgcatagtgctcaaggagatgtttgtaaagggagctcagaggtggtgcaagagagcaaatcagacagattggtcaccacagatactgtcgatgtgaaaaatccattggtcctagatgatgacaagggtgtaggtgtacttgttgatttgctggattcctctgtaactgaacctgcacaaacaagatctgaaagcaatagtaagattttgaatgaaaatagtgcaacatgtgcaactggtgtgactattttgcaaaatggcaaaaagaacatggttaaagaaggttataatcctgagtgttctgctaaagaatttgcaaacgaatctactcaggacttctccccaatcagcaacaagtatgttttaaaggatgaacatggaatattgatactgaacgccacctctggaaacaaagaatttggtacttccacagagataccaaatgaaaaccaaggtgcattacgtggaagaaaaattaatgacttaactgatgttgaactgggcccatgcttggagaaaggagtatcttcacatgatcattgttttgttcggggtgataatggtagagatagggtagattcagttgaaaatagcttcaatgctcgtgattgtgattcaaattgctctcatggacaaccttttttcaactttgatgattcacattcttatattcatccattcattcagaaaaagatatctcatcattgggacattactttcaatcagaataaggaagctctgaatcactatatacaagagtcatcatatccttcccttgagaaagtaccaactgattcctcggtagaagtagagggtacagccgatacaactgcaacaggtcaagttttgaaagcaaggtctttaaaaattcttgagcattcacctgatgatgaagtagaaggagagatggtatacttacaatctaggctgcttgacaatgctgttgttctgaagcacagatatgaaaaattgatagcaatggttgtccaaaatctctctcgcgagctggatgccctcagtaaaagaaaatgggatcttatttttgtgaatcagttccttcgtgatgtcagagaagctaagaaacgtgggagaaaagaaaagagacataaggaagcccaagctgtactagctgcagctgcagctgctattgcatcctcctcacggaactcaaccgtgagaaaagatgcaaaggaggatgcaccaaagagttctcccaaacttgctgctggatcttcaagggttgggcaacggacttcattgccacaggctaatgattcatcaaagtcatccaacagcaaaatatcatcggataaaaaatctggaagttttcttctgccaatctcctctaaagaaaatgggttatattgtgatgtatgcatgcgaactgaaacattgctgaaccgaatatttgtctgctacagatgcaaggctgctgtgcacataaattgctacagaaatttggagaattctattgggccctggaactgtgaactttgtgaagatcaagacatttcatcagaagctgcaaccgttagcgataaatcacattgtaatggcaagaaattaccctttgcacagtgtggcatgtgccatggcacatcaggtgcatttagaaagactgtagatgggaagtgggttcatgctttctgtgctgagtggttgttggacaccaagtatgtaaggggacaagataaacctgtagaaggaacggaaagccttgtagagggaaaggacacttgttgtgtctgcctccacaatgttggcgtgtgcttaaggtgtagcagtggggattgcaacattacatttcatcctacttgcgctagaagttgtggtttttacatgaacacaaaagggtttggtactacaccacagcacaaagcatactgtggcaaacacagcgtacaacagaaagaggctgatgcacagcaatatggacctgaggagctcacgagcatgaaacgaatgagggttgaattggaaaaactacgcctgttgtgtgagaggataattaagagagagaaggtgaagagagagacggttttgtgtgatcatgaaatacttgccaaaactaaggacacagttattttctcctaccttgcatgcggagcaagctcagaatctgcaactacttcagttaataacaggtcgtacagtggagcagcacaaagatctgatgatgtcacagtagatagtactatttctgggaagaaaaccataaggttttctctgaataacagaggtgctgatagaaacacagctgacagctcgaggacattgctatcattcaaacgcaagttgagtgagaggggaccacgagctggtaagcaacttccgcagaggccaactattgctgcagagaaattagaagatgaagacaagaagacaactgataagaagagagaaatgtttcaaaaggagctcattatgacatctgatcaagcttctacacagaacctacgccttcctaaaggatatgcttatgttcctcgggactctttatctaaagagaagctatggaaacaaaatacacagccccataatccacaggagcctggtggataggatcagttgaaatcaagccggttcatttctatcgaggaaggccataaaaaacttgtgcaagcttgttctttgcaactgaaaactacaagcggcaagcagggcaggccagcgctattgccacaagggtaacagcgaatccgtgatcttttttggaccgaagttgcataatggtgcagactgtgctatttgtgtgaacgtatggtgtggcaccataacaagaaggctgcctcccacccacccacacaccaggtaccttgaatatgaccagcaatatgggtgaattgacctacctgtgctataccaaagagagcgtgccaactgtatatatgagtttaatttgtgcgcagattttgtaaatttgccctgtacattcttttcctttgcatatgctagtttagttgtgcaggaaaaagggaattatgaatccttttaggttggataagaaaaggaattagcttggttctttatcatggttcagaagaaaatgcggtggtgcttgcggacaacattgggcaggagtgttggtttgatacatgtactctgtagggatggtgaaggtgccaaaaataaggtcatgccactgctttaacgcaactatttgttgttggttactgggaagtggtatcgtacaggctgagaaacaatgttttactgttttagataattgtcgccggtggctttccatgtccccttatgttattgggaaacactagtccctttagggctcgtttgatggacatgaaaatggagatcattgcctcattgggaagggatccccttgctattcaattttgaataacaaggggatctccttcatttcactgtccaccaaactaacccgaactggtttcgagatgtcaagatagcaacaatgttgaaataggcctgtaagttctttggtcgagaaggtatggtagctgacattattttttaatttatacatggggtatattgtatctgggacgggctgttttctgcttgccgtccagattatagccttggttaggcgtatttagtaatttgctcataatttagtggttcatgttttgaattcttttgctcgaaatctggaaaggtc

SEQ ID NO: 41004 - DNA, 4225 bp, Zea Mays
cagggacgtgtcggacgccctttcaccctgtatgtgcaagagagtcaaagcatcaaatggagatatgggggaaatccagacaccctaatgttgagttgagagcattttgctcaaagcattctgcagttggttacaccagttctgtagagaacagtaaccttgcttccgaactgaatcctagaaaatctggcccagacaataccaccctcaattctggaaaaattccaatactaaggttcacgcgcaaaaacaaggataaattcaccaattgtggaaccagtacctctagttctggtaacctgatcagagtcaagactatagagcaaggtgctttagctaacacagttagaaatgcaaatactcaacctattcaaatctgggaaagaggtactggtcatccctctgttggtggggatcatatgggaagttctggtgatattgctgtagtgcttagaaagctaattgacagcggaaaaattagtgttagtgatatagcatctgaagtcggcatttcttcggaatccttggaagctgctctcgtgggtgaaactaccactttttcccatggtttgacgctgaaaattatgaagtggctccaaaattatgtgcaaatgcatagtgctcaaggagatgtttgtaaagggagctcagaggtggtgcaagagagcaaatcagacagattggtcaccacagatactgtcgatgtgaaaaatccattggtcctagatgatgacaagggtgtaggtgtacttgttgatttgctggattcctctgtaactgaacctgcacaaacaagatctgaaagcaatagtaagattttgaatgaaaatagtgcaacatgtgcaactggtgtgactattttgcaaaatggcaaaaagaacatggttaaagaaggttataatcctgagtgttctgctaaagaatttgcaaacgaatctactcaggacttctccccaatcagcaacaagtatgttttaaaggatgaacatggaatattgatactgaacgccacctctggaaacaaagaatttggtacttccacagagataccaaatgaaaaccaaggtgcattacgtggaagaaaaattaatgacttaactgatgttgaactgggcccatgcttggagaaaggagtatcttcacatgatcattgttttgttcggggtgataatggtagagatagggtagattcagttgaaaatagcttcaatgctcgtgattgtgattcaaattgctctcatggacaaccttttttcaactttgatgattcacattcttatattcatccattcattcagaaaaagatatctcatcattgggacattactttcaatcagaataaggaagctctgaatcactatatacaagagtcatcatatccttcccttgagaaagtaccaactgattcctcggtagaagtagagggtacagccgatacaactgcaacaggtcaagttttgaaagcaaggtctttaaaaattcttgagcattcacctgatgatgaagtagaaggagagatggtatacttacaatctaggctgcttgacaatgctgttgttctgaagcacagatatgaaaaattgatagcaatggttgtccaaaatctctctcgcgagctggatgccctcagtaaaagaaaatgggatcttatttttgtgaatcagttccttcgtgatgtcagagaagctaagaaacgtgggagaaaagaaaagagacataaggaagcccaagctgtactagctgcagctgcagctgctattgcatcctcctcacggaactcaaccgtgagaaaagatgcaaaggaggatgcaccaaagagttctcccaaacttgctgctggatcttcaagggttgggcaacggacttcattgccacaggctaatgattcatcaaagtcatccaacagcaaaatatcatcggataaaaaatctggaagttttcttctgccaatctcctctaaagaaaatgggttatattgtgatgtatgcatgcgaactgaaacattgctgaaccgaatatttgtctgctacagatgcaagaaatttggagaattctattgggccctggaactgtgaactttgtgaagatcaagacatttcatcagaagctgcaaccgttagcgataaatcacattgtaatggcaagaaattaccctttgcacagtgtggcatgtgccatggcacatcaggtgcatttagaaagactgtagatgggaagtgggttcatgctttctgtgctgagtggttgttggacaccaagtatgtaaggggacaagataaacctgtagaaggaacggaaagccttgtagagggaaaggacacttgttgtgtctgcctccacaatgttggcgtgtgcttaaggtgtagcagtggggattgcaacattacatttcatcctacttgcgctagaagttgtggtttttacatgaacacaaaagggtttggtactacaccacagcacaaagcatactgtggcaaacacagcgtacaacagaaagaggctgatgcacagcaatatggacctgaggagctcacgagcatgaaacgaatgagggttgaattggaaaaactacgcctgttgtgtgagaggataattaagagagagaaggtgaagagagagacggttttgtgtgatcatgaaatacttgccaaaactaaggacacagttattttctcctaccttgcatgcggagcaagctcagaatctgcaactacttcagttaataacaggtcgtacagtggagcagcacaaagatctgatgatgtcacagtagatagtactatttctgggaagaaaaccataaggttttctctgaataacagaggtgctgatagaaacacagctgacagctcgaggacattgctatcattcaaacgcaagttgagtgagaggggaccacgagctggtaagcaacttccgcagaggccaactattgctgcagagaaattagaagatgaagacaagaagacaactgataagaagagagaaatgtttcaaaaggagctcattatgacatctgatcaagcttctacacagaacctacgccttcctaaaggatatgcttatgttcctcgggactctttatctaaagagaagctatggaaacaaaatacacagccccataatccacaggagcctggtggataggatcagttgaaatcaagccggttcatttctatcgaggaaggccataaaaaacttgtgcaagcttgttctttgcaactgaaaactacaagcggcaagcagggcaggccagcgctattgccacaagggtaacagcgaatccgtgatcttttttggaccgaagttgcataatggtgcagactgtgctatttgtgtgaacgtatggtgtggcaccataacaagaaggctgcctcccacccacccacacaccaggtaccttgaatatgaccagcaatatgggtgaattgacctacctgtgctataccaaagagagcgtgccaactgtatatatgagtttaatttgtgcgcagattttgtaaatttgccctgtacattcttttcctttgcatatgctagtttagttgtgcaggaaaaagggaattatgaatccttttaggttggataagaaaaggaattagcttggttctttatcatggttcagaagaaaatgcggtggtgcttgcggacaacattgggcaggagtgttggtttgatacatgtactctgtagggatggtgaaggtgccaaaaataaggtcatgccactgctttaacgcaactatttgttgttggttactgggaagtggtatcgtacaggctgagaaacaatgttttactgttttagataattgtcgccggtggctttccatgtccccttatgttattgggaaacactagtccctttagggctcgtttgatggacatgaaaatggagatcattgcctcattgggaagggatccccttgctattcaattttgaataacaaggggatctccttcatttcactgtccaccaaactaacccgaactggtttcgagatgtcaagatagcaacaatgttgaaataggcctgtaagttctttggtcgagaaggtatggtagctgacattattttttaatttatacatggggtatattgtatctgggacgggctgttttctgcttgccgtccagattatagccttggttaggcgtatttagtaatttgctcataatttagtggttcatgttttgaattcttttgctcgaaatctggaaaggtc

SEQ ID NO: 41005 - DNA, 4308 bp, Zea Mays
cagggacgtgtcggacgccctttcaccctgtatgtgcaagagagtcaaagcatcaaatggagatatgggggaaatccagacaccctaatgttgagttgagagcattttgctcaaagcattctgcagttggttacaccagttctgtagagaacagtaaccttgcttccgaactgaatcctagaaaatctggcccagacaataccaccctcaattctggaaaaattccaatactaaggttcacgcgcaaaaacaaggataaattcaccaattgtggaaccagtacctctagttctggtaacctgatcagagtcaagactatagagcaaggtgctttagctaacacagttagaaatgcaaatactcaacctattcaaatctgggaaagaggtactggtcatccctctgttggtggggatcatatgggaagttctggtgatattgctgtagtgcttagaaagctaattgacagcggaaaaattagtgttagtgatatagcatctgaagtcggcatttcttcggaatccttggaagctgctctcgtgggtgaaactaccactttttcccatggtttgacgctgaaaattatgaagtggctccaaaattatgtgcaaatgcatagtgctcaaggagatgtttgtaaagggagctcagaggtggtgcaagagagcaaatcagacagattggtcaccacagatactgtcgatgtgaaaaatccattggtcctagatgatgacaagggtgtaggtgtacttgttgatttgctggattcctctgtaactgaacctgcacaaacaagatctgaaagcaatagtaagattttgaatgaaaatagtgcaacatgtgcaactggtgtgactattttgcaaaatggcaaaaagaacatggttaaagaaggttataatcctgagtgttctgctaaagaatttgcaaacgaatctactcaggacttctccccaatcagcaacaagtatgttttaaaggatgaacatggaatattgcattatcaactctaccaattttttgaacttgtcgcgctccaatttatcttgcgtgagatactgaacgccacctctggaaacaaagaatttggtacttccacagagataccaaatgaaaaccaaggtgcattacgtggaagaaaaattaatgacttaactgatgttgaactgggcccatgcttggagaaaggagtatcttcacatgatcattgttttgttcggggtgataatggtagagatagggtagattcagttgaaaatagcttcaatgctcgtgattgtgattcaaattgctctcatggacaaccttttttcaactttgatgattcacattcttatattcatccattcattcagaaaaagatatctcatcattgggacattactttcaatcagaataaggaagctctgaatcactatatacaagagtcatcatatccttcccttgagaaagtaccaactgattcctcggtagaagtagagggtacagccgatacaactgcaacaggtcaagttttgaaagcaaggtctttaaaaattcttgagcattcacctgatgatgaagtagaaggagagatggtatacttacaatctaggctgcttgacaatgctgttgttctgaagcacagatatgaaaaattgatagcaatggttgtccaaaatctctctcgcgagctggatgccctcagtaaaagaaaatgggatcttatttttgtgaatcagttccttcgtgatgtcagagaagctaagaaacgtgggagaaaagaaaagagacataaggaagcccaagctgtactagctgcagctgcagctgctattgcatcctcctcacggaactcaaccgtgagaaaagatgcaaaggaggatgcaccaaagagttctcccaaacttgctgctggatcttcaagggttgggcaacggacttcattgccacaggctaatgattcatcaaagtcatccaacagcaaaatatcatcggataaaaaatctggaagttttcttctgccaatctcctctaaagaaaatgggttatattgtgatgtatgcatgcgaactgaaacattgctgaaccgaatatttgtctgctacagatgcaaggctgctgtgcacataaattgctacagaaatttggagaattctattgggccctggaactgtgaactttgtgaagatcaagacatttcatcagaagctgcaaccgttagcgataaatcacattgtaatggcaagaaattaccctttgcacagtgtggcatgtgccatggcacatcaggtgcatttagaaagactgtagatgggaagtgggttcatgctttctgtgctgagtggttgttggacaccaagtatgtaaggggacaagataaacctgtagaaggaacggaaagccttgtagagggaaaggacacttgttgtgtctgcctccacaatgttggcgtgtgcttaaggtgtagcagtggggattgcaacattacatttcatcctacttgcgctagaagttgtggtttttacatgaacacaaaagggtttggtactacaccacagcacaaagcatactgtggcaaacacagcgtacaacagaaagaggctgatgcacagcaatatggacctgaggagctcacgagcatgaaacgaatgagggttgaattggaaaaactacgcctgttgtgtgagaggataattaagagagagaaggtgaagagagagacggttttgtgtgatcatgaaatacttgccaaaactaaggacacagttattttctcctaccttgcatgcggagcaagctcagaatctgcaactacttcagttaataacaggtcgtacagtggagcagcacaaagatctgatgatgtcacagtagatagtactatttctgggaagaaaaccataaggttttctctgaataacagaggtgctgatagaaacacagctgacagctcgaggacattgctatcattcaaacgcaagttgagtgagaggggaccacgagctggtaagcaacttccgcagaggccaactattgctgcagagaaattagaagatgaagacaagaagacaactgataagaagagagaaatgtttcaaaaggagctcattatgacatctgatcaagcttctacacagaacctacgccttcctaaaggatatgcttatgttcctcgggactctttatctaaagagaagctatggaaacaaaatacacagccccataatccacaggagcctggtggataggatcagttgaaatcaagccggttcatttctatcgaggaaggccataaaaaacttgtgcaagcttgttctttgcaactgaaaactacaagcggcaagcagggcaggccagcgctattgccacaagggtaacagcgaatccgtgatcttttttggaccgaagttgcataatggtgcagactgtgctatttgtgtgaacgtatggtgtggcaccataacaagaaggctgcctcccacccacccacacaccaggtaccttgaatatgaccagcaatatgggtgaattgacctacctgtgctataccaaagagagcgtgccaactgtatatatgagtttaatttgtgcgcagattttgtaaatttgccctgtacattcttttcctttgcatatgctagtttagttgtgcaggaaaaagggaattatgaatccttttaggttggataagaaaaggaattagcttggttctttatcatggttcagaagaaaatgcggtggtgcttgcggacaacattgggcaggagtgttggtttgatacatgtactctgtagggatggtgaaggtgccaaaaataaggtcatgccactgctttaacgcaactatttgttgttggttactgggaagtggtatcgtacaggctgagaaacaatgttttactgttttagataattgtcgccggtggctttccatgtccccttatgttattgggaaacactagtccctttagggctcgtttgatggacatgaaaatggagatcattgcctcattgggaagggatccccttgctattcaattttgaataacaaggggatctccttcatttcactgtccaccaaactaacccgaactggtttcgagatgtcaagatagcaacaatgttgaaataggcctgtaagttctttggtcgagaaggtatggtagctgacattattttttaatttatacatggggtatattgtatctgggacgggctgttttctgcttgccgtccagattatagccttggttaggcgtatttagtaatttgctcataatttagtggttcatgttttgaattcttttgctcgaaatctggaaaggtc

SEQ ID NO: 41006 - DNA, 1504 bp, Zea Mays
agggacgtgtcggacgccctttcaccctgtatgtgcaagagagtcaaagcatcaaatggagatatgggggaaatccagacaccctaatgttgagttgagagcattttgctcaaagcattctgcagttggttacaccagttctgtagagaacagtaaccttgcttccgaactgaatcctagaaaatctggcccagacaataccaccctcaattctggaaaaattccaatactaaggttcacgcgcaaaaacaaggataaattcaccaattgtggaaccagtacctctagttctggtaacctgatcagagtcaagactatagagcaaggtgctttagctaacacagttagaaatgcaaatactcaacctattcaaatctgggaaagaggtactggtcatccctctgttggtggggatcatatgggaagttctggtgatattgctgtagtgcttagaaagctaattgacagcggaaaaattagtgttagtgatatagcatctgaagtcggcatttcttcggaatccttggaagctgctctcgtgggtgaaactaccactttttcccatggtttgacgctgaaaattatgaagtggctccaaaattatgtgcaaatgcatagtgctcaaggagatgtttgtaaagggagctcagaggtggtgcaagagagcaaatcagacagattggtcaccacagatactgtcgatgtgaaaaatccattggtcctagatgatgacaagggtgtaggtgtacttgttgatttgctggattcctctgtaactgaacctgcacaaacaagatctgaaagcaatagtaagattttgaatgaaaatagtgcaacatgtgcaactggtgtgactattttgcaaaatggcaaaaagaacatggttaaagaaggttataatcctgagtgttctgctaaagaatttgcaaacgaatctactcaggacttctccccaatcagcaacaagtatgttttaaaggatgaacatggaatattgatactgaacgccacctctggaaacaaagaatttggtacttccacagagataccaaatgaaaaccaaggaagggagttactggcattggagaatgagcatacaactgatccaagacctgataccctcacagtcatgggtgctccgctggttgcgacaagaaaagaagagttcctcaacaaaatttgtagaagacctgacgcttgtttgctgttaccaaataaaaacagcaagaaagcaactcctccctctccaacaacatctgctgctgcgccaagacgaagccggcgtgtcgctggagctggagtggaattcagcatgcaagactggggtggcagggccaccaaaaaagccatgaaagccctgcagattattactgaagatgaaggcatcagtcaggaatccctcaaggcttatgcagagcttttcaagcacccactttcccagctccaggtggaggccttgtccgcccttttcgggtggcccacgccaccagcagggcctgtctga

SEQ ID NO: 41007 - DNA, 4264 bp, Zea Mays
gagatatgggggaaatccagacaccctaatgttgagttgagagcattttgctcaaagcattctgcagttggttacaccagttctgtagagaacagtaaccttgcttccgaactgaatcctagaaaatctggcccagacaataccaccctcaattctggaaaaattccaatactaaggttcacgcgcaaaaacaaggataaattcaccaattgtggaaccagtacctctagttctggtaacctgatcagagtcaagactatagagcaaggtgctttagctaacacagttagaaatgcaaatactcaacctattcaaatctgggaaagaggtactggtcatccctctgttggtggggatcatatgggaagttctggtgatattgctgtagtgcttagaaagctaattgacagcggaaaaattagtgttagtgatatagcatctgaagtcggcatttcttcggaatccttggaagctgctctcgtgggtgaaactaccactttttcccatggtttgacgctgaaaattatgaagtggctccaaaattatgtgcaaatgcatagtgctcaaggagatgtttgtaaagggagctcagaggtggtgcaagagagcaaatcagacagattggtcaccacagatactgtcgatgtgaaaaatccattggtcctagatgatgacaagggtgtaggtgtacttgttgatttgctggattcctctgtaactgaacctgcacaaacaagatctgaaagcaatagtaagattttgaatgaaaatagtgcaacatgtgcaactggtgtgactattttgcaaaatggcaaaaagaacatggttaaagaaggttataatcctgagtgttctgctaaagaatttgcaaacgaatctactcaggacttctccccaatcagcaacaagtatgttttaaaggatgaacatggaatattgcattatcaactctaccaattttttgaacttgtcgcgctccaatttatcttgcgtgagatactgaacgccacctctggaaacaaagaatttggtacttccacagagataccaaatgaaaaccaaggtgcattacgtggaagaaaaattaatgacttaactgatgttgaactgggcccatgcttggagaaaggagtatcttcacatgatcattgttttgttcggggtgataatggtagagatagggtagattcagttgaaaatagcttcaatgctcgtgattgtgattcaaattgctctcatggacaaccttttttcaactttgatgattcacattcttatattcatccattcattcagaaaaagatatctcatcattgggacattactttcaatcagaataaggaagctctgaatcactatatacaagagtcatcatatccttcccttgagaaagtaccaactgattcctcggtagaagtagagggtacagccgatacaactgcaacaggtcaagttttgaaagcaaggtctttaaaaattcttgagcattcacctgatgatgaagtagaaggagagatggtatacttacaatctaggctgcttgacaatgctgttgttctgaagcacagatatgaaaaattgatagcaatggttgtccaaaatctctctcgcgagctggatgccctcagtaaaagaaaatgggatcttatttttgtgaatcagttccttcgtgatgtcagagaagctaagaaacgtgggagaaaagaaaagagacataaggaagcccaagctgtactagctgcagctgcagctgctattgcatcctcctcacggaactcaaccgtgagaaaagatgcaaaggaggatgcaccaaagagttctcccaaacttgctgctggatcttcaagggttgggcaacggacttcattgccacaggctaatgattcatcaaagtcatccaacagcaaaatatcatcggataaaaaatctggaagttttcttctgccaatctcctctaaagaaaatgggttatattgtgatgtatgcatgcgaactgaaacattgctgaaccgaatatttgtctgctacagatgcaaggctgctgtgcacataaattgctacagaaatttggagaattctattgggccctggaactgtgaactttgtgaagatcaagacatttcatcagaagctgcaaccgttagcgataaatcacattgtaatggcaagaaattaccctttgcacagtgtggcatgtgccatggcacatcaggtgcatttagaaagactgtagatgggaagtgggttcatgctttctgtgctgagtggttgttggacaccaagtatgtaaggggacaagataaacctgtagaaggaacggaaagccttgtagagggaaaggacacttgttgtgtctgcctccacaatgttggcgtgtgcttaaggtgtagcagtggggattgcaacattacatttcatcctacttgcgctagaagttgtggtttttacatgaacacaaaagggtttggtactacaccacagcacaaagcatactgtggcaaacacagcgtacaacagaaagaggctgatgcacagcaatatggacctgaggagctcacgagcatgaaacgaatgagggttgaattggaaaaactacgcctgttgtgtgagaggataattaagagagagaaggtgaagagagagacggttttgtgtgatcatgaaatacttgccaaaactaaggacacagttattttctcctaccttgcatgcggagcaagctcagaatctgcaactacttcagttaataacaggtcgtacagtggagcagcacaaagatctgatgatgtcacagtagatagtactatttctgggaagaaaaccataaggttttctctgaataacagaggtgctgatagaaacacagctgacagctcgaggacattgctatcattcaaacgcaagttgagtgagaggggaccacgagctggtaagcaacttccgcagaggccaactattgctgcagagaaattagaagatgaagacaagaagacaactgataagaagataactatgcaacagagagaaatgtttcaaaaggagctcattatgacatctgatcaagcttctacacagaacctacgccttcctaaaggatatgcttatgttcctcgggactctttatctaaagagaagctatggaaacaaaatacacagccccataatccacaggagcctggtggataggatcagttgaaatcaagccggttcatttctatcgaggaaggccataaaaaacttgtgcaagcttgttctttgcaactgaaaactacaagcggcaagcagggcaggccagcgctattgccacaagggtaacagcgaatccgtgatcttttttggaccgaagttgcataatggtgcagactgtgctatttgtgtgaacgtatggtgtggcaccataacaagaaggctgcctcccacccacccacacaccaggtaccttgaatatgaccagcaatatgggtgaattgacctacctgtgctataccaaagagagcgtgccaactgtatatatgagtttaatttgtgcgcagattttgtaaatttgccctgtacattcttttcctttgcatatgctagtttagttgtgcaggaaaaagggaattatgaatccttttaggttggataagaaaaggaattagcttggttctttatcatggttcagaagaaaatgcggtggtgcttgcggacaacattgggcaggagtgttggtttgatacatgtactctgtagggatggtgaaggtgccaaaaataaggtcatgccactgctttaacgcaactatttgttgttggttactgggaagtggtatcgtacaggctgagaaacaatgttttactgttttagataattgtcgccggtggctttccatgtccccttatgttattgggaaacactagtccctttagggctcgtttgatggacatgaaaatggagatcattgcctcattgggaagggatccccttgctattcaattttgaataacaaggggatctccttcatttcactgtccaccaaactaacccgaactggtttcgagatgtcaagatagcaacaatgttgaaataggcctgtaagttctttggtcgagaaggtatggtagctgacattattttttaatttatacatggggtatattgtatctgggacgggctgttttctgcttgccgtccagattatagccttggttaggcgtatttagtaatttgctcataatttagtggttcatgttttgaattcttttgctcgaaatctggaaaggtc

SEQ ID NO: 41008 - DNA, 1531 bp, Zea Mays
agttcagcagtaaaccaaagaagtcgtaacagtaacagttcggatcgggtaacctgctatcgctagcatccgctaaccctagcagtctaacactagcagaggagaaccgtaggatttggcggacgggcgattgcacgcccgtgacttcgaccccgacgtcccttcccaactcgtccaccgccgccgcccgccgtcgcaaaactcgccagcggccagccatggggtacacgaaggaccagcttctcgcgcacctccagaagcttaagattgatttcacgtgctacgatcacccggttgtgttgacagtggaggaacaggccaaacatgttggccatttaggaggtgctttgagcaaaaatttactcttgaaggacaagaagcatcggttatatgttatttctgcccttgctggcaccaaagttgacatgaaaattctttcccaacgtcttgggttgggaaaaggtggtctacgaatggctcctgaggaaaatcttctagaagtacttcaggtgcccttagggtgtgttactccttttgctttaataaacgagtctgcgagtgctgtttcacttttacttgatcaaggtttcaagtctaaacagagctgctacttccatccactgacaaatgatgtgacaattgctcttagctcaagtaatctggacaagtttctcatctccattgggaagcaaccagcatatgtggacttggaggctgcaccagctgtgggtaaggataatcctcctgatctagcacatttggttccaactggtgtgccaaattcttcagaacaaccagttgagaacacggcacctactaatgttcttaaagagacagaagtgaaggctaaacccaaagttcagagcaagggtgcagaaacatcgagcaaagtagataaacctactaccgataccagtgttgacaaatttgtaaatgatgtgttcgagatcatctccccattgttcttgtctgaggcattgaagaaattggacattaagaaggaagatctttctttgatcttagaaggcctcaggggacgggcagatccagatttgaagagtatagcgatgactctgaagaatgcatcatatacctcagggtttcacgctggttacaaaaccatgcagaatcgtggtctaaacggctgacccacttaggtcccagtctctcaattgcatggtttgatacaagaaacaggaatctgattttacatatttgtatgctgttgaatgaagtcaacatattatgtttgatgctctcgttctatctatgacgtatgctctttttttgtgtatgtgtggatttgcctttttctctctctgagagatcaatgggaaattttcaccataccgtgcagtgttccatagaatatgtatttacaagattctgctactcgctctaccaacatcagagtttcagtgtatcagatacatcacatagaaatgtcttcgtgggcgtatttcatttttacatctacgctgattttggcatcaggcttccaccaatcttccatctttgacattgaactgag

SEQ ID NO: 41009 - DNA, 1429 bp, Zea Mays
tgcctctgcacgtggcaccatcaatatgcttcgtcgctcttgatctgtcaatattgggctgttaagcttaagattgatttcacgtgctacgatcacccggttgtgttgacagtggaggaacaggccaaacatgttggccatttaggaggtgctttgagcaaaaatttactcttgaaggacaagaagcatcggttatatgttatttctgcccttgctggcaccaaagttgacatgaaaattctttcccaacgtcttgggttgggaaaaggtggtctacgaatggctcctgaggaaaatcttctagaagtacttcaggtgcccttagggtgtgttactccttttgctttaataaacgagtctgcgagtgctgtttcacttttacttgatcaaggtttcaagtctaaacagagctgctacttccatccactgacaaatgatgtgacaattgctcttagctcaagtaatctggacaagtttctcatctccattgggaagcaaccagcatatgtggacttggaggctgcaccagctgtgggtaaggataatcctcctgatctagcacatttggttccaactggtgtgccaaattcttcagaacaaccagttgagaacacggcacctactaatgttcttaaagagacagaagtgaaggctaaacccaaagttcagagcaagggtgcagaaacatcgagcaaagtagataaacctactaccgataccagtgttgacaaatttgtaaatgatgtgttcgagatcatctccccattgttcttgtctgaggcattgaagaaattggacattaagaaggaagatctttctttgatcttagaaggcctcaggggacgggcagatccagatttgaagagtatagcgatgactctgaagaatgcatcatatacctcagggtttcacgctggttacaaaaccatgcagaatcgtggtctaaacggctgacccacttaggtcccagtctctcaattgcatggtttgatacaagaaacaggaatctgattttacatatttgtatgctgttgaatgaagtcaacatattatgtttgatgctctcgttctatctatgacgtatgctctttttttgtgtatgtgtggatttgcctttttctctctctgagagatcaatgggaaattttcaccataccgtgcagtgttccatagaatatgtatttacaagattctgctactcgctctaccaacatcagagtttcagtgtatcagatacatcacatagaaatgtcttcggcgcgttccagaaattactgttaacatggtatatcacccaaacagtcgttttacgtgccctttaacgatgtgtaattcactcgcctttacagtgggcgtatttcatttttacatctacgctgattttggcatcaggcttccaccaatcttccatctttgacattgaactgag

SEQ ID NO: 41010 - DNA, 1396 bp, Zea Mays
gagattctccacaaatgtgtataaattgaaaagcttaagattgatttcacgtgctacgatcacccggttgtgttgacagtggaggaacaggccaaacatgttggccatttaggaggtgctttgagcaaaaatttactcttgaaggacaagaagcatcggttatatgttatttctgcccttgctggcaccaaagttgacatgaaaattctttcccaacgtcttgggttgggaaaaggtggtctacgaatggctcctgaggaaaatcttctagaagtacttcaggtgcccttagggtgtgttactccttttgctttaataaacgagtctgcgagtgctgtttcacttttacttgatcaaggtttcaagtctaaacagagctgctacttccatccactgacaaatgatgtgacaattgctcttagctcaagtaatctggacaagtttctcatctccattgggaagcaaccagcatatgtggacttggaggctgcaccagctgtgggtaaggataatcctcctgatctagcacatttggttccaactggtgtgccaaattcttcagaacaaccagttgagaacacggcacctactaatgttcttaaagagacagaagtgaaggctaaacccaaagttcagagcaagggtgcagaaacatcgagcaaagtagataaacctactaccgataccagtgttgacaaatttgtaaatgatgtgttcgagatcatctccccattgttcttgtctgaggcattgaagaaattggacattaagaaggaagatctttctttgatcttagaaggcctcaggggacgggcagatccagatttgaagagtatagcgatgactctgaagaatgcatcatatacctcagggtttcacgctggttacaaaaccatgcagaatcgtggtctaaacggctgacccacttaggtcccagtctctcaattgcatggtttgatacaagaaacaggaatctgattttacatatttgtatgctgttgaatgaagtcaacatattatgtttgatgctctcgttctatctatgacgtatgctctttttttgtgtatgtgtggatttgcctttttctctctctgagagatcaatgggaaattttcaccataccgtgcagtgttccatagaatatgtatttacaagattctgctactcgctctaccaacatcagagtttcagtgtatcagatacatcacatagaaatgtcttcggcgcgttccagaaattactgttaacatggtatatcacccaaacagtcgttttacgtgccctttaacgatgtgtaattcactcgcctttacagtgggcgtatttcatttttacatctacgctgattttggcatcaggcttccaccaatcttccatctttgacattgaactgag

SEQ ID NO: 41011 - DNA, 1012 bp, Zea Mays
ggttcatagagatcattgttattcctctcagctcttagctcaagtaatctggacaagtttctcatctccattgggaagcaaccagcatatgtggacttggaggctgcaccagctgtgggtaaggataatcctcctgatctagcacatttggttccaactggtgtgccaaattcttcagaacaaccagttgagaacacggcacctactaatgttcttaaagagacagaagtgaaggctaaacccaaagttcagagcaagggtgcagaaacatcgagcaaagtagataaacctactaccgataccagtgttgacaaatttgtaaatgatgtgttcgagatcatctccccattgttcttgtctgaggcattgaagaaattggacattaagaaggaagatctttctttgatcttagaaggcctcaggggacgggcagatccagatttgaagagtatagcgatgactctgaagaatgcatcatatacctcagggtttcacgctggttacaaaaccatgcagaatcgtggtctaaacggctgacccacttaggtcccagtctctcaattgcatggtttgatacaagaaacaggaatctgattttacatatttgtatgctgttgaatgaagtcaacatattatgtttgatgctctcgttctatctatgacgtatgctctttttttgtgtatgtgtggatttgcctttttctctctctgagagatcaatgggaaattttcaccataccgtgcagtgttccatagaatatgtatttacaagattctgctactcgctctaccaacatcagagtttcagtgtatcagatacatcacatagaaatgtcttcggcgcgttccagaaattactgttaacatggtatatcacccaaacagtcgttttacgtgccctttaacgatgtgtaattcactcgcctttacagtgggcgtatttcatttttacatctacgctgattttggcatcaggcttccaccaatcttccatctttgacattgaactgag

SEQ ID NO: 41012 - DNA, 1037 bp, Zea Mays
tttcgtccacccagtgcaggtgccaattgcgctgccaaccatttttctgccagcagctcttagctcaagtaatctggacaagtttctcatctccattgggaagcaaccagcatatgtggacttggaggctgcaccagctgtgggtaaggataatcctcctgatctagcacatttggttccaactggtgtgccaaattcttcagaacaaccagttgagaacacggcacctactaatgttcttaaagagacagaagtgaaggctaaacccaaagttcagagcaagggtgcagaaacatcgagcaaagtagataaacctactaccgataccagtgttgacaaatttgtaaatgatgtgttcgagatcatctccccattgttcttgtctgaggcattgaagaaattggacattaagaaggaagatctttctttgatcttagaaggcctcaggggacgggcagatccagatttgaagagtatagcgatgactctgaagaatgcatcatatacctcagggtttcacgctggttacaaaaccatgcagaatcgtggtctaaacggctgacccacttaggtcccagtctctcaattgcatggtttgatacaagaaacaggaatctgattttacatatttgtatgctgttgaatgaagtcaacatattatgtttgatgctctcgttctatctatgacgtatgctctttttttgtgtatgtgtggatttgcctttttctctctctgagagatcaatgggaaattttcaccataccgtgcagtgttccatagaatatgtatttacaagattctgctactcgctctaccaacatcagagtttcagtgtatcagatacatcacatagaaatgtcttcggcgcgttccagaaattactgttaacatggtatatcacccaaacagtcgttttacgtgccctttaacgatgtgtaattcactcgcctttacagtgggcgtatttcatttttacatctacgctgattttggcatcaggcttccaccaatcttccatctttgacattgaactgag

SEQ ID NO: 41013 - DNA, 2679 bp, Zea Mays
cagcggggaaggcgagggcccctgtgtctcgcgtcgcgagtttgattgccctgacggcctgcctgccacggttcacggttgaaacggagcaacgcttgcgaacgcgccattccgctccacgctgccctgctctgctcccccagtcccccaccacaactggcgtcgccttccccggggaatgcgaccgcgcgccagagcatgccccgcccggagcccgcgctagggttccccgcccgcgcgtccaagccgccgccccagcgccgccgcaagaggcagccgccgacgaggcggaggcgaccggccggtgccgcaccggtggggccacgcggcgcggccgatccagatccggcgcactcctccgcgctgctgcccctcccaagcggcggcagtggcttcgcctcgcggggcacggttgcgccagacgaggaagaggggagagacggagcaagctccgcagaatcggaggaagtggcaaaagcaacaaatcattcgttctcccactcagtgagagagtgccagaagcagcgtcgactcaagtcagagaggtctgcactggcgcgcccgacggccttgcatgagctcaacagcgctggaggtgttgagctgctagtgctctcgccgagatgcttgattggtaacccgggaggaatgagcaagagctcgacgacatcatcccggagcagatcaggcacaggcacaggcacgttcccgagccctgggaccccgaactacaaccggcattgtgcaggcagcatgcagtactccaagggttggagttcagagcgcgtgccgctgggcactggtagcaatagacggtatgggggcagtggggttgtgcttccgtttaacaatgggaggaagctgccgtcgaaatgggaggacgcggagaagtggatcctaagtccggtttcctgtgatggtatgggaaggatgtctgcaccggctccgcatcatagacggcccaagtcgaagagcgggccccttggccacccagctggcattccaggggcttatgccgctgtctcaccgcttgttccttgctttgatggtgttctggcagaagctaattttgcagtgcattcacctttctctgctggggttctcataccagagcacgggcgcattggtgacttcagcagtggaagaggtagatgtggtgacgatggtagcagcagatcctactctgcagagaaggagccatatatattaagatctgcaagcatacatgcctggacagaaacgcttatggaggcatctgcttttgctaacatctccgaagaaaccgtacaagatgataaactgcaaggccagacagaagcaacttccaatatttcgagtccaatcataaagaaagatgtcggcacacaaatgagtcctgaggataatatagcatctcctccaaaagcaaggcattcctgctccagtctgccttcaaggcatctgatacaagaagcaaatagtcatatacctaaacctgaaattagggacgtgcaggttgatgaccaagtaactgtgacccggtggtccaggcgacatgtaacacgaggctctgataagaggtcaacaaatattgtcgaatggaggaagaagaccgttgaaacccgagctccatcttttgatgaaaaagaaagagaaggatgcatgtcaaagtgcaaaagggaggaggcaaagatcactgcttgggaaaatctacagaaagcaaaagcagaggctgccattcgaaagctggagatgaaacttgaaaagaaaagatcatcgtcaatggacagaattctaggcaaactccgctctgctcagaagaaagcacatgacatgcgaagtgtagtttcttatagtgaagatcattgtggtgcgaggacaaccaagaagacatctttccttgtcaaaactggcaagcctttcagctgctgctttacctaccgtgcttgctagttgtggcacagctggtgccactggattcagcaatggatatagttctatgcggcaacagttatggatgtgaagtcagttggattttgactacatggcctaattgtcaatgagatatgcacaatctgatgaacaagatattattatggagcagcagacaaagaagtgtctatctttctcaagagctcttctcaggcaacagttatggatgtgaagtcagttggattttgactacatggcctaattgtcaatgcgatttgcacaatctgatgaacaagatattattatggagcagcagacaaagaaagtcatcgagctaaatccactcatgtagctaatggtgtggactactatctgctgctgtatagcctgcgacgatgactctgtacacccgctttcatggaaattgtgtatgtaacccaaatcatgggcgcattacagacctaacggaaaaaagtcagtgctgcgcctttagaatgcagcttgctctcttccttattttgaaacttgtttggttcagttctggaggcttgcggtccagcactgaaacttggcttgtttgtttattggttcgcagcgagtggaatttgtaactgagacgacaaaaaccctatttcccctcctttttggtgaacatgataaacgtctccaacttccgttagggcacgtacaaagcctcttgatcagttttttttatgcacaagagataattaagagacaacatggtacaatcataagtccttatatcat

SEQ ID NO: 41014 - DNA, 1688 bp, Zea Mays
atatccatccattcccctcgccaagccgccacggcctgactttccctcccgcacacccgcgaccatacaggcaagtcaggcatacaccaacaacgctcgtcgtgcacctcgcgcctcaggtcaccccaccaaattcctcttgatacgccgaatttcttttgctaattctgctacctcctgtcgctaagccaccatattcagtctaacccctgctctgagctcacctgattggcggctccgttcggcctctgggcctgggtgtaccgactaccgagggctctttcgaaatgtcaattgggtcgagtttggtgggctacgtgaagcatggatgaatttcccggctggaagcgggaggcggcagcagcatccggggccggagcacctgtcgccgatgacgccgctcccgctggcgcggtaggggtcggtctactcgctcacgttcgacgagttccagagctcgctcggtggggccaccaaggacttcggatccatgaacatggacgagctcctccgcaacatctggtcggcggaggagacacacagcgtcacagctgcggaccatgccgcgcgggcgccgtacgtccagtgccagggctcgctcaccctcccctgcacgctcagccagaagaccgtcgacgaggtctagcgtgacctcgtgtgcaacggtggaggaccctccgacgaggctgtggcgccgccccaccggcccaacggcagccgacgctcggggagatcatgctggaggagttcctcgtccgcgccggcgtggtgagggaggacatgatggcggcggcgcccgtaccaccagcgccgggttgcccaccacctcatctgcaaccgccaatgctgtttccacatggcaatgtgtttgctcccttagtgcctccgctccaattcgggaatgggtttgtgtcgggggctctcagtcagcagcagggaggtgttcttgaggccccggcggtatcgccgcggccggtgacggcaagcgggttcgggaagatggaaggagacgacttgtcgcatctgtcgccatcaccggtgtcgtacgtttttttgtgctggtttgaggggaaggaagccaccagctgtggagaaggtggttgagaggaggcaacgccggatgatcaagaaccgggagttggccgcgaggtcgcgtgggaggaaacagattgaaggccttttctcaaggcctctcagcaaggatcagatggaggcaattatggagctggcaaatcaagggaaggggaagaaagggagcaagctcaggggctgcaaagtggcgccacttaaggctcccataatcaaggctgcttcgggaatatgagatgctcatcgtgttggagttatcagtggtttccagtttttatattatgtgtctgaagttgttcctactttcctcttgtctaggggtagagcatggtgtgccgcagcctcttttgccagacttttggctgctgcttgacatttggtggtcctgttggatctcgacccccactcatctgtatcgttctattttatggctgaaactaaattgtgtgttgtgggtcatgtgtttctgttcttcaatattgatggtgatcatggctgctagtcggcatcagatgttaattatgttaccgcctttatgtggcaatgtctattcaagtggagaaatggttactatccaatgaatacaaattgctgtattt

SEQ ID NO: 41015 - DNA, 2062 bp, Zea Mays
atatccatccattcccctcgccaagccgccacggcctgactttccctcccgcacacccgcgaccatacaggcaagtcaggcatacaccaacaacgctcgtcgtgcacctcgcgcctcaggtcaccccaccaaattcctcttgatacgccgaatttcttttgctaattctgctacctcctgtcgctaagccaccatattcagtctaacccctgctctgagctcacctgattggcggctccgttcggcctctgggcctgggtgtaccgactaccgagggctctttcgaaatgtcaattgggtcgagtttggtgggctacgtgaagcatggatgaatttcccggctggaagcgggaggcggcagcagcatccggggccggagcacctgtcgccgatgacgccgctcccgctggcgcggtaggggtcggtctactcgctcacgttcgacgagttccagagctcgctcggtggggccaccaaggacttcggatccatgaacatggacgagctcctccgcaacatctggtcggcggaggagacacacagcgtcacagctgcggaccatgccgcgcgggcgccgtacgtccagtgccagggctcgctcaccctcccctgcacgctcagccagaagaccgtcgacgaggtctagcgtgacctcgtgtgcaacggtggaggaccctccgacgaggctgtggcgccgccccaccggcccaacggcagccgacgctcggggagatcatgctggaggagttcctcgtccgcgccggcgtggtgagggaggacatgatggcggcggcgcccgtaccaccagcgccgggttgcccaccacctcatctgcaaccgccaatgctgtttccacatggcaatgtgtttgctcccttagtgcctccgctccaattcgggaatgggtttgtgtcgggggctctcagtcagcagcagggaggtgttcttgaggccccggcggtatcgccgcggccggtgacggcaagcgggttcgggaagatggaaggagacgacttgtcgcatctgtcgccatcaccggtgtcgtacgtttttttgtgctggtttgaggggaaggaagccaccagctgtggagaaggtggttgagaggaggcaacgccggatgatcaagaaccgggagttggccgcgaggtcgcgtgggaggaaacaggcgtatatgatggagttggaagctgaggtggcaaaacttaaagagttgaacgatgagttgcaaaaaaacaggtatgctcatatgatgtttgcattttttttatttttttggttcacgattgtgaaattcaaatagtttaattaatacctttacttgaatttgagaccatttgggatactagagaaccttatgtctgactcttgtctgactatgttctatgtgttgttcgatcgcattttctactcagcctctcgtctgactattttctatgtgttgttagatcacattcttcataactgctgctatttattgctaaccgatttcttctcaaatatgcaggtcgaaatgctggagaagcaaaagaatgaggtcctggagagaatgagacggcaagtcggacccacgataaagagaatttgtctgcggaggacgttggcaggtctgtggtaagctcgtggacctgtacctagcagtatcgctcgtgaaggaggagtgtgtatagtagggggaagatggacacacggtggccagagtcgcccttgttcacaccgccattaatccaaagccttataggcgcagatagattgtctgtgattgtcactttataagcttttgccctttacatcaaaaaaaaaaaaaaaaaaagaaagagagttcacgcgaatagagaaatttgtatgtagattcagcccggtcagtttgttgactgaggtagagtacttatgctccattttgcttatttaggctttctggtttggtgtgataccatgtgactatatgtgtatcatcattccttgtgctttgtaaaaccaatttaattgtgatgtagactttagaacagctgacgtccgctgcccaagcttatagacattgcttaagaaaggagtattaagt

SEQ ID NO: 41016 - DNA, 1295 bp, Zea Mays
cactccctcatgcagcatcgcggctaacttcccagccactgcttgcaccatcccgattcccccccacccgccgcgcaacaaggcgcaacccagaccccggcccctccagctcggaaaacccccccgacgagccaccgccacgcgacgccccctcactcactcactccgccgcccggcccgccgcgcgaggccggtcctggaacacggcgcgccgcgctcgtacccatgccgtaacgcccgaacccgccaaccgagccgcagccgcctcgccgcgcacacatgcacttcccctcgccgcgcgcgctcgccatggccgcgccggcggtcgcccgccctcgcctcgcccccgtggctcaccccgcctcgacctcttgcctgctggccctctgggaccggaggcgcgggcacggccgcgcggttgcggcggtgagggcgcgcgagcaaggcgcggcgccgcccgacccggcggccttcctgcgccggccggaggtagcgacggtgacgtcgacggaggaggagagggaggccgatgcggggtcctcgtttgatggccccggggaggacgaggcgcccgaggaggaaggggtccgggggaggaggaaggcgccggagagggagtgggtggattgggaggaccttatcctcgaggacaccgtgccgctcgttggcttcgtacggatgatcctccactccggtatgaaagtggcgatcggctgtgtcctgaacatgagaaggcgattctggaacgtttgcttccataccatccacaatataatgagaaaattgggtgtggtattgactacatcacggtagggttacatccagaattcgaaaactcaaggtgtttattcatagttaggaaggatggcgagcagatcgatttttcgttctggaagtgcgtcaaaggtctcattcggcaaaagtaccccatgtacgcggacagtttcattctcaggcatttccgcaggagacaagactactgaagtagttgctcgtacggctgtttcagtgttatatttttctgtgtaattgattttgtcctgtccctttcatatcatgcgattctagcatttgttacgtggagtttttcattaagcatattattccatgcaacataaatagatataggtttgtcgcttgcagatgaaattgtagcgcgccatttagttactacatttctaattgtgagtcgttctttttaaaaaaattatactttttgctgcataattagatatatattatgtatagatgtaaaaggtatatataaaataacctaaatgacttataatttgaag

SEQ ID NO: 41017 - DNA, 1257 bp, Zea Mays
cactccctcatgcagcatcgcggctaacttcccagccactgcttgcaccatcccgattcccccccacccgccgcgcaacaaggcgcaacccagaccccggcccctccagctcggaaaacccccccgacgagccaccgccacgcgacgccccctcactcactcactccgccgcccggcccgccgcgcgaggccggtcctggaacacggcgcgccgcgctcgtacccatgccgtaacgcccgaacccgccaaccgagccgcagccgcctcgccgcgcacacatgcacttcccctcgccgcgcgcgctcgccatggccgcgccggcggtcgcccgccctcgcctcgcccccgtggctcaccccgcctcgacctcttgcctgctggccctctgggaccggaggcgcgggcacggccgcgcggttgcggcggtgagggcgcgcgagcaaggcgcggcgccgcccgacccggcggccttcctgcgccggccggaggtagcgacggtgacgtcgacggaggaggagagggaggccgatgcggggtcctcgtttgatggccccggggaggacgaggcgcccgaggaggaaggggtccgggggaggaggaaggcgccggagagggagtgggtggattgggaggaccttatcctcgaggacaccgtgccgctcgttggcttcgtacggatgatcctccactccggcaagtatgaaagtggcgatcggctgtgtcctgaacatgagaaggcgattctggaacgtttgcttccataccatccacaatataatgagaaaattgggtgtggtattgactacatcacggtagggttacatccagaattcgaaaactcaaggtgtttattcatagttaggaaggatggcgagcagatcgatttttcgttctggaagtgcgtcaaaggtctcattcggcaaaagtaccccatgtacgcggacagtttcattctcaggcatttccgcaggagacaagactactgaagtagttgctcggaaggcggcgacaagagcggctaagaatgaagtacccaactctgtagaatgtcagataagacggactccttaccgaagatttgctcctgctccgccaatggttacatgttgccaaaaccatcgaagtctggtaagagtagcatgatttctattgcatagagcggccccgtttggacagcacattttagaggaaccatacagaaattggaccaattttgcgtaaaagcatagtaggaattaggaaactttccaaagcag

SEQ ID NO: 41018 - DNA, 3586 bp, Zea Mays
gcctctgtcaacgcgatacagcagtaaacatgagtacaacgtgagctcagagccgtccatggcgtacgagggcacgtcggtaaaatctcaacgtcccgtcccgtgcctgcctgccatttcgattagttagaggagctgcgcctgcgtctgcctgcccccttgaactccccaagagccaagaaccagcgcagcagcgcgccccctccccgccccacaataaaacagccacacgctcgccacccatggccaccaccaccaccaccaccacagcacaggcccactgccaccgctaccgctaaccatggcctcctcagcgtccctgcagcggttcctcctgccctcctcgcacgcggcggcgacggcggcctcgccgtcctcccggctgcgccgcacagggcgcgcccgcgcggccgtctccgtgccgccgccggcggcggcgggggagcaggtcccgacggagcggctggagccgagggtcgaggagcgggcgggcgggtactgggtcctcaaggagaagtaccgggcggggctgaacccgcaggagaaggtgaagctggagaaggagcccatggcgctgttcatggagggcggcatccaggacctggccagggtccccatggagcagatcgacgccgccaagctcaccaaggacgacgtcgacgtccgcctcaagtggctcggcctcttccaccgccgcaagcaccagtgtacgtccactcccactctgcaacagggctagtttacttgcatgcagctcgtaatgcggccgagccgcttgccactcgttcggtctcgggcgactctgttcttcacttcttgatgcgctgtgacgtgctgtgtctgcggcagatgattgaacaggacagttgttctctctgagacataatgtctgccaatcgttgcttacggccggcttagagctcgcgtctgaatgttcgacgcttccgtctgatcgttttcgcgcgctcatgtttaccttttgggctggttctggaatctgcatcttggttttgtttccctttcagatctgattcacgctgcgtcaacgtgcttgcaaagtggtgaatatgctgcgtgggagggagccttgtaaagtagtcggacgcatgggatttcagtcccctaaaatcacaacctgtgctaatctcacccgcataacgacacaagatcccctgccgactgttaaaaacaacagtttaggacgtcatttcaaaaacaaaaacaaacgcgtagctgaacccaaaaaaagtctcagcttgaactcttggtaggcaatagaaaatttcctgttggcatcatggggttggcagcactagctagtactaaatagaagcatcccagctgccaaagttctgtgctgaatagaacgtctgttccaaataaaatacacctgaggagccaaaggtcaagcatcccagttgttcaaactgccactgttacactccacgcttgtgaattgttttcctttctttatccgtaatggactgctaatccaaacctgctacttgtagattcctcattcgtcatgcacttttttccttgataaactggtgaaatacaaaggttcgtttatattatagtagctttttatagacaacgaatatattatataccttacctttgtcacaaatacgatctttcctgcctttctgtgttatctcgaaccagcggcttcagtttcgttctttcttggaccacccgttggttggtcctacagaggagaggacaagacgtcccggattgggttcactccgagctgagcctgagaccgtgagacgaactggtcaagcaaggtgacaacactgttgttaactaacgagcaacgactaacgacacctccatccccatggctgtgctgcactgcagacgggcggttcatgatgcggctgaagctgcccaacggcgtgacgacgagcgagcagacgcggtacctggcgagcgtcatcgaggcgtacggcgccgacgggtgcgcggacgtgaccacccggcagaactggcagatccgcggggtgacgctcccggacgtcccggccatcctggacggcctccgcgccgtcggcctcaccagcctgcagagcggcatggacaacgtgcgcaaccccgtcggcaacccgctcgccggcgtcgacccccacgagatcgtcgacacgcgcccctacaccaaccttctctcctcctacgtcaccaacaactcccaggggaaccccacaatcaccaacctgtcagtctcagtctctctctctctcacactgcgttgagtgagccgttgacacggtgttaccaatctgacacgctgctgccggtaataacaggccgaggaaatggaacgtctgcgtcatcggctcgcatgacctgtacgagcacccgcacatcaacgacctcgcgtacatgccggccgtcaaggacggcgagttcggcttcaaccttctggtgggcgggttcatcagccccaagaggtgggccgaggcgttgccgctcgacgcctgggtcgccggggacgacgtcgtccccgtgtgcaaggccatcctcgaggcgtaccgggacctcggctccaggggcaaccggcagaagacgcgcatgatgtggctcatcgacgagctcgggatggaggtgttccggtcggaggtggagaagaggatgccgaacggggtgctggagcgcgccgcgccggaggacctcgtcgacaagcgctgggagcggcgggactacctcggcgtgcacccgcagaagcaggaaggcctgtcgtacgtgggcctccacgtgccggtgggccggctgcaggccgcggacatgttcgagctggcgcggctcgccgacgagtacggcaccggcgagctccggctcacggtggagcagaacatcgtgctccccaacgtcagcaacgagaggctcgacgcgctgctggcggagccgctgctgcaggagcagcggctctcgccgcggccgtcgatgctgctcagggggctggtggcgtgcacgggcaaccagttctgcgggcaggccatcatcgagaccaaggcgcgggcgctgcaggtggcgcgggaggtggagaagcgcgtggccgtgccgcggccggtccgcatgcactggaccggatgccccaacagctgcggccaggtgcaggtggcggacatcggcttcatgggctgcctcaccaaggacagcgacggcaagatcgtcgaggccgcggacatcttcgtgggcggccgcgtcggcagcgactcgcacctggccgacgtctaccggaagtccgtgccgtgcaaggacctggtgcccatcgtggccgacctcttggtggagcggttcggggccgtgccgagggagagggaggaggatgaggagtaggaccttcgtcaagcgccggctgggactgtcctgacctattttatgaggtcttgattggatgtatatatatattcatcttaatctatatggatttctgaagtttgatctaaagttcacaccagattactgcaacccacgtggattaaagtggatacgtagcattcaaacaagtcctcagcggtgagatgttgtttgctgtaaaaagtaagatgttgcctcttcgctggcacggcaagtgttg

SEQ ID NO: 41019 - DNA, 2931 bp, Zea Mays
gcctctgtcaacgcgatacagcagtaaacatgagtacaacgtgagctcagagccgtccatggcgtacgagggcacgtcggtaaaatctcaacgtcccgtcccgtgcctgcctgccatttcgattagttagaggagctgcgcctgcgtctgcctgcccccttgaactccccaagagccaagaaccagcgcagcagcgcgccccctccccgccccacaataaaacagccacacgctcgccacccatggccaccaccaccaccaccaccacagcacaggcccactgccaccgctaccgctaaccatggcctcctcagcgtccctgcagcggttcctcctgccctcctcgcacgcggcggcgacggcggcctcgccgtcctcccggctgcgccgcacagggcgcgcccgcgcggccgtctccgtgccgccgccggcggcggcgggggagcaggtcccgacggagcggctggagccgagggtcgaggagcgggcgggcgggtactgggtcctcaaggagaagtaccgggcggggctgaacccgcaggagaaggtgaagctggagaaggagcccatggcgctgttcatggagggcggcatccaggacctggccagggtccccatggagcagatcgacgccgccaagctcaccaaggacgacgtcgacgtccgcctcaagtggctcggcctcttccaccgccgcaagcaccagtgtacgtccactcccactctgcaacagggctagtttacttgcatgcagctcgtaatgcggccgagccgcttgccactcgttcggtctcgggcgactctgttcttcacttcttgatgcgctgtgacgtgctgtgtctgcggcagatgattgaacaggacagttgttctctctgagacataatgtctgccaatcgttgcttacggccggcttagagctcgcgtctgaatgttcgacgcttccgtctgatcgttttcgcgcgctcatgtttaccttttgggctggttctggaatctgcatcttggttttgtttccctttcagatctgattcacgctgcgtcaacgtgcttgcaaagtgattcctcattcgtcatgcacttttttccttgataaactggtgaaatacaaagtttcgttctttcttggaccacccgttggttggtcctacagaggagaggacaagacgtcccggattgggttcactccgagctgagcctgagaccgtgagacgaactggtcaagcaaggtgacaacactgttgttaactaacgagcaacgactaacgacacctccatccccatggctgtgctgcactgcagacgggcggttcatgatgcggctgaagctgcccaacggcgtgacgacgagcgagcagacgcggtacctggcgagcgtcatcgaggcgtacggcgccgacgggtgcgcggacgtgaccacccggcagaactggcagatccgcggggtgacgctcccggacgtcccggccatcctggacggcctccgcgccgtcggcctcaccagcctgcagagcggcatggacaacgtgcgcaaccccgtcggcaacccgctcgccggcgtcgacccccacgagatcgtcgacacgcgcccctacaccaaccttctctcctcctacgtcaccaacaactcccaggggaaccccacaatcaccaacctgccgaggaaatggaacgtctgcgtcatcggctcgcatgacctgtacgagcacccgcacatcaacgacctcgcgtacatgccggccgtcaaggacggcgagttcggcttcaaccttctggtgggcgggttcatcagccccaagaggtgggccgaggcgttgccgctcgacgcctgggtcgccggggacgacgtcgtccccgtgtgcaaggccatcctcgaggcgtaccgggacctcggctccaggggcaaccggcagaagacgcgcatgatgtggctcatcgacgagctcgggatggaggtgttccggtcggaggtggagaagaggatgccgaacggggtgctggagcgcgccgcgccggaggacctcgtcgacaagcgctgggagcggcgggactacctcggcgtgcacccgcagaagcaggaaggcctgtcgtacgtgggcctccacgtgccggtgggccggctgcaggccgcggacatgttcgagctggcgcggctcgccgacgagtacggcaccggcgagctccggctcacggtggagcagaacatcgtgctccccaacgtcagcaacgagaggctcgacgcgctgctggcggagccgctgctgcaggagcagcggctctcgccgcggccgtcgatgctgctcagggggctggtggcgtgcacgggcaaccagttctgcgggcaggccatcatcgagaccaaggcgcgggcgctgcaggtggcgcgggaggtggagaagcgcgtggccgtgccgcggccggtccgcatgcactggaccggatgccccaacagctgcggccaggtgcaggtggcggacatcggcttcatgggctgcctcaccaaggacagcgacggcaagatcgtcgaggccgcggacatcttcgtgggcggccgcgtcggcagcgactcgcacctggccgacgtctaccggaagtccgtgccgtgcaaggacctggtgcccatcgtggccgacctcttggtggagcggttcggggccgtgccgagggagagggaggaggatgaggagtaggaccttcgtcaagcgccggctgggactgtcctgacctattttatgaggtcttgattggatgtatatatatattcatcttaatctatatggatttctgaagtttgatctaaagttcacaccagattactgcaacccacgtggattaaagtggatacgtagcattcaaacaagtcctcagcggtgagatgttgtttgctgtaaaaagtaagatgttgcctcttcgctggcacggcaagtgttg

SEQ ID NO: 41020 - DNA, 2153 bp, Zea Mays
cacgtcggcgtcactccctctctctccttccatttcaagccccccgccccgcccgtagcttcttccaccaggttgacctgctccaagcggaggagagagagagagaagccggcacaagcaagccgtcgccacacggatcaaaaatcgaaacgagagctagcttttaattgacaccagagaggcagcagtccgagcggatcgagctagcagctagcaggccgcgcgcggcggagttgcgggagggagatggacgtgaagcggtcgcggagccctcgggctccgcccgacgacgacaggaagcgtgccggcggcggcggcgggtggcgcggctccggcggcgtccgcccggagatggtgctcgtcggcttcctcctcacgctacccctcctcttcctcgtcttcggcggccgctggggcagcggctccttcccttcgtcgtcgtcgtcgtccgctacctcctctccgcccgtcgtccccaagcctaccgcccgccgcgtggacggcggcggcggcgaccgcggcgcgacgcctcgtcagggccaaaaacctgttggtctgaacaacgtctctgtatcgacggcaacatcagtgtcccaggataagcttctaggcggattgctgtccgcggcattcgacgaatcctcctgccagagccgctacaaatcgaacctgtaccggaagccatccccgttcccgctgtccccctacctggtgcagaagctgaggaagtacgaggcgaggcacaagaagtgcggcccgaggacgaagcggtaccggcgggccgtcaagcttctcaaggccgggcgcaacacggacgactcggagtgcaagagggcctcttctgcgagccgttcccggtcagctcgtgggtgctcccgggcagcttcccgcagaacaatccccacaagctccacatcggcgcgccggagagctacgcgaacatgctcaagaacaacatcgtccgcaacgacgacggccccggcgcgccggcgtcgtcgtcgctgcctccgtacgtctacctccacctggagcagttccagctgaagctgtccgacaacgtcttctgcgacgaggaccaggtcacgctcagcaagttcaactggatgctgctcaagtccgacagctacttcgccccggcgctgttcctgacgcccatgttcgaggccgagctggccaagatgttcccgcggagggaggccgtgttccaccacctgggacggtacctcttccacccgaccaaccgagtctgggggatcgtcaggaggtactacgaggcgtaccttgccagggtcgacgagaagatcgggttccagatccggatcttcccggagaagccgatcaagttcgagaacatgtacgagcagctgatgcggtgcgtcagggagcagcggctgctgccggagctcggccccgccgagccgccgacgaacgcgacggccgacgctggcgacgggaaggtgaaggcggtgctgatcgcgtcgctctactcggggtactacgagaagatccgcggcatgtactacgagagccccaccaagagtggggagatcgtggcggtgttccagcccagccacgaggagcagcagcagtacacgtccaacgaccacaaccagaaggcgctggccgagatctacctgctcagctactgcgacaagatcacgatgagcgcctggtccaccttcggctacgtcgcgtacagcttcgccggcgtgaagccgtggatcctgatccggccggactggaacagggagacctccgacgtcgcgtgcgtccggtccacgtccgtggagccgtgcctgcactcgccgccgatcctcgggtgcagggccaagacggacgtcgacgtcgccgctgtcaagccgtacgtccggcactgcgaggacgtcggcttcggcctcaagttgttcgatagctaactctctcagtggacgtacagctcgacgatccaactcttttctgaactgcgtgtctggcctgtggtctgtggagttaggcatttcgagattcgttgtattcgtttaagcggtaccttgtagtcgtgtacaggtgcgaattaagttaagttacaaaaatgttttgagtactgtttcaaattcgttcttcagaaaacaaatcgcatatatacagtatatagactgctataaatgtttcct

SEQ ID NO: 41021 - DNA, 1775 bp, Zea Mays
cgcaagagcaagtgacgactagaccgactaatccgactccctagctcccacactaccaccatcccaccatctttaaaaagcccccaccactacatcctgcgctgcaaacgcctcgcctctcctcgcctctgttcagctcacggtggaagaggaggcgacaggccgacagcacacgagagggagctagcactagcagaagcgcgcgaaggagctcaagcagccacacgccgaccagcaccaccgcgcgatggcgtgcatcaacatgtacaacccagacggcgcggcggggttcggcggcggcccgcagcagccggccgcgctgggcccgcgcatctccttctccagcgacttcgccgtggagccgacgccggtgcagaaccgggcgacgagcctgcggtgccaggaggaggacctcaacttcgagttctccgtgggcagccaccccatgatggccgccgaccagctcttctccaagggcaggatccttcccctcaaggacaacggcggcggcagtgtctgcttcgctgccgcgcggccgcccaccacgctgcgcgacgagctccgtggcggcggcgacgacgacgacgagagggcggccttctccgccgccggcaccaaggggtccaactccaaccggtggaaggagatgctcggcctgcggaaggcgctctgcgtcggcgtcggcggcggcggcaacggcagtccggccaagaaggctagcagcagcgacaagcagggcgtcgttgccgccgctgcccccggccccgacgaccacatggccgcgtccaatcaggagcagctatcatgatgaggcgaccgtaccgacgggagactgggactgggagagagagacgacgagacagccatgggatgggagcactccacatgcgtgaacaagctttaaaattttgtcatccctccttccgatcatccttcctgatgctgttgatcgatcaaccacttgaatcatgcttgtcatcatcggtccatgcctccatggtctagtaggttctgtaaattgttgtgagtttgcttgtgtgctagctagctaggtggcccggcccggccgttgaaaagtgccaaaaaaaaaatacatgtgtattttccctgcatgcatactcgatctaagtgctctgatgatcttctctctagcaagctgtccagtccactcactagcagcagatccatggccagtcgtctttgcttcttttctttgtttcgttcgcctgttagttcttggctttctcctccgctcctccaccctgtacaaagtggctgctgcgtacgtactcgtagatgggaaattcatggtgcaatgattagatttgccaggtggccagatctgtcatctgtgaggtgaggaggctctcgtttaccagcgatggagcctctctgaccgcccctgtggtgggatcaacagtgctcttgtttgtctcattgctccgctggatgactataaattttataatttcataatagagagagagacaacagtcatcagagcgagcatgtgtgaggcgacagcgagagccaatggaggaaggaaggcatggctccccgcgtcccccaaccgttatagatgcgcaagtaggccgtgctaagtaggtcggtattaagggcctgtttggcatggctccagagcaaaactccaaggaggagctggccagagcatgtcaaacaccctaactccagagttgtaaactctatggagtttttggagctgcagtacaattttttggagtacctcttttgctgctctgaaaactccaaaaaag

SEQ ID NO: 41022 - DNA, 1348 bp, Zea Mays
cagaccagaaactcccaccactgcggcgaacgtgcgtagcctgcgcattggtctggtcgtcggcgtcggtcgaatcgcggggtgcggggtcctgcgagatcgaatcggggagcttccgtatcgaagtcggaggccgcggggcacaatgccgggatggcggaggcggcgccatggcgaggggcatagcgcgggcgtcgtcgttcgggggccgcgccaccaccccgtggtgctcctgcaggcacgtcaccgtggatgtctgcctcggcaaactcgtcgccgctctgctcgtgctccgctccctcaccgcccccgccccccgcttccttcgcgcccacctttcccaaccgtaaaagaagctgcggaagaaattcgcacggcagaagcgacgggaggaactgcggttggtgccgcagcagaaggtttcttatgatattgtacggaagttgctggacttgggagataacagcagcctcgcgtagcagagaggaccgcaggagtggtggaactatggcgtgttgagaagttaaaaggcatcaaagttgcatctacttggaatcaatcaaatttggacctatctagtgaggaaatcagaattttcaaacgagccaaggcatatgcttctggaggccattggcctttggataccaggggaagtcacacgtactgtactgtctgtacatgatgataaacgtgaaaatgaaccagaagaagaagagatagtagcaggtccacccttgtcccgacaatgtaatgctgagctccatacagattatgatggtgccgctgttagatgggattaacgcaccacaaagaatatgttgctgattgttgtcaagcttgtcttgatcaagctacgaacgccaagccaggggaattgaagtgcaatatatgggtttattgcccatcggaatttggatgcttctgacaagacaaatatgagcataaacatcaggagtgctggttgaaacaggctgaccaccccaaactgaacttcaaagacaagttaagtattcagagccttacaagatgctcgtcccaatgcacctgttgtcgtgccgtggatgtctggtgtcacctgtgcttgcactacctcttaccaaacgaacagcatcgagactcaggaattaattagactagtgctgtgctgatccaaccagttccaccgtacatattttttcttttcattttgggaatatactcttttctttttcttcgtttggccccggtatatacgatgtaaaagtaaaacttagcttagtcaacctggcaattggatttggtgggtggtggttgattgaatccagtgattcacctattggcgaccttaattttcctctgattaatactg

SEQ ID NO: 41023 - DNA, 1975 bp, Zea Mays
cagaccagaaactcccaccactgcggcgaacgtgcgtagcctgcgcattggtctggtcgtcggcgtcggtcgaatcgcggggtgcggggtcctgcgagatcgaatcggggagcttccgtatcgaagtcggaggccgcggggcacaatgccgggatggcggaggcggcgccatggcgaggggcatagcgcgggcgtcgtcgttcgggggccgcgccaccaccccgtggtgctcctgcaggcacgtcaccgtggatgtctgcctcggcaaactcgtcgccgctctgctcgtgctccgctccctcaccgcccccgccccccgcttccttcgcgcccacctttcccaaccattagttcctagctagtccactgaaataattcaaaggtaaaagaagctgcggaagaaattcgcacggcagaagcgacgggaggaactgcggttggtgccgcagcagaaggtttcttatgatattgtacggaagttgctggacttgggagataacagcagcctcgcgtagcagagaggtactctgtgtaaggtcgctgttttatgtgcaatgagttcgtgccattttttttataccacccatgcataacttggccctgtattttatcttatctcattgttcgtcgcccacctggcatgcatttgtgcaaagggcctatttttggcacatccagtgttgacctgaagagaagtgtttttaaatttcttgttgcttatcagttcaagttgcacttatgagctatgacccatgttaaatgctcttgcctgagtggttctttgagcataatggaattatgaattaatctgtaaagcaaaaacgattagataggaggccctgccccaatgagctaatggtcttagtcatttggcacaagcgttccttcagtctttgcttaatttgtttccagtattttctccgccattttcgaaatttactcttaacatgaaccttctggttttgtgctatgcatgcttctttcttgcttttgcagcatgccagatctagattgatttagagcattgatttatgaccaaaacacagccttccagtattatagagaggttgaagtatgtatctctcttttactatatatatgggcatatggcaggaccgcaggagtggtggaactatggcgtgttgagaagttaaaaggcatcaaagttgcatctacttggaatcaatcaaatttggacctatctagtgaggaaatcagaattttcaaacgagccaaggcatatgcttctggaggccattggcctttggataccaggggaagtcacacgtactgtactgtctgtacatgatgataaacgtgaaaatgaaccagaagaagaagagatagtagcaggtccacccttgtcccgacaatgtaatgctgagctccatacagattatgatggtgccgctgttagatgggattaacgcaccacaaagaatatgttgctgattgttgtcaagcttgtcttgatcaagctacgaacgccaagccaggggaattgaagtgcaatatatgggtttattgcccatcggaatttggatgcttctgacaagacaaatatgagcataaacatcaggagtgctggttgaaacaggctgaccaccccaaactgaacttcaaagacaagttaagtattcagagccttacaagatgctcgtcccaatgcacctgttgtcgtgccgtggatgtctggtgtcacctgtgcttgcactacctcttaccaaacgaacagcatcgagactcaggaattaattagactagtgctgtgctgatccaaccagttccaccgtacatattttttcttttcattttgggaatatactcttttctttttcttcgtttggccccggtatatacgatgtaaaagtaaaacttagcttagtcaacctggcaattggatttggtgggtggtggttgattgaatccagtgattcacctattggcgaccttaattttcctctgattaatactg

SEQ ID NO: 41024 - DNA, 1384 bp, Zea Mays
cagaccagaaactcccaccactgcggcgaacgtgcgtagcctgcgcattggtctggtcgtcggcgtcggtcgaatcgcggggtgcggggtcctgcgagatcgaatcggggagcttccgtatcgaagtcggaggccgcggggcacaatgccgggatggcggaggcggcgccatggcgaggggcatagcgcgggcgtcgtcgttcgggggccgcgccaccaccccgtggtgctcctgcaggcacgtcaccgtggatgtctgcctcggcaaactcgtcgccgctctgctcgtgctccgctccctcaccgcccccgccccccgcttccttcgcgcccacctttcccaaccattagttcctagctagtccactgaaataattcaaaggtaaaagaagctgcggaagaaattcgcacggcagaagcgacgggaggaactgcggttggtgccgcagcagaaggtttcttatgatattgtacggaagttgctggacttgggagataacagcagcctcgcgtagcagagaggaccgcaggagtggtggaactatggcgtgttgagaagttaaaaggcatcaaagttgcatctacttggaatcaatcaaatttggacctatctagtgaggaaatcagaattttcaaacgagccaaggcatatgcttctggaggccattggcctttggataccaggggaagtcacacgtactgtactgtctgtacatgatgataaacgtgaaaatgaaccagaagaagaagagatagtagcaggtccacccttgtcccgacaatgtaatgctgagctccatacagattatgatggtgccgctgttagatgggattaacgcaccacaaagaatatgttgctgattgttgtcaagcttgtcttgatcaagctacgaacgccaagccaggggaattgaagtgcaatatatgggtttattgcccatcggaatttggatgcttctgacaagacaaatatgagcataaacatcaggagtgctggttgaaacaggctgaccaccccaaactgaacttcaaagacaagttaagtattcagagccttacaagatgctcgtcccaatgcacctgttgtcgtgccgtggatgtctggtgtcacctgtgcttgcactacctcttaccaaacgaacagcatcgagactcaggaattaattagactagtgctgtgctgatccaaccagttccaccgtacatattttttcttttcattttgggaatatactcttttctttttcttcgtttggccccggtatatacgatgtaaaagtaaaacttagcttagtcaacctggcaattggatttggtgggtggtggttgattgaatccagtgattcacctattggcgaccttaattttcctctgattaatactg

SEQ ID NO: 41025 - DNA, 1054 bp, Zea Mays
cccgctctctctgctctcctctttctgtggacacctggacgccggcctggttgggttttgaggtatctctgtgagccgcgaaacggaggatgagggtgctggtggctcgctggcgctgtactccactgcggaggactgggcagtttgtgcgacatccaacggctcccccgcctggcaggctgcgcggtgggcgcctgggccctgtgctttttgggggccgagccgattcttcgtgcatgcctttggtgcttggacggcaggtggtgctttcgcttttgcttctctcctgttccggggcccgtcatgtcctgtgtgattttgcatttttgtggtttcctccaaagtgaaagaggaacgcctctccacttcttttatccttttttttctttcgtcggtgcttgttggttgtagcatccatagttactttttttttttttgccctccactttgaagccactgttcttctcatcgcctgcgcgcgagaaacttcgtctcccacctacctttcccgggcacctgattcccccactgagatgcacctttcttttatgtcctttcctgagaaatgcacctggtaatttctcacaagacacaccacacataaggcctagtggctcctttttttgtgtgttgtttatcgcacttaggctgctgtcgagcattgagaaatttattaggtattgtccgggatgacttttttgtttcgtcctggcctcgttttatagccctttattgttatagccttttatttgcaacaattcctggagccaacatagaaataatgtgatgccttgtttttaacaggagcatcaaattctaaaaattgttgtaacttttaaattgttatttgctaatgcttcaccaggctgtattaggttcaccaactgtagttaaaaattaagttttagaatggtactgcatggtgtcatctttgtacatcctaggtaatataatgccatgacgtcgtgtaaatagccgtgcaaagtactgttttgtattatagattgcactgtttgtataataaagttttaaaataggaagtgaaatatagaat

SEQ ID NO: 41026 - DNA, 1970 bp, Zea Mays
gttgtgtgaccgaacgaacgcccagggcccagggagcagcgccagcaagcacccgtcgcgttcaatgatggctagctagctaccgctaccgctgctctggtggtccgcgcgctgccatggctgctggtggtgttatcgtcgtgctagtgctacaccacagcgcctatatagagccacaccgccaccgggagcgggagccctgctgacctgcctgtgcctcgcacgacaaggcacggcaccaacagaacggagcgtgcgagcgtgcgtgcatgccctccaggccacttggcatcgcggtgtgcacccgtgggagagcgacggcgaccccgaccgactttcccgaggccgtacgtggctggtccaagactccaaccaagtccaaaggatgatgcccctgccatgccgctacctcgagtggaaggaagggaagtgtggaacgaccgatgcatccatccaccaaagctctcgcacccacccacacccacccatcgacgacctcctgtcggggttccgaactgaacacaggcgggcgggtccatgcagggcgccgatccagcggatagcgacgctgcctcgagccgatccaacggccccaagaccgccagcgagtagtcctcatctccgcaccgcagtggcgtgcccatcccgaattgcgcgggccggcagagctgcaactgcaactccccccctcgtctgcctgtcccgacgccgacgccgacgccattttctccgcttcgcctgctcagcggcgccagccacccgtcgcacgcgagagcttcggaagcgcgtgcgctgctggatcggctgcgacacggctgccactggcattggcgttgcgctgctgcttttatttatatacacaaaggggaatttaagcgcagcgcagcgcggttggtcaatactatacgatcaagggaagcgtaccgacgatcagacgactaattgctgcaaataaattactgactaatcgtggcctgagcaggagatgatggccactcgcgctgcacgatttcgtcaataaacaacagcggaagtactgccaaatggaaaagctagtggaaacaccgaaagctctacctttgccgcctacgcatttcctactgtcgccgggaggaagaagaaaaaaaaaaacctgcgcagaatcaatcgtcgagaattcggaattcacaagggccaagaagaagaatctgcgtacgccctagcaagtgctacgtgcaaaaccattcatgcatcttcttaactggccaaaaaaaaaagccatgtgctgcaactcccaactccaagcaaacatggcaccgtggaggacaaataatgcgagtggaggtggaaatggtctcacctttttttttttttgccctccactttgaagccactgttcttctcatcgcctgcgcgcgagaaacttcgtctcccacctacctttcccgggcacctgattcccccactgagatgcacctttcttttatgtcctttcctgagaaatgcacctggtaatttctcacaagacacaccacacataaggcctagtggctcctttttttgtgtgttgtttatcgcacttaggctgctgtcgagcattgagaaatttattaggtattgtccgggatgacttttttgtttcgtcctggcctcgttttatagccctttattgttatagccttttatttgcaacaattcctggagccaacatagaaataatgtgatgccttgtttttaacaggagcatcaaattctaaaaattgttgtaacttttaaattgttatttgctaatgcttcaccaggctgtattaggttcaccaactgtagttaaaaattaagttttagaatggtactgcatggtgtcatctttgtacatcctaggtaatataatgccatgacgtcgtgtaaatagccgtgcaaagtactgttttgtattatagattgcactgtttgtataataaagttttaaaataggaagtgaaatatagaat

SEQ ID NO: 41027 - DNA, 267 bp, Zea Mays
caacagcggaagtactgccaaatggaaaagctagtggaaacaccgaaagctctacctttgccgcctacgcatttcctactgtcgccgggaggaagaagaaaaaaaaaaacctgcgcagaatcaatcgtcgagaattcggaattcacaagggccaagaagaagaatctgcgtacgccctagcaagtgctacgtgcaaaaccattcatgcatcttcttaactggccaaaaaaaaaagccatgtgctgcaactcccaactccaagcaaac

SEQ ID NO: 41028 - DNA, 1963 bp, Zea Mays
ccgcactgcagtggcctagccggcgtcgtcctccccctctctcgctcctctgtcctcccctctccacttgagaagaacacaattaggaaaaaaaggcaaaaaacatttaccttttttctatctgtatattatctgaataaatcaagaggaggaagaggggagggagcgagggagggggaggagtagcaaatccagactccatagcaaccagctcgcgagaaggggaaaagggggaggaagagcttcgcttgtgtattgattgctcgctgctccagtccctgcattcgtgccgtttttggcaagtaggtggcgtggcaagcatggtgccgggctatgactgcgccgcctccgtgctgctgtgcgcggaggacaacgctgctattctcggcctggacgacgatggggaggagtcctcctgggcggccgccgctacgccgccacgtgacaccgtcgccgccgccgccgccgccgccaccggggtcgccgtcgatgggattttgacggagttccccttgctctcggatgactgcgttgcgacgctcgtggagaaggaggtggagcacatgcccgcggaggggtacctccagaagctgcagcgacggcatggggacctggatttggccgccgtcaggaaggacgccatcgattggatttggaaggtcattgagcattacaatttcgcaccgttgactgccgttttgtctgtgaactacctcgatagattcctctccacgtatgagttccctagcttggatgactcagctcttggcagtggcttgcttgtctttggcttcgaaaatcgaagagacttttgtgccactccccttggatttgcaggtagcggaggcaaagtttgtttttgagggaaggaccataaaaaggatggagcttctggtgctaagcaccttaaagtggaggatgcatgctgttactgcttgctcatttgttgaatactttcttcataaattgagtgatcatggtgcaccctccttgcttgcacgctctcgctcttcggaccttgtcttgagcaccgctaaaggtgctgaattcgtggtattcagaccctccgagattgctgccagtgttgcacttgctgctatcggcgaatgcaggagttctgtaattgagagagctgctagtagctgcaaatatttggacaaggagagggttttaagatgccatgaaatgattcaagagaagattactgcgggaagcattgtcctaaagtctgctggatcatcaatctcctctgtgccacaaagcccaataggtgtcctggacgctgcagcctgtctgagtcaacaaagcgatgacgctactgtcgggtctcctgcagtatgttaccatagttcttccacaagcaagaggagaaggatcactagacgtctactctaattgtggtacgcttcaggtgtgctcctcaccgctctaggagtttttgattggttcaaacatcttaaatttagtttggccgctggaggattatggtttagtcaagtagttgctgaatggaacaacaaaacacgcacactacttggtccataaagacaagaaaataactggcagcgtcccgcgagccagcgctgcaatccagttcatgcaagaccctagagtccagggggggtgctggtgtaggtagagagggaacaaggcattcacatacgccgtagagatgagagagcctctcgtatgttttgtacttttgctccttcagtttgcaatgaactatataaacaaggattgccttggggcagtgaacatttgtcggatgaaaagaatcaaaaaggatgggggtcggcagaggaatagaacaatttgatatatttccataaactacagatatgtttcctttttcataatgatgagctatcatttttgttgatggtaacatggtatttggcgtcccgttttgtttgcatcaggccattggttgattgcttccaatgtaccttcattgattatc

SEQ ID NO: 41029 - DNA, 1862 bp, Zea Mays
ccgcactgcagtggcctagccggcgtcgtcctccccctctctcgctcctctgtcctcccctctccacttgagaagaacacaattaggaaaaaaaggcaaaaaacatttaccttttttctatctgtatattatctgaataaatcaagaggaggaagaggggagggagcgagggagggggaggagtagcaaatccagactccatagcaaccagctcgcgagaaggggaaaagggggaggaagagcttcgcttgtgtattgattgctcgctgctccagtccctgcattcgtgccgtttttggcaagtaggtggcgtggcaagcatggtgccgggctatgactgcgccgcctccgtgctgctgtgcgcggaggacaacgctgctattctcggcctggacgacgatggggaggagtcctcctgggcggccgccgctacgccgccacgtgacaccgtcgccgccgccgccgccgccgccaccggggtcgccgtcgatgggattttgacggagttccccttgctctcggatgactgcgttgcgacgctcgtggagaaggaggtggagcacatgcccgcggaggggtacctccagaagctgcagcgacggcatggggacctggatttggccgccgtcaggaaggacgccatcgattggatttggaaggaaggcagagcttggatgactcagctcttggcagtggcttgcttgtctttggcttcgaaaatcgaagagacttttgtgccactccccttggatttgcaggtagcggaggcaaagtttgtttttgagggaaggaccataaaaaggatggagcttctggtgctaagcaccttaaagtggaggatgcatgctgttactgcttgctcatttgttgaatactttcttcataaattgagtgatcatggtgcaccctccttgcttgcacgctctcgctcttcggaccttgtcttgagcaccgctaaagaccctccgagattgctgccagtgttgcacttgctgctatcggcgaatgcaggagttctgtaattgagagagctgctagtagctgcaaatatttggacaaggagagggttttaagatgccatgaaatgattcaagagaagattactgcgggaagcattgtcctaaagtctgctggatcatcaatctcctctgtgccacaaagcccaataggtgtcctggacgctgcagcctgtctgagtcaacaaagcgatgacgctactgtcgggtctcctgcagtatgttaccatagttcttccacaagcaagaggagaaggatcactagacgtctactctaattgtggtacgcttcaggtgtgctcctcaccgctctaggagtttttgattggttcaaacatcttaaatttagtttggccgctggaggattatggtttagtcaagtagttgctgaatggaacaacaaaacacgcacactacttggtccataaagacaagaaaataactggcagcgtcccgcgagccagcgctgcaatccagttcatgcaagaccctagagtccagggggggtgctggtgtaggtagagagggaacaaggcattcacatacgccgtagagatgagagagcctctcgtatgttttgtacttttgctccttcagtttgcaatgaactatataaacaaggattgccttggggcagtgaacatttgtcggatgaaaagaatcaaaaaggatgggggtcggcagaggaatagaacaatttgatatatttccataaactacagatatgtttcctttttcataatgatgagctatcatttttgttgatggtaacatggtatttggcgtcccgttttgtttgcatcaggccattggttgattgcttccaatgtaccttcattgattatc

SEQ ID NO: 41030 - DNA, 833 bp, Zea Mays
tactaaaccatatggcacttatcattggatggagagggttttaagatgccatgaaatgattcaagagaagattactgcgggaagcattgtcctaaagtctgctggatcatcaatctcctctgtgccacaaagcccaataggtgtcctggacgctgcagcctgtctgagtcaacaaagcgatgacgctactgtcgggtctcctgcagtatgttaccatagttcttccacaagcaagaggagaaggatcactagacgtctactctaattgtggtacgcttcaggtgtgctcctcaccgctctaggagtttttgattggttcaaacatcttaaatttagtttggccgctggaggattatggtttagtcaagtagttgctgaatggaacaacaaaacacgcacactacttggtccataaagacaagaaaataactggcagcgtcccgcgagccagcgctgcaatccagttcatgcaagaccctagagtccagggggggtgctggtgtaggtagagagggaacaaggcattcacatacgccgtagagatgagagagcctctcgtatgttttgtacttttgctccttcagtttgcaatgaactatataaacaaggattgccttggggcagtgaacatttgtcggatgaaaagaatcaaaaaggatgggggtcggcagaggaatagaacaatttgatatatttccataaactacagatatgtttcctttttcataatgatgagctatcatttttgttgatggtaacatggtatttggcgtcccgttttgtttgcatcaggccattggttgattgcttccaatgtaccttcattgattatc

SEQ ID NO: 41031 - DNA, 732 bp, Zea Mays
cttcgctcgtcttcctccacggagcggcatatcggtgcgtcaccagctcctcacgtcccggctcaccatcggcggctacggggacgtgacacaaatttagatgttggagaagttttactctgtatccaaagctagaggaaatgggagagtacacaacctgtgttggtttgacttacagtcagggctgcatatggttcaaagagcggaggagaaaagagaggagggagatgggagccattggtccttagatggaaaggcaatttagtgcactgtaggggatgaaagtaaagttatatcacaagttctgttccccaagaattatatcctgagcaaaattttccgcaaggatgttccacctctgatagtgaatttgaccccctcccccaaaatgcacatggttgtaacagagacactacatgacatcattcctagaaccaaagaactatgaagaagagaaagatcactgagtctactagccagagatctgaagtgtatgtggatacagatcaatgtgagctgcaattttgtgaacgtgtaaagctggcaacaggaacagccgaacaggaccacgtcaatggaagtgggagcagccgccgccggcaagctgaatgcggagctgtttcagtggttggcgttcggccgcgtgatcccgttcagggcatgttcggtttgaaggggtttgagggggattggaggggattaaatcccctcctatttaaatttgtatagaag

SEQ ID NO: 41032 - DNA, 848 bp, Zea Mays
cttcgctcgtcttcctccacggagcggcatatcggtgcgtcaccagctcctcacgtcccggctcaccatcggcggctacggggacgtgacacaaatttagatgttggagaagttttactctgatgtacagtatccaaagctagaggaaatgggagagtacacaacctgtgttggtttgacttacagtcagggctgcatatggttcaaagagcggaggagaaaagagaggagggagatgggagccattggtccttagatggaaaggcaatttagtgcactgtaggggatgaaagtaaagttatatcacaagttctgttccccaagaattatatcctgagcaaaattttccgcaaggatgttccacctctgatagtgaatttgaccccctcccccaaaatgcacatggttgtaacagagacactacatgacatcattcctagaaccaaagaactatgaagaagagaaaggatatgctattccttattcagaatgatttttttggtttctttgcattaccatacccgtgtttgcaagtatttttggtcatcacaaatgcaagttcttaccagtgaaagatcactgagtctactagccagagatctgaagtgtatgtggatacagatcaatgtgagctgcaattttgtgaacgtgtaaagctggcaacaggaacagccgaacaggaccacgtcaatggaagtgggagcagccgccgccggcaagctgaatgcggagctgtttcagtggttggcgttcggccgcgtgatcccgttcagggcatgttcggtttgaaggggtttgagggggattggaggggattaaatcccctcctatttaaatttgtatagaag

SEQ ID NO: 41033 - DNA, 2912 bp, Zea Mays
ctctggctggccgtgatggcgagcaggccgacgcggatggccctgtctccgcctccatggtggatcgggaactgcggttcgacgagttgaccttcaacgacgaatcggcaccgcatcacctcacgcccatccacgaggccctcttctccgacggcgctgaccccttcttcggcgaggagctcgacatcctcaccacctccgagttcgacatcgagcagtcgtctgtggacacccgatctctgcgcacgccgccctccgcaggagagttcgagcgcgtcgaggacatgccggggttgcgacacctagtcgtgctcagcgaccgcgctgtcgccgatgtttttgtcgcgtactccacgctcaaagtgtttgatcaaatgcccaacccaggtttcgatggaggtcctatctttgacgaggaacctgtcttcgagggagagccgtttccctccaccactgactacatcgacgcgctgcgcaacgagatgaacgagttcaagagcaagcgcgacgacgtcaagcgcatggtcgacgccgccgagcgccagggcatggaggtcaccagccaggtcaggtgcgccctgctcgaggacgccgccgcgcggatcgtcgacgagtaccaggtgaaggcagacttccacaaggtcgctgacgagattgtccagatccgcttcgaggagatgccgagcgcgccggtccgcagcaagggcgcgctgctcagcgagctccacacctgcgtctgtgatgacgacttgggcgccgtcggcatctacggcattgcgagggtcggcaaaatcgcgtccctcaaggtcgcagccgagggaggcaatgcgttcgagtccggcctgatcgtcaagaccaacaggggcatactgtacgtcgacgaggtcaacctgctggacgaccacctcgtcgatgtgctgctggattccgctgcgccggcatggaacacagtggagaggaagggtatcttcatatcccacactgttcgctttatcctcattccattgtagatttttcccgtctgtggtatgatacgtccaatgccctggccgagtttcacatcaagcgttaattaccgtatgaatttggatgctcgttttgtttggaaaccaccatggtcacttcaatggttcactagagcttctatcactttgcatgagttacttatatggttgcgtatttcaacaattagtgttaacaatttattggcacaaactggattggcagcaacgagagctttggtgtgtgtccgtgcatgtcgagggcagctcctattttactacaaccacatatattgggtcacagtaattgtgtatgacggttggatgatcacatggccatctttcacatggaggttgcatgatgcattgtatgaaatttcagatggagataggatcagtggtacggctctaaacttctgctcagataacttgtcatatgatgttggtgccgtctctgaacaaacacaacgtggtttcttgtcagtaaggtttgatgtgttacaggataaatacagaatggttgattgtccatttatgttcaccaggtctaatgttcagagcgttgtgcaggataaaggtttgttgtcttttttctgggatagcctcatttattatggcaagaagtttttggatatcagattggtctggtcacacatatgcatcaagcaaccgagggcggactggttgtggctgcaatctattttttattacatattccactctgctcacttcattctcatctgctctggtactcacaatccggaagagcttttccgtgagatgttcagtcagggaacagatgacgtgtctgaagttgtgcccgaacctatagagcagcccctggtggtgttgtcatcttcagcatggtctggcactgcgacagctaccacatggcatttacaagatcaaattcagcatcaagatattctggtactcattgattctggatcctctcacacttttctcattaattctggactgaagcagctattcatgtctgtatactactcggcctggtcagggacaacttgtcatcagaccctgaaacttaaagggagaatacaggagaagtctctgaatatcttactggacagtggtagtacacacacatttgtcaatgacaaattaattccattgctctctggggttcggtccatctcttatcctacgaaagttcaagtggccaatggccccattgtttcaggtcgatatcagtggttgcaggcccactggcagattcaggaatacgagtttgtgtctgatctactctttttaccacttcccagttctgatatggcggtagacatggattgggctcagaaatggttggctattctctacaaaggctcaagcataatcttatatggtcagtcccagacaataccgagtggcacaattgtggagttatggtcgttggactcggaggcccagcagtcttcccagccatctcatcatccacaaactcagtcgttgctgttacagtttgcttctgtgtcacggactccttttgaggatatggcaaatgagtcgacaacatggaaggaaatcaagatcgtctcttctcctacaagcaggaagcaaccggtacacgagatcaacatgagcagcacgaagaaacaaggacctggttcgggtgaaagaagcagagaagggatgagtgcttcaaaagcaagagctgaaccagtgtccattcatggcagtagagcaaaagcatcatcaattcttatgcaatgggcacaagtttgtgtcaggtcaattctgttgctaaagcttcccactaccgacgctaacaagcacgagctgctcaaggaggcgctcgacggcctcgccgccctgtgcgcggcgttcctagcggacgctgtcgcctgtgggagcaggccagactgggtcatcggcgatagccgccggtga

SEQ ID NO: 41034 - DNA, 373 bp, Zea Mays
acacgagcaggcgtgcagttgctgagcgtcgtcctcgctttccttctggctctatgtactggccgagcagccccaggcacccacgcgcgtgctctgcgatgccgacccagcgaagcctcgcgacaatcgtctctggaagtcctctggcgtccgttcctgatgtccacgcgatcgccaaggcggccatctccctctcgtccagcatacccgagcggccatatcccatgtgcggcgtaccaggcctgctcgaagccctccaaaatcctttcatattgcgatccgtttccgagcttcgagggatcaaagatcaagcgttggcgaccaagtgatccagttcttcgagttccacaaggttgaagaccctgagcatctg

SEQ ID NO: 41035 - DNA, 436 bp, Zea Mays
acacgagcaggcgtgcagttgctgagcgtcgtcctcgctttccttctggctctatgtactggccgagcagccccaggcacccacgcgcgtgctctgcgatgccgacccagcgaagcctcgcgacaatcgtctctggaagtcctctggcgtccgttcctgatgtccacgcgatcgccaaggcggccatctccctctcgtccagcatacccgagcggccatatcccatgtgcggcgtaccaggcctgctcgaagccctccaaaatcctttcatgtaatctctcgtcatgtgattagtcctgcaccctccagcttcttcacgtggctagcacatcagattgcgatccgtttccgagcttcgagggatcaaagatcaagcgttggcgaccaagtgatccagttcttcgagttccacaaggttgaagaccctgagcatctg

SEQ ID NO: 41036 - DNA, 2861 bp, Zea Mays
cttctttccgtccgacccctaggcgggccgcggcggaccctttcctcaccaaacccacacctgcctcaactaatcgggtcagatcaggtcatcgggaaggccgccatggacgacgaggagcacgaggtttacggccaggagatccctgaggacggcgatatggacggcgctgacgttgatatggccgccgccggggacgacgcggcgaagcttcaggagcttgacgagatgaagcgcaagctgaaggagatggaggaggaggccgccgccctccgcgatatgcaggccaaggtcgccaaggagatgcaaggaggtgaccctagtatatctacagctgaggcgaaggagcaggtggatgcccggtctgtgtatgttggaaatgtaagaatttataatctctctttattgtgagtttattatgttgcttttcaacttctatataatatattacttgtcattctacgtttctgaagcacgaagtatgaaatgtggatatatatattatgtgataggcacatacatattgcctagtagctaatagatatttcattggcactcgtttagttatgaatggtttctctcaaaaaatgccaagtacccaactgccctgccgacttctatggttggtgcttactgaagaatgttgtagtgctggatatctgtattggaagacttatcaaaacctcttcctacttttgatgttgcctccttacccaaattcttgacgctttcctcggaacacatcatattgctattatgaaatgctttatgtgtgcttatcataatcctttgctatcagtacacctttgatatgtctttatggcgttctattctattttattttattgatttcgtgcattaattaagtaatggtgatggtcacagggctactgtgcttgagcaagcctttcaaattgactaatgggcactgggtcatgttttagagttaatgtagagtgaaaagaaagaagaaaagatagaaaaatatctgaaaaagtataaaaaagtgcatggaagaaacagagagaaaaacagaaagagtaaaaaggtataatatagatatcataggttagatgacctccctggcgaagcaaaagaagtcaacacagagctgctgtgtacattccggatggcactttttgacaggaactggcatggagacatctgatgtggttggtagctgctggtccactgatatcacctgagtggtgcataagtatgacatgtaagtgtaacagtaggaaaccttaatcttgactctattctttgctgtctctgaacatgtgccttggctatcttcctacctttttccttttattctgcgtttcacctaacggctgtacctttgtttttatcagatcatatagtgaagatttctttttctttattaacatgagaataaacgctgcccagtattttagtgcttatgagtgaatgcatattcactaaataaattaacaatggtcatgaaaacggatttgcatctccttgaaggttttaataaatgctgcctgacatttttgttgcatgctagtgacatgcaggtttactgttgaaattagctgaaatattaacagttctggatgctacaaggaaaaagataataatgactatggtggatccttatttcctttgcattattagtttgtatttgaaaaaaatctagtgcaaagtttcagactcctggttgattatgcttgcaccccagaagaagtgcagcagcatttccaagcttgtggaactgtcaacagggtgacaatcttgactgacaagtttgggcagccaaaaggttttgcttatgttgaatttctggaacaagaagctgtccaggaagctctgaacttgaatgaatcggaattgcatggtcgacagattaaggttgcgccgaagaggactaatgtccctgggatgaagcagcgtccaccacgcgggtataatccctaccatggctacccttatagatcatatggagcaccgtacttccccccatacggttatgggagggctcctagattccgccgccctatgcgctacagaccttacttctgaagtacgtgcggggtaataatgttcaatgcaaaaccagccatggttagtggtcagtctcgggaataattaaacctactgctgtatcgtttgcgctgttcaatagttgacatcgttgcggttcaatgctcctttaccagctgccttttctgacctctgttctcgcataagcgacatgtagacacaggacgtagggttacaattgtttgcattttctgtcattcttgattctgatgaccctatacagcactcaccgaataagatgcagtgtcaagctctgggtaggtcggttaggacatgggagtggaccgttccttgcttatttgcgatagattagttatatgaagagaaatcatcgtgcactctcagattgctacctcagccctatggtagagctctcctaaatccagcgggagctctgctaaacaggtcacagaagtgatttaagaggccggaaggtgaaaaaggtagactcctttgattctgtgaaatgattctccacaatcaattgtatctattagagaatgaggttttatagagaattagaatcagctctacctgttacgtacactgttaagtcagcagcgtccacaatcctcaaacgtctctgctgagcatcagttccggtgtcggattctgaggtaatcaaaagctgaactaatagacagtctctctctaccagactattttaccgcgggcaaatctggtccgtcgttagactatcttaacgactatctccagcagactctcactctctatttcaatcttcaccatacaaataatgtcatctaactctctatttcaatcttcaccat

SEQ ID NO: 41037 - DNA, 2323 bp, Zea Mays
ggaccctttcctcaccaaacccacacctgcctcaactaatcgggtcagatcaggtcatcgggaaggccgccatggacgacgaggagcacgaggtttacggccaggagatccctgaggacggcgatatggacggcgctgacgttgatatggccgccgccggggacgacgcggcgaagcttcaggagcttgacgagatgaagcgcaagctgaaggagatggaggaggaggccgccgccctccgcgatatgcaggccaaggtcgccaaggagatgcaaggaggtgaccctagtatatctacagctgaggcgaaggagcaggtggatgcccggtctgtgtatgttggaaatggctactgtgcttgagcaagcctttcaaattgactaatgggcactgggtcatgttttagagttaatgtagagtgaaaagaaagaagaaaagatagaaaaatatctgaaaaagtataaaaaagtgcatggaagaaacagagagaaaaacagaaagagtaaaaaggtataatatagatatcataggttagatgacctccctggcgaagcaaaagaagtcaacacagagctgctgtgtacattccggatggcactttttgacaggaactggcatggagacatctgatgtggttggtagctgctggtccactgatatcacctgagtggtgcataagtatgacatgtaagtgtaacagtaggaaaccttaatcttgactctattctttgctgtctctgaacatgtgccttggctatcttcctacctttttccttttattctgcgtttcacctaacggctgtacctttgtttttatcagatcatatagtgaagatttctttttctttattaacatgagaataaacgctgcccagtattttagtgcttatgagtgaatgcatattcactaaataaattaacaatggtcatgaaaacggatttgcatctccttgaaggttttaataaatgctgcctgacatttttgttgcatgctagtgacatgcaggtttactgttgaaattagctgaaatattaacagttctggatgctacaaggaaaaagataataatgactatggtggatccttatttcctttgcattattagtttgtatttgaaaaaaatctagtgcaaagtttcagactcctggttgattatgcttgcaccccagaagaagtgcagcagcatttccaagcttgtggaactgtcaacagggtgacaatcttgactgacaagtttgggcagccaaaaggttttgcttatgttgaatttctggaacaagaagctgtccaggaagctctgaacttgaatgaatcggaattgcatggtcgacagattaaggttgcgccgaagaggactaatgtccctgggatgaagcagcgtccaccacgcgggtataatccctaccatggctacccttatagatcatatggagcaccgtacttccccccatacggttatgggagggctcctagattccgccgccctatgcgctacagaccttacttctgaagtacgtgcggggtaataatgttcaatgcaaaaccagccatggttagtggtcagtctcgggaataattaaacctactgctgtatcgtttgcgctgttcaatagttgacatcgttgcggttcaatgctcctttaccagctgccttttctgacctctgttctcgcataagcgacatgtagacacaggacgtagggttacaattgtttgcattttctgtcattcttgattctgatgaccctatacagcactcaccgaataagatgcagtgtcaagctctgggtaggtcggttaggacatgggagtggaccgttccttgcttatttgcgatagattagttatatgaagagaaatcatcgtgcactctcagattgctacctcagccctatggtagagctctcctaaatccagcgggagctctgctaaacaggtcacagaagtgatttaagaggccggaaggtgaaaaaggtagactcctttgattctgtgaaatgattctccacaatcaattgtatctattagagaatgaggttttatagagaattagaatcagctctacctgttacgtacactgttaagtcagcagcgtccacaatcctcaaacgtctctgctgagcatcagttccggtgtcggattctgaggtaatcaaaagctgaactaatagacagtctctctctaccagactattttaccgcgggcaaatctggtccgtcgttagactatcttaacgactatctccagcagactctcactctctatttcaatcttcaccatacaaataatgtcatctaactctctatttcaatcttcaccat

SEQ ID NO: 41038 - DNA, 1080 bp, Zea Mays
ccccaagtcgagttttttcttatctactgttgactctcttcaattaccctttattatgttgtttggtttacatattagtcaacttggcctgtcagttctcttcagcatctctttatagtgcatgtttgccttgtatagtgcatgttttagctgcaaaaagtgatactctatttttctctgtagtgtcacagacctaaggtttaatacccatttaacgcacattgtttctcatttcaacggattctcctgttttgccatacatatgccttcaaaagtaagtctattagagagacaacctttaaaataaataaccttctaggactgcacctagttcattttcaaaaggaacacttgtcttttaagaatgactagtcggttgcccgtgcgttgcgacggcttacaacaatacccacgtaaattatctaccaaaaaaatttcaagattttttattgattgtctccgctctctgtataatattttttttgatttggctaactgatgttattgtttacaccatgcaatatgtcttggtacaacacggctaatgaagtgagcgattagaagagagttcacaacgactgactgaacgaacaaagattataaaatgacataattccaccataaagagaccaaataagagaaagtttgtgagctcaagtttctaaaataagtcacatgaactcaaacttataaaaagatagatcaaaatatgaagtgattgctaaagtcatgcatcaataaaaactggatgcgctctttgtagcaattattaacatttaaaaccaacaaataactttttattttactgttagtgtgataaatcattgttgctccatccaattcagtaacctcaaactgtcaaacaccatgaagtctattgcgccaatgtggtcttagaaacgacctaatacttgcaagagccaagaacgtcgtgccgtgcttaggctgtagtctcggcccgtaatactggcccgacccgacacgattatatttttttattttacaaaaaaacatatatacctatatataatttatattcaatattaaaaacatctaagcatgatgttctactgattagac

SEQ ID NO: 41039 - DNA, 849 bp, Zea Mays
ctacctggggttcctcttctctctcacgctagatcaggcggagcactattcatcccccaacctttccttccggaggatggcagcgagcgcgccttggcgaagaaacctcccgctccgttgcggtgggtttggactccagcgcggaggcctggacacgacaatgtgcaaggcggaggaaggccgactcggatccgctcgatctcgccgacgacgaggcccaacaacaggacgttgcggcgctgaggaagcattcccatcgattcctccctgagctgatccctggctcctcctcctcctccccgagaccccgaccaactactgcgttgaattgctgatcaagaacaagagccaactctggttatcaactccagcgactcaggcagacaagaagatgagtacttcatctgaagatatcagtgttcaagtcattttccctggatcacaatatcaaacaaatgagcaggagcagccaaagcatgtctcctctgctgtggatagtaccaatccagttggtttggcatcctcggctgctcctctctctgtgtgtgttcattatttatttttcggattcctgttgcttttcagtagattccattcacaaatgctcctgcacttttttaccgactgcgattgtgattgcttatcaatttcagttctaagagattttcagtaatcaagtgttccattgtatacttaattatgggtttttaaaatttagaaattaaatagtacataattatacacattatgtgcccctcaatattttatggagattatatgtctaaattgaaaaaaattaaatcaattattcaatggatttgtacgttaagaaaataaaaattgaaaaaa

SEQ ID NO: 41040 - DNA, 1754 bp, Zea Mays
caacatgcaagggaaaacctcgatgatgggctcgaacgcgcgcccccacgcggtgctcatcccgtacccggcgcagggccacgtcacgccgctgctgcagctggccaaggtgctgcactcgaggggcttcttcgtcacctacgtcaactccgagtacaaccaccgccgcctgctccggtcccgcggcgcggactcgctggcgggcctcgacgacttccggttcgagaccatccccgacggcctgcctccgtccggcagcgacgacgacgtcacgcaggacatccccgcgctctgcgagtcgctctcccggagcggcgccgcgccgttccgtgacctcctggcgaggctcaacggcatgccgggccgtcctcctgtcacctgcgtcgtactggacaacttcatgagcttcgcgcagagggtggccagcgagatgggcatcctggcagtcgtgttctgcaccatgagcgcgtgtggcttcatggggtacctccacttcaaggagctcatggacagaggctacgtgccactgaaagatgagagctacctgaccaacgggtacctggacacggtgctcgactgggtgcccgggatgcggggcatccgtctgcgagacatgcccagcttcatccgcacgacggacccggacgagttcatggtccacttcgacagcggggaggcccagaacgcgcgccgcgcgcaggggatcatcgtcaacacgttcgacgcgctggagcaggacgtcgtgggcgcgctgcgcggcgtcttccctcgcgtctacaccatcggcccgcttctcacgttcgccagagacatggtccgtcccgacgcgtccgcgatctgcgggaacctctggaaggaggacccgagctgcctcgggtggctggatgcccaggggcccggctcggtcgtgtacgtcaacttcggcagcatcacggtcatgacgccggctcagctcgccgagttcgcgtgggggctggcgaactgcggcaggccgttcctgtgggtcatcaggccggacctcgtcacgggcgagaaggctatgctgccggaggagttctacgcggagacgagagagagagggctcttcctcagctggtgcccgcaggaacaggtcctgtcgcatccgtccaccgggctgttcctgacgcactctgggtggaactctacgctggagagcatacgcgccggcgtgccgatgatctgctggccgttcttcgcagagcagacgaccaactgccgatatgcctgcgcgaactggggcattggactggagatcgacaacaatgtcacgagggacgaggtggcacggctcatagaagaagccatggacggcgagaaaggcaaagacatgaaggcgaaggcaacagtgtggaaggagaaggccgtggcagcaacagaaagcggcgggacctcgagcgtcagcattgatcgtttggtcgagttcctgcttgaaggaaacgttcctacagctgcaggctaataatatgaacagtacgtgcatatgaaaaccgaagtataatgttaccagcaaatttgtaatatataagtataaatactgaatttgtttctttcatgacggtcagcttcacagtagaaaatatggtgtcgcatgaacatgacaatttcagaattcagagtgaagatgcaagcttgctgtcagtattttcaggtttcagcaacaaacaccacgttaaccgaaaggattacagtagcgtaccagatgcatcgtcagattcctttgagactgcatgaga

SEQ ID NO: 41041 - DNA, 361 bp, Zea Mays
aaatgactggcaccatagcctgccagccgctgggccattgccgctaaattcggccaacaggtgaaggccgataggcctaatctctgtcggccatgcctataaagcaaagtcgttctgctacgctagcggggaaaagaatctgcaagagcacaccgccagcagagaggaggatctgcatgagcgttgtcaaccgggagatcgccatcaccgtcgccaacccagcgttgtggtcacccaaatctacgcgatgaggacatgcgtcatctgaagagcaagttggtacctggaatctcaagtcccaggcaagttgtgccctgatcacttcttttacccactcatgttctaattaatcataatgatc

SEQ ID NO: 41042 - DNA, 2994 bp, Zea Mays
cagctctatttattactgctatatcagggagtaggcaccagcccaccgactggtgttagtgtgttacgggcttacggccgtgttcatcttgctgctcgcctgctctccccgttccgtcctgcgaggaggagatccgcattccggagggaaacggcgaagggtctcactcgatttatactcgtgccgtactgctgctgctatcttctctatccccattactcgtgcaatggcgaggaggccgtagtgctaagtggagcagcggcaggcagcgcagcgcaggccaacgcggaattgctcgctgctgcggtccagtggcgtggcggcacgcgtgtcgcgttccatgcggcactagcgcggcccctgagatccatccgcagcagcaggcatgtcgcgcgcgttgtacaggggcgtgtcggggatcggcggcaagctggcggcggcggacgaggcgtacgcgtactacgaccccaaggagcccagcgagaacagcattggcggcggcttcggccggggcggcgcgcggaagcggcacctcgcggacgcggcggtgaaggtcggggtcctgctgctggtggcggccgcgctcgtgggctcggtcgcgtgggcggggacgctctacgcggggcgcggcgcggcggcgcgcgcggccgccgccgccgcgcaccgcgggtaccggcggctgcaggagcagctggtcgcggacctgctcgacatcggcgagctcgcgggcggcggcgcccgcgccaaggaggcggaggtgtgcccgcccgagtacgaggactacgtgccctgctactacaacgtcacggacgccgtcgacgtctcggatctgggcgccggcgtcgccataagctacgaccgccagtgcacgcgcgacggcagggtcacttgcctcgtcgcgccaccgcggagctaccggattccggtccgatggcccagcggcaagggcttcatctggaaggacaacgtgcggattagcgggcacgagttctcgtccgggagcctgttcaagaggatgatggtggaggaggaccagatctcgttcccgtccgacgcgcacatggccgacggtgtggaggattatgcccatcaaattgccgagatgattgggttgcgtaatgagttcaatttcaatgaggctggagtcaggacagtccttgacatagaatgtggatttggtacctttggggcacatctttttgagagagatctcttgaccatgtgcattgctaactatgaagcatcaggcagccaagtgcaaattacactagagagaggcattcctgcaatgattggttcatttgcaacgaagcagcttccatatccctatctttcctttgatatggtgcattgtgcgaaatgcaatatcgaatggtacaaaaatgatggcattttcttagttgaagtgaacaggcttttgaggcctgatgggtattttgtatggacatcaaatttgaatacacatagagccttgcgtgacaaagaaaatcaaaagaaatggacagccattcgtgactttgctgagggtctttgttgggagatgctgtcacaacaagatgagacaattgtatggaaaaagacaaataaaagggactgttacaattcgagaaaatctgggcctgagctatgtggccatgatccagaatcaccatactaccaaccactaaacccctgcatatcaggcacaagaagtcagcgttggatccccattgaatatcgtaccacctggccatctcaggctagacaaaactcaacagaattggacatacatggtgtgcatcctgaagtctttgctgatgatacctcaagctgggactccatggtgcgaaactactggtctttgctatctccacttatattttcagaccatccaaagagacccggtgatgaggacccacagccaccatttaacatgctaaggaatgttttagatatgaatgctcactttggtggatttaatgctgctttactgaaggcaggaaagtctgtatgggtgatgaatgttgttcctacagatgccccaaactatctaccgctgatatttgaccggggttttatcggggttcaacatgactggtgtgatgcatttccaacttacccaagaacatatgatatggtgcacgctgatggttttctatcacttcagaagaaccacaagcatagatgttctactcttgacatattcttggaagttgaccgcatcctacgaccagagggctgggtcataatccgtgacgctgcccctcttattgaagcggcaagatctgttgttactcaactcagatgggacgcccgcgttttggatcttgacatagccagtgatgaaaaactactggtctgtcagaagccgtttctcagaaaataatgagcatagtagacactgacacaagatatgaacttattctttcaccctacacactgttacaattgctgtctgagcacaactgagtacaaagtttgggtaaaaaacacgggaagcatgattcagcaaacttgtcatgcatcaccatggaaccgcaaggtgccattaaattgatcggtcaagtgcatgctgcagaaacaggcttggtggctaagctttccaggccaaggttttattgccaggatatagagatgaagccataaaaattactttagtagtgaaaccatatccaataaagagatgctgctgcggtgtacataatcgccgccaatgtgccatataggtataattcattttttcccttgttacaatttctctccttttttctgtaactgtgccaatttgttttattttgtatcttgtatgtaaattggttggtctatatactgatcatcccagactacagcctagtgaaatcaatataattattatttggagatgaatgataagcaagagcaaattataatcattccactatatttatctatcatttctacaattcattatttttgtacattgtacggaacaagagtgataccttcattattcaagaagaataaaatacatttcca

SEQ ID NO: 41043 - DNA, 2459 bp, Zea Mays
atgtcgcgcgcgttgtacaggggcgtgtcggggatcggcggcaagctggcggcggcggacgaggcgtacgcgtactacgaccccaaggagcccagcgagaacagcattggcggcggcttcggccggggcggcgcgcggaagcggcacctcgcggacgcggcggtgaaggtcggggtcctgctgctggtggcggccgcgctcgtgggctcggtcgcgtgggcggggacgctctacgcggggcgcggcgcggcggcgcgcgcggccgccgccgccgcgcaccgcggcggcaagggcttcatctggaaggacaacgtgcggattagcgggcacgagttctcgtccgggagcctgttcaagaggatgatggtggaggaggaccagatctcgttcccgtccgacgcgcacatggccgacggtgtggaggattatgcccatcaaattgccgagatgattgggttgcgtaatgagttcaatttcaatgaggctggaaaatattgcatgttgagtagacttgctggaagtgccggtctatttctacttaatttgacaaatatacatgcccaatgtgctggaaagtgtatgtcagagtttactactgtacctgcaaaagtcaggacagtccttgacatagaatgtggatttggtacctttggggcacatctttttgagagagatctcttgaccatgtgcattgctaactatgaagcatcaggcagccaagtgcaaattacactagagagaggcattcctgcaatgattggttcatttgcaacgaagcagcttccatatccctatctttcctttgatatggtgcattgtgcgaaatgcaatatcgaatggtacaaaaatgatggcattttcttagttgaagtgaacaggcttttgaggcctgatgggtattttgtatggacatcaaatttgaatacacatagagccttgcgtgacaaagaaaatcaaaagaaatggacagccattcgtgactttgctgagggtctttgttgggagatgctgtcacaacaagatgagacaattgtatggaaaaagacaaataaaagggactgttacaattcgagaaaatctgggcctgagctatgtggccatgatccagaatcaccatactaccaaccactaaacccctgcatatcaggcacaagaagtcagcgttggatccccattgaatatcgtaccacctggccatctcaggctagacaaaactcaacagaattggacatacatggtgtgcatcctgaagtctttgctgatgatacctcaagctgggactccatggtgcgaaactactggtctttgctatctccacttatattttcagaccatccaaagagacccggtgatgaggacccacagccaccatttaacatgctaaggaatgttttagatatgaatgctcactttggtggatttaatgctgctttactgaaggcaggaaagtctgtatgggtgatgaatgttgttcctacagatgccccaaactatctaccgctgatatttgaccggggttttatcggggttcaacatgactggtgtgatgcatttccaacttacccaagaacatatgatatggtgcacgctgatggttttctatcacttcagaagaaccacaagcatagatgttctactcttgacatattcttggaagttgaccgcatcctacgaccagagggctgggtcataatccgtgacgctgcccctcttattgaagcggcaagatctgttgttactcaactcagatgggacgcccgcgttttggatcttgacatagccagtgatgaaaaactactggtctgtcagaagccgtttctcagaaaataatgagcatagtagacactgacacaagatatgaacttattctttcaccctacacactgttacaattgctgtctgagcacaactgagtacaaagtttgggtaaaaaacacgggaagcatgattcagcaaacttgtcatgcatcaccatggaaccgcaaggtgccattaaattgatcggtcaagtgcatgctgcagaaacaggcttggtggctaagctttccaggccaaggttttattgccaggatatagagatgaagccataaaaattactttagtagtgaaaccatatccaataaagagatgctgctgcggtgtacataatcgccgccaatgtgccatataggtataattcattttttcccttgttacaatttctctccttttttctgtaactgtgccaatttgttttattttgtatcttgtatgtaaattggttggtctatatactgatcatcccagactacagcctagtgaaatcaatataattattatttggagatgaatgataagcaagagcaaattataatcattccactatatttatctatcatttctacaattcattatttttgtacattgtacggaacaagagtgataccttcattattcaagaagaataaaatacatttcca

SEQ ID NO: 41044 - DNA, 1710 bp, Zea Mays
gtaaagacacgtttaatttggtactctaggatggcgataaaggagtatctcttacagtcttactaaatatgtaaacatcacttttctctgtaattttgcagatggcattttcttagttgaagtgaacaggcttttgaggcctgatgggtattttgtatggacatcaaatttgaatacacatagagccttgcgtgacaaagaaaatcaaaagaaatggacagccattcgtgactttgctgagggtctttgttgggagatgctgtcacaacaagatgagacaattgtatggaaaaagacaaataaaagggactgttacaattcgagaaaatctgggcctgagctatgtggccatgatccagaatcaccatactaccaaccactaaacccctgcatatcaggcacaagaagtcagcgttggatccccattgaatatcgtaccacctggccatctcaggctagacaaaactcaacagaattggacatacatggtgtgcatcctgaagtctttgctgatgatacctcaagctgggactccatggtgcgaaactactggtctttgctatctccacttatattttcagaccatccaaagagacccggtgatgaggacccacagccaccatttaacatgctaaggaatgttttagatatgaatgctcactttggtggatttaatgctgctttactgaaggcaggaaagtctgtatgggtgatgaatgttgttcctacagatgccccaaactatctaccgctgatatttgaccggggttttatcggggttcaacatgactggtgtgatgcatttccaacttacccaagaacatatgatatggtgcacgctgatggttttctatcacttcagaagaaccacaagcatagatgttctactcttgacatattcttggaagttgaccgcatcctacgaccagagggctgggtcataatccgtgacgctgcccctcttattgaagcggcaagatctgttgttactcaactcagatgggacgcccgcgttttggatcttgacatagccagtgatgaaaaactactggtctgtcagaagccgtttctcagaaaataatgagcatagtagacactgacacaagatatgaacttattctttcaccctacacactgttacaattgctgtctgagcacaactgagtacaaagtttgggtaaaaaacacgggaagcatgattcagcaaacttgtcatgcatcaccatggaaccgcaaggtgccattaaattgatcggtcaagtgcatgctgcagaaacaggcttggtggctaagctttccaggccaaggttttattgccaggatatagagatgaagccataaaaattactttagtagtgaaaccatatccaataaagagatgctgctgcggtgtacataatcgccgccaatgtgccatataggtataattcattttttcccttgttacaatttctctccttttttctgtaactgtgccaatttgttttattttgtatcttgtatgtaaattggttggtctatatactgatcatcccagactacagcctagtgaaatcaatataattattatttggagatgaatgataagcaagagcaaattataatcattccactatatttatctatcatttctacaattcattatttttgtacattgtacggaacaagagtgataccttcattattcaagaagaataaaatacatttcca

SEQ ID NO: 41045 - DNA, 1561 bp, Zea Mays
accatccgatccggtagtatccgaacccgataaagcgaccccccaacaacgctggcctcacctcacacaaacacacataccgaatccagccccgcacccaccgttgcgcccgccgcccgagtcgccgtggccgccgcggcagcgccctcccggccgtgagcgcggcccagcgcgcgcgccgcggccaccgccgccctcgaggcgcccagatctgggccctagcgcccccctccctcctataggcctttccccgctgcatcgccatggcgcggctactgctgtggtggacagcgctgctcctcccatccctcctcgccggcgttggtcccgccgccgccgccgccgcgtccccgccccacgatgcgtgcctggtgcctaccatcgcgcaatccgtccttaggactcccgacacgtgctcgacgctggatcgccgccttggcgacccggtcggcgtcatcgagggagatgaggtgacgttggcaagggcagttaatcttcttcacgcaaacaaggatgactacattgccgtactattctatgcctcgtggtgcccattctcacaggaatgcaaaccgaattttgagacactggcttacttattcccagctatccggcattttgcatttgaggaatctgcaattaggccaagcataatttcgagatacggcatccatggtttcccaacactctttctcttgaactcgaccatgagagtacgatatcatggaccaaggactgttaaatcacttgcagctttctacactgatgtctcagtcaactgcaggggaggccatggtacatcccttggatgatattgagcataaaaaggacgctgaacaggaaaattgcccattctggtgggctcggtcaccagagaatatacttcagcaggatacttatctagcattggcgaccgtatttgtaattttgaggttgctgtatcgtatttttccaaagatagattcctttaccagatgggcatggaggaggcacaatatgtttgcaaaattgatgggagcacatgaatatttcctcacctaccttgagcaagcaagacagaagtttcataggctatacccttcaagttcaaagcgaggaaatctgcaggagggcgcaatgaacgctaccgcttgggcttccaaatcattagcatcagtttcaattggagaaccaagtgcaattggaaggacaaactctacaagtgagctaagatgaaatctgatcttttttgtccccagggattatatgtacagtacagtagagcgatcaggatatgaacacccagaaactgttgtaacggctatattactctttgtatcctccttagaataaatacgtccatgatttggctccttattttctgttgttgttacagcccaattctttggaggaataaagtttctggtgtattgagaggtgtctttctgaaatagggagcatatcagatgcacacgtgtctttcgtgtacatggtgctggtgcatatattgaatcaagcaacttaatatggtattaaaatcagggtctcaaatttgaatcctagttagcacaattcaatataa

SEQ ID NO: 41046 - DNA, 4180 bp, Zea Mays
cctagcgccaccaccccaccccaagctgcttcgcgaagcaacaactatccctcgttccctcccagtccccgcctcggctccctcgcctcctcctccattcctacttccttcgctctctcctttatcccttccttgcagtccccttctctccccgacgcctcgtttttttatccatcggtgtcgacgaggggaccgacgaagcggaggacgcctcagatctagggttccttccttgcgtgcccttcgaggagagacagagagagggtctgcatcatgagggccaccggggagcacacaactgcggtgcccatgcccgccccgccgccgcctcctgctgcggcctctgcgagtgaggaagacgacaaggagaggaggaagaaccgccgccgctcctcgcggcgctccaggcaggcggccgttgccgcgccgcagggcctgcacgcggacgctgcggggccgaggacggtcagatcgatgccgcccatgcacgtgggcagcagcgccggcgtcgacgccgaggcagagccgtccgcggcgggaacgagccaatcctgccccctgccccccacgccgagacccacggaggcgcctgtgtcgaggctgggcaggggagctccggggacgcgttacttccagcctcactggcctgagcgggccgtggaggaggccgtcaagagagggcatgctttcgtggggaagttcagggtgaatgctcacaaccgaaatgaggcgtactgtacgattgatggcgtctcggtggatgttctcattacaggattggcacaaaaccgagcggttgaaggtgatcttgttgctatcacactggaccctgttgctcactggactagaatgaaaggaccaaacgttgcgtgcaaccctctgataggagattctgtggtgtgtgaggttagtgaaacaaataggaatcatagttggaagaaaggacaggcagacgacggctgcaagtttgaaaattgcagtaacggagtacctgttttggataggacacatccccctcacaagaacagtggttttagtcaagctgttaagtgtggaaatgggaatgctactatccctgaaaggaatgagatagacttgaatgatggaaagagtgaggttgcaagagcattacaaaggatcagtgccacgatatactctcatccaagcagacgtcctactgggaaagtattatcaataattaagaagtctccgcgccgtgatgccattgtaggtttccttgcttctttctcagagttccctgacggagagcagcagaaaaaccagatgggtctaaacaggatgaacaacagaacacaatcagttacaggcttgttttatctcttgcctactgaccccaaattccctcagatggttgtgagttttagcactttgccagatagtgtcaggcagagcctaagaggtaacgtagctgttaagaaggaattggttgctgcacgaattgatgaatggaatgaggaaaacctctatccctatgcccatgttatacggttcttggggaaggttggacatgtcaaaacacacatggatgctatattatttgagaatgtgatctgtgatgctgagttttcccctgagtccttggcatgccttcctgacaattgttggaagattcctcaaaaagaacttgaagctagaaaagatttgaggaaggtcttgacttttacaatagaccctcctactgcatcggatctggatgatgctatatcaattgaaatactttcaggaggaactgtccgtattggggttcacattgctgatgtttcttactttttacatccagagactgctttagatgctgaagctcaaagtcgatctacaagtgtttacaccctgaaacataaaatctcaatgttgccttcaggattttcggaagtggtttcacttaatccaggtgtagataggcttgccttttcaattatttgggatattgatcctcatggtaacctaattagtcgttggattggtcgaagcatcatcttttcgtgctgcaagctgtcatatgagcttgtgcaggatctgatttgtaatgaaaccagtcagactaggcctgaagtttcttctcttgaagtacatggtatatttgggagagatgatgttatcaagtcacttagaggcctctatgaagtctcaaaaaatctgaaggaaattaggttcaagggtggagctctttctcttgatactgcaaagattatgatcctgtttgatgaagatggggatccatgtgatagctatcgttacgtgaggaagaatgcgtgcttcattgttgaggagctaatgttgttggcgaatatgtcagctgcagaagtcatatctaatgcatttcctgattgtgccttacttcgtaggcaccctgaacctaatttgcggaagtccagagagttcgaggcattttgtgctaagaatggttttgaattggatgtttcatcatctggtcaactccacctttcactttctagaataaaggaaaagctgcaggaggatcctgttatgtttgatattatcatgttttatgcttcaaagcaaatgcagtcagcagaatacttttgcacaggggacctgataagcaagaaagatgattgggcacattatgcgctgtctgtccctttgtatacacacttcacttcaccacttcgaagatatcctgatataattgttcacaggactctgaatgcggtgattgaagctgaacaagtgtatatgaaacagaagaaatcttccgcaggccagaatggagtcaaagcatcttgtgaattgatggatatgtgttttactggccttcagttgtgcaaggatgctgctgaatctgaagaagggaaaaaggcactttctgctgcagctaagaaatttaaggttccttcctctgaaaatcttggggagattgctgaacactgtaatgaaagaaagtgggctggtcgccgtgcagaagaagctggacagaagctctacatgtgggctctgataaagaacaaagagactgtggtatgcaatgctagagttctgggacttggtcccaggttcatgtcagtttatgtgcccaagcttgcgatggaacgaaggatatattatgatgaagttgagggattatcagttgaatggttagaagtcactggaacgttagtgcttgatacatgcaggaacaagcctgctcaaaggagaggaactcagatgaagcgcaggccgattgaggaagtcgcggtggtggtgaacccttcagagttgtctgaagaagacgaggaatcaggagcaacagaagctggcggctgcactgccaagtctgttttgttgagtggcgacgcagtgaaagctcagaccgccccagccgttctccccttggtgatacattaccttagtgacatccctgtggttcttcatgcaattggtggtgaggattgtgcggtggacattggcgtaagactgtacatggcgtcatacttcaagttataggaaacctcctgtcatgacaggaaatagttggtcgatttcaacagtttttcagtcgaacgaaagtaataaaatgatggtgggcaaattccaacttagtgctgtagatatttcattcatgtatagcaaattaggtacccttccagcacagaaaaagaaaacccctaccccaatccgttctttcccatcctgtgacatgaggttttgatggcagagtcaagtggcttccgtttttaatcccagactgcctgttgaggtaccaaaatggtggaagtgggagtctacattaatgccacactattttagtggttccatcaatgatcttctgctagtttgtgaaacgagggtttgttccttttgctcttaattcatgtggattgagtgagtttaaatcctaaataaattaaaaaattataattcattcaatcttatccaattcatatgggacagaaataactgaactagccctgatgtttttttatgggttcactcaaatgttgggataataagtctatttggtgattgttgctgtcgtttgtgtaattgtgttttcatccgtttcgtgaggccgagatatatggcgcagtactgcagtgctctttatgaagttgtggtcatgtaattattctttgcgattgcagttttacccgtgcacatgcgagcaactcagaaatgttgtatgacatccattttgttgagactaagctctcagtgtaag

SEQ ID NO: 41047 - DNA, 4085 bp, Zea Mays
caactatccctcgttccctcccagtccccgcctcggctccctcgcctcctcctccattcctacttccttcgctctctcctttatcccttccttgcagtccccttctctccccgacgcctcgtttttttatccatcggtgtcgacgaggggaccgacgaagcggaggacgcctcagatctagggttccttccttgcgtgcccttcgaggagagacagagagagggtctgcatcatgagggccaccggggagcacacaactgcggtgcccatgcccgccccgccgccgcctcctgctgcggcctctgcgagtgaggaagacgacaaggagaggaggaagaaccgccgccgctcctcgcggcgctccaggcaggcggccgttgccgcgccgcagggcctgcacgcggacgctgcggggccgaggacggtcagatcgatgccgcccatgcacgtgggcagcagcgccggcgtcgacgccgaggcagagccgtccgcggcgggaacgagccaatcctgccccctgccccccacgccgagacccacggaggcgcctgtgtcgaggctgggcaggggagctccggggacgcgttacttccagcctcactggcctgagcgggccgtggaggaggccgtcaaggcgtactgtacgattgatggcgtctcggtggatgttctcattacaggattggcacaaaaccgagcggttgaaggtgatcttgttgctatcacactggaccctgttgctcactggactagaatgaaaggaccaaacgttgcgtgcaaccctctgataggagattctgtggtgtgtgaggttagtgaaacaaataggaatcatagttggaagaaaggacaggcagacgacggctgcaagtttgaaaattgcagtaacggagtacctgttttggataggacacatccccctcacaagaacagtggttttagtcaagctgttaagtgtggaaatgggaatgctactatccctgaaaggaatgagatagacttgaatgatggaaagagtgaggttgcaagagcattacaaaggatcagtgccacgatatactctcatccaagcagacgtcctactgggaaagtattatcaataattaagaagtctccgcgccgtgatgccattgtaggtttccttgcttctttctcagagttccctgacggagagcagcagaaaaaccagatgggtctaaacaggatgaacaacagaacacaatcagttacaggcttgttttatctcttgcctactgaccccaaattccctcagatggttgtgagttttagcactttgccagatagtgtcaggcagagcctaagaggtaacgtagctgttaagaaggaattggttgctgcacgaattgatgaatggaatgaggaaaacctctatccctatgcccatgttatacggttcttggggaaggttggacatgtcaaaacacacatggatgctatattatttgagaatgtgatctgtgatgctgagttttcccctgagtccttggcatgccttcctgacaattgttggaagattcctcaaaaagaacttgaagctagaaaagatttgaggaaggtcttgacttttacaatagaccctcctactgcatcggatctggatgatgctatatcaattgaaatactttcaggaggaactgtccgtattggggttcacattgctgatgtttcttactttttacatccagagactgctttagatgctgaagctcaaagtcgatctacaagtgtttacaccctgaaacataaaatctcaatgttgccttcaggattttcggaagtggtttcacttaatccaggtgtagataggcttgccttttcaattatttgggatattgatcctcatggtaacctaattagtcgttggattggtcgaagcatcatcttttcgtgctgcaagctgtcatatgagcttgtgcaggatctgatttgtaatgaaaccagtcagactaggcctgaagtttcttctcttgaagtacatggtatatttgggagagatgatgttatcaagtcacttagaggcctctatgaagtctcaaaaaatctgaaggaaattaggttcaagggtggagctctttctcttgatactgcaaagattatgatcctgtttgatgaagatggggatccatgtgatagctatcgttacgtgaggaagaatgcgtgcttcattgttgaggagctaatgttgttggcgaatatgtcagctgcagaagtcatatctaatgcatttcctgattgtgccttacttcgtaggcaccctgaacctaatttgcggaagtccagagagttcgaggcattttgtgctaagaatggttttgaattggatgtttcatcatctggtcaactccacctttcactttctagaataaaggaaaagctgcaggaggatcctgttatgtttgatattatcatgttttatgcttcaaagcaaatgcagtcagcagaatacttttgcacaggggacctgataagcaagaaagatgattgggcacattatgcgctgtctgtccctttgtatacacacttcacttcaccacttcgaagatatcctgatataattgttcacaggactctgaatgcggtgattgaagctgaacaagtgtatatgaaacagaagaaatcttccgcaggccagaatggagtcaaagcatcttgtgaattgatggatatgtgttttactggccttcagttgtgcaaggatgctgctgaatctgaagaagggaaaaaggcactttctgctgcagctaagaaatttaaggttccttcctctgaaaatcttggggagattgctgaacactgtaatgaaagaaagtgggctggtcgccgtgcagaagaagctggacagaagctctacatgtgggctctgataaagaacaaagagactgtggtatgcaatgctagagttctgggacttggtcccaggttcatgtcagtttatgtgcccaagcttgcgatggaacgaaggatatattatgatgaagttgagggattatcagttgaatggttagaagtcactggaacgttagtgcttgatacatgcaggaacaagcctgctcaaaggagaggaactcagatgaagcgcaggccgattgaggaagtcgcggtggtggtgaacccttcagagttgtctgaagaagacgaggaatcaggagcaacagaagctggcggctgcactgccaagtctgttttgttgagtggcgacgcagtgaaagctcagaccgccccagccgttctccccttggtgatacattaccttagtgacatccctgtggttcttcatgcaattggtggtgaggattgtgcggtggacattggcgtaagactgtacatggcgtcatacttcaagttataggaaacctcctgtcatgacaggaaatagttggtcgatttcaacagtttttcagtcgaacgaaagtaataaaatgatggtgggcaaattccaacttagtgctgtagatatttcattcatgtatagcaaattaggtacccttccagcacagaaaaagaaaacccctaccccaatccgttctttcccatcctgtgacatgaggttttgatggcagagtcaagtggcttccgtttttaatcccagactgcctgttgaggtaccaaaatggtggaagtgggagtctacattaatgccacactattttagtggttccatcaatgatcttctgctagtttgtgaaacgagggtttgttccttttgctcttaattcatgtggattgagtgagtttaaatcctaaataaattaaaaaattataattcattcaatcttatccaattcatatgggacagaaataactgaactagccctgatgtttttttatgggttcactcaaatgttgggataataagtctatttggtgattgttgctgtcgtttgtgtaattgtgttttcatccgtttcgtgaggccgagatatatggcgcagtactgcagtgctctttatgaagttgtggtcatgtaattattctttgcgattgcagttttacccgtgcacatgcgagcaactcagaaatgttgtatgacatccattttgttgagactaagctctcagtgtaag

SEQ ID NO: 41048 - DNA, 3842 bp, Zea Mays
ctcggctccctcgcctcctcctccattcctacttccttcgctctctcctttatcccttccttgcagtccccttctctccccgacgcctcgtttttttatccatcggtgtcgacgaggggaccgacgaagcggaggacgcctcagatctagggttccttccttgcgtgcccttcgaggagagacagagagagggtctgcatcatgagggccaccggggagcacacaactgcggtgcccatgcccgccccgccgccgcctcctgctgcggcctctgcgagtgaggaagacgacaaggagaggaggaagaaccgccgccgctcctcgcggcgctccaggcaggcggccgttgccgcgccgcagggcctgcacgcggacgctgcggggccgaggacggtcagatcgatgccgcccatgcacgtgggcagcagcgccggcgtcgacgccgaggcagagccgtccgcggcgggaacgagccaatcctgccccctgccccccacgccgagacccacggaggcgcctgtgtcgaggctgggcaggggagctccggggacgcgttacttccagcctcactggcctgagcgggccgtggaggaggccgtcaaggcgtactgtacgattgatggcgtctcggtggatgttctcattacaggattggcacaaaaccgagcggttgaaggtgatcttgttgctatcacactggaccctgttgctcactggactagaatgaaaggaccaaacgttgcgtgcaaccctctgataggagattctgtggtgtgtgaggttagtgaaacaaataggaatcatagttggaagaaaggacaggcagacgacggctgcaagtttgaaaattgcagtaacggagtacctgttttggataggacacatccccctcacaagaacagtggttttagtcaagctgttaagtgtggaaatgggaatgctactatccctgaaaggaatgagatagacttgaatgatggaaagagtgaggttgcaagagcattacaaaggatcagtgccacgatatactctcatccaagcagacgtcctactgggaaagtattatcaataattaagaagtctccgcgccgtgatgccattgtaggtttccttgcttctttctcagagttccctgacggagagcagcagaaaaaccagatgggtctaaacaggatgaacaacagaacacaatcagttacaggcttgttttatctcttgcctactgaccccaaattccctcagatggttgtgagttttagcactttgccagatagtgtcaggcagagcctaagaggtaacgtagctgttaagaaggaattggttgctgcacgaattgatgaatggaatgaggaaaacctctatccctatgcccatgttatacggttcttggggaaggttggacatgtcaaaacacacatggatgctatattatttgagaatgtgatctgtgatgctgagttttcccctgagtccttggcatgccttcctgacaattgttggaagattcctcaaaaagaacttgaagctagaaaagatttgaggaaggtcttgacttttacaatagaccctcctactgcatcggatctggatgatgctatatcaattgaaatactttcaggaggaactgtccgtattggggttcacattgctgatgtttcttactttttacatccagagactgctttagatgctgaagctcaaagtcgatctacaagtgtttacaccctgaaacataaaatctcaatgttgccttcaggattttcggaagtggtttcacttaatccaggtgtagataggcttgccttttcaattatttgggatattgatcctcatggtaacctaattagtcgttggattggtcgaagcatcatcttttcgtgctgcaagctgtcatatgagcttgtgcaggatctgatttgtaatgaaaccagtcagactaggcctgaagtttcttctcttgaagtacatggtatatttgggagagatgatgttatcaagtcacttagaggcctctatgaagtctcaaaaaatctgaaggaaattaggttcaagggtggagctctttctcttgatactgcaaagattatgatcctgtttgatgaagatggggatccatgtgatagctatcgttacgtgaggaagaatgcgtgcttcattgttgaggagctaatgttgttggcgaatatgtcagctgcagaagtcatatctaatgcatttcctgattgtgccttacttcgtaggcaccctgaacctaatttgcggaagtccagagagttcgaggcattttgtgctaagaatggttttgaattggatgtttcatcatctggtcaactccacctttcactttctagaataaaggaaaagctgcaggaggatcctgttatgtttgatattatcatgttttatgcttcaaagcaaatgcagtcagcagaatacttttgcacaggggacctgataagcaagaaagatgattgggcacattatgcgctgtctgtccctttgtatacacacttcacttcaccacttcgaagatatcctgatataattgttcacaggactctgaatgcggtgattgaagctgaacaagtgtatatgaaacagaagaaatcttccgcaggccagaatggagtcaaagcatcttgtgaattgatggatatgtgttttactggccttcagttgtgcaaggatgctgctgaatctgaagaagggaaaaaggcactttctgctgcagctaagaaatttaaggttccttcctctgaaaatcttggggagattgctgaacactgtaatgaaagaaagtgggctggtcgccgtgcagaagaagctggacagaagctctacatgtgggctctgataaagaacaaagagactgtggtatgcaatgctagagttctgggacttggtcccaggttcatgtcagtttatgtgcccaagcttgcgatggaacgaaggatatattatgatgaagttgagggattatcagttgaatggttagaagtcactggaacgttagtgcttgatacattaccttagtgacatccctgtggttcttcatgcaattggtggtgaggattgtgcggtggacattggcgtaagactgtacatggcgtcatacttcaagttataggaaacctcctgtcatgacaggaaatagttggtcgatttcaacagtttttcagtcgaacgaaagtaataaaatgatggtgggcaaattccaacttagtgctgtagatatttcattcatgtatagcaaattaggtacccttccagcacagaaaaagaaaacccctaccccaatccgttctttcccatcctgtgacatgaggttttgatggcagagtcaagtggcttccgtttttaatcccagactgcctgttgaggtaccaaaatggtggaagtgggagtctacattaatgccacactattttagtggttccatcaatgatcttctgctagtttgtgaaacgagggtttgttccttttgctcttaattcatgtggattgagtgagtttaaatcctaaataaattaaaaaattataattcattcaatcttatccaattcatatgggacagaaataactgaactagccctgatgtttttttatgggttcactcaaatgttgggataataagtctatttggtgattgttgctgtcgtttgtgtaattgtgttttcatccgtttcgtgaggccgagatatatggcgcagtactgcagtgctctttatgaagttgtggtcatgtaattattctttgcgattgcagttttacccgtgcacatgcgagcaactcagaaatgttgtatgacatccattttgttgagactaagctctcagtgtaag

SEQ ID NO: 41049 - DNA, 4096 bp, Zea Mays
cctcctcctccattcctacttccttcgctctctcctttatcccttccttgcagtccccttctctccccgacgcctcgtttttttatccatcggtgtcgacgaggggaccgacgaagcggaggacgcctcagatctagggttccttccttgcgtgcccttcgaggagagacagagagagggtctgcatcatgagggccaccggggagcacacaactgcggtgcccatgcccgccccgccgccgcctcctgctgcggcctctgcgagtgaggaagacgacaaggagaggaggaagaaccgccgccgctcctcgcggcgctccaggcaggcggccgttgccgcgccgcagggcctgcacgcggacgctgcggggccgaggacggtcagatcgatgccgcccatgcacgtgggcagcagcgccggcgtcgacgccgaggcagagccgtccgcggcgggaacgagccaatcctgccccctgccccccacgccgagacccacggaggcgcctgtgtcgaggctgggcaggggagctccggggacgcgttacttccagcctcactggcctgagcgggccgtggaggaggccgtcaagagagggcatgctttcgtggggaagttcagggtgaatgctcacaaccgaaatgagggcgtactgtacgattgatggcgtctcggtggatgttctcattacaggattggcacaaaaccgagcggttgaaggtgatcttgttgctatcacactggaccctgttgctcactggactagaatgaaaggaccaaacgttgcgtgcaaccctctgataggagattctgtggtgtgtgaggttagtgaaacaaataggaatcatagttggaagaaaggacaggcagacgacggctgcaagtttgaaaattgcagtaacggagtacctgttttggataggacacatccccctcacaagaacagtggttttagtcaagctgttaagtgtggaaatgggaatgctactatccctgaaaggaatgagatagacttgaatgatggaaagagtgaggttgcaagagcattacaaaggatcagtgccacgatatactctcatccaagcagacgtcctactgggaaagtattatcaataattaagaagtctccgcgccgtgatgccattgtaggtttccttgcttctttctcagagttccctgacggagagcagcagaaaaaccagatgggtctaaacaggatgaacaacagaacacaatcagttacaggcttgttttatctcttgcctactgaccccaaattccctcagatggttgtgagttttagcactttgccagatagtgtcaggcagagcctaagaggtaacgtagctgttaagaaggaattggttgctgcacgaattgatgaatggaatgaggaaaacctctatccctatgcccatgttatacggttcttggggaaggttggacatgtcaaaacacacatggatgctatattatttgagaatgtgatctgtgatgctgagttttcccctgagtccttggcatgccttcctgacaattgttggaagattcctcaaaaagaacttgaagctagaaaagatttgaggaaggtcttgacttttacaatagaccctcctactgcatcggatctggatgatgctatatcaattgaaatactttcaggaggaactgtccgtattggggttcacattgctgatgtttcttactttttacatccagagactgctttagatgctgaagctcaaagtcgatctacaagtgtttacaccctgaaacataaaatctcaatgttgccttcaggattttcggaagtggtttcacttaatccaggtgtagataggcttgccttttcaattatttgggatattgatcctcatggtaacctaattagtcgttggattggtcgaagcatcatcttttcgtgctgcaagctgtcatatgagcttgtgcaggatctgatttgtaatgaaaccagtcagactaggcctgaagtttcttctcttgaagtacatggtatatttgggagagatgatgttatcaagtcacttagaggcctctatgaagtctcaaaaaatctgaaggaaattaggttcaagggtggagctctttctcttgatactgcaaagattatgatcctgtttgatgaagatggggatccatgtgatagctatcgttacgtgaggaagaatgcgtgcttcattgttgaggagctaatgttgttggcgaatatgtcagctgcagaagtcatatctaatgcatttcctgattgtgccttacttcgtaggcaccctgaacctaatttgcggaagtccagagagttcgaggcattttgtgctaagaatggttttgaattggatgtttcatcatctggtcaactccacctttcactttctagaataaaggaaaagctgcaggaggatcctgttatgtttgatattatcatgttttatgcttcaaagcaaatgcagtcagcagaatacttttgcacaggggacctgataagcaagaaagatgattgggcacattatgcgctgtctgtccctttgtatacacacttcacttcaccacttcgaagatatcctgatataattgttcacaggactctgaatgcggtgattgaagctgaacaagtgtatatgaaacagaagaaatcttccgcaggccagaatggagtcaaagcatcttgtgaattgatggatatgtgttttactggccttcagttgtgcaaggatgctgctgaatctgaagaagggaaaaaggcactttctgctgcagctaagaaatttaaggttccttcctctgaaaatcttggggagattgctgaacactgtaatgaaagaaagtgggctggtcgccgtgcagaagaagctggacagaagctctacatgtgggctctgataaagaacaaagagactgtggtatgcaatgctagagttctgggacttggtcccaggttcatgtcagtttatgtgcccaagcttgcgatggaacgaaggatatattatgatgaagttgagggattatcagttgaatggttagaagtcactggaacgttagtgcttgatacatgcaggaacaagcctgctcaaaggagaggaactcagatgaagcgcaggccgattgaggaagtcgcggtggtggtgaacccttcagagttgtctgaagaagacgaggaatcaggagcaacagaagctggcggctgcactgccaagtctgttttgttgagtggcgacgcagtgaaagctcagaccgccccagccgttctccccttggtgatacattaccttagtgacatccctgtggttcttcatgcaattggtggtgaggattgtgcggtggacattggcgtaagactgtacatggcgtcatacttcaagttataggaaacctcctgtcatgacaggaaatagttggtcgatttcaacagtttttcagtcgaacgaaagtaataaaatgatggtgggcaaattccaacttagtgctgtagatatttcattcatgtatagcaaattaggtacccttccagcacagaaaaagaaaacccctaccccaatccgttctttcccatcctgtgacatgaggttttgatggcagagtcaagtggcttccgtttttaatcccagactgcctgttgaggtaccaaaatggtggaagtgggagtctacattaatgccacactattttagtggttccatcaatgatcttctgctagtttgtgaaacgagggtttgttccttttgctcttaattcatgtggattgagtgagtttaaatcctaaataaattaaaaaattataattcattcaatcttatccaattcatatgggacagaaataactgaactagccctgatgtttttttatgggttcactcaaatgttgggataataagtctatttggtgattgttgctgtcgtttgtgtaattgtgttttcatccgtttcgtgaggccgagatatatggcgcagtactgcagtgctctttatgaagttgtggtcatgtaattattctttgcgattgcagttttacccgtgcacatgcgagcaactcagaaatgttgtatgacatccattttgttgagactaagctctcagtgtaag

SEQ ID NO: 41050 - DNA, 4096 bp, Zea Mays
cctcctcctccattcctacttccttcgctctctcctttatcccttccttgcagtccccttctctccccgacgcctcgtttttttatccatcggtgtcgacgaggggaccgacgaagcggaggacgcctcagatctagggttccttccttgcgtgcccttcgaggagagacagagagagggtctgcatcatgagggccaccggggagcacacaactgcggtgcccatgcccgccccgccgccgcctcctgctgcggcctctgcgagtgaggaagacgacaaggagaggaggaagaaccgccgccgctcctcgcggcgctccaggcaggcggccgttgccgcgccgcagggcctgcacgcggacgctgcggggccgaggacggtcagatcgatgccgcccatgcacgtgggcagcagcgccggcgtcgacgccgaggcagagccgtccgcggcgggaacgagccaatcctgccccctgccccccacgccgagacccacggaggcgcctgtgtcgaggctgggcaggggagctccggggacgcgttacttccagcctcactggcctgagcgggccgtggaggaggccgtcaaggagagggcatgctttcgtggggaagttcagggtgaatgctcacaaccgaaatgaggcgtactgtacgattgatggcgtctcggtggatgttctcattacaggattggcacaaaaccgagcggttgaaggtgatcttgttgctatcacactggaccctgttgctcactggactagaatgaaaggaccaaacgttgcgtgcaaccctctgataggagattctgtggtgtgtgaggttagtgaaacaaataggaatcatagttggaagaaaggacaggcagacgacggctgcaagtttgaaaattgcagtaacggagtacctgttttggataggacacatccccctcacaagaacagtggttttagtcaagctgttaagtgtggaaatgggaatgctactatccctgaaaggaatgagatagacttgaatgatggaaagagtgaggttgcaagagcattacaaaggatcagtgccacgatatactctcatccaagcagacgtcctactgggaaagtattatcaataattaagaagtctccgcgccgtgatgccattgtaggtttccttgcttctttctcagagttccctgacggagagcagcagaaaaaccagatgggtctaaacaggatgaacaacagaacacaatcagttacaggcttgttttatctcttgcctactgaccccaaattccctcagatggttgtgagttttagcactttgccagatagtgtcaggcagagcctaagaggtaacgtagctgttaagaaggaattggttgctgcacgaattgatgaatggaatgaggaaaacctctatccctatgcccatgttatacggttcttggggaaggttggacatgtcaaaacacacatggatgctatattatttgagaatgtgatctgtgatgctgagttttcccctgagtccttggcatgccttcctgacaattgttggaagattcctcaaaaagaacttgaagctagaaaagatttgaggaaggtcttgacttttacaatagaccctcctactgcatcggatctggatgatgctatatcaattgaaatactttcaggaggaactgtccgtattggggttcacattgctgatgtttcttactttttacatccagagactgctttagatgctgaagctcaaagtcgatctacaagtgtttacaccctgaaacataaaatctcaatgttgccttcaggattttcggaagtggtttcacttaatccaggtgtagataggcttgccttttcaattatttgggatattgatcctcatggtaacctaattagtcgttggattggtcgaagcatcatcttttcgtgctgcaagctgtcatatgagcttgtgcaggatctgatttgtaatgaaaccagtcagactaggcctgaagtttcttctcttgaagtacatggtatatttgggagagatgatgttatcaagtcacttagaggcctctatgaagtctcaaaaaatctgaaggaaattaggttcaagggtggagctctttctcttgatactgcaaagattatgatcctgtttgatgaagatggggatccatgtgatagctatcgttacgtgaggaagaatgcgtgcttcattgttgaggagctaatgttgttggcgaatatgtcagctgcagaagtcatatctaatgcatttcctgattgtgccttacttcgtaggcaccctgaacctaatttgcggaagtccagagagttcgaggcattttgtgctaagaatggttttgaattggatgtttcatcatctggtcaactccacctttcactttctagaataaaggaaaagctgcaggaggatcctgttatgtttgatattatcatgttttatgcttcaaagcaaatgcagtcagcagaatacttttgcacaggggacctgataagcaagaaagatgattgggcacattatgcgctgtctgtccctttgtatacacacttcacttcaccacttcgaagatatcctgatataattgttcacaggactctgaatgcggtgattgaagctgaacaagtgtatatgaaacagaagaaatcttccgcaggccagaatggagtcaaagcatcttgtgaattgatggatatgtgttttactggccttcagttgtgcaaggatgctgctgaatctgaagaagggaaaaaggcactttctgctgcagctaagaaatttaaggttccttcctctgaaaatcttggggagattgctgaacactgtaatgaaagaaagtgggctggtcgccgtgcagaagaagctggacagaagctctacatgtgggctctgataaagaacaaagagactgtggtatgcaatgctagagttctgggacttggtcccaggttcatgtcagtttatgtgcccaagcttgcgatggaacgaaggatatattatgatgaagttgagggattatcagttgaatggttagaagtcactggaacgttagtgcttgatacatgcaggaacaagcctgctcaaaggagaggaactcagatgaagcgcaggccgattgaggaagtcgcggtggtggtgaacccttcagagttgtctgaagaagacgaggaatcaggagcaacagaagctggcggctgcactgccaagtctgttttgttgagtggcgacgcagtgaaagctcagaccgccccagccgttctccccttggtgatacattaccttagtgacatccctgtggttcttcatgcaattggtggtgaggattgtgcggtggacattggcgtaagactgtacatggcgtcatacttcaagttataggaaacctcctgtcatgacaggaaatagttggtcgatttcaacagtttttcagtcgaacgaaagtaataaaatgatggtgggcaaattccaacttagtgctgtagatatttcattcatgtatagcaaattaggtacccttccagcacagaaaaagaaaacccctaccccaatccgttctttcccatcctgtgacatgaggttttgatggcagagtcaagtggcttccgtttttaatcccagactgcctgttgaggtaccaaaatggtggaagtgggagtctacattaatgccacactattttagtggttccatcaatgatcttctgctagtttgtgaaacgagggtttgttccttttgctcttaattcatgtggattgagtgagtttaaatcctaaataaattaaaaaattataattcattcaatcttatccaattcatatgggacagaaataactgaactagccctgatgtttttttatgggttcactcaaatgttgggataataagtctatttggtgattgttgctgtcgtttgtgtaattgtgttttcatccgtttcgtgaggccgagatatatggcgcagtactgcagtgctctttatgaagttgtggtcatgtaattattctttgcgattgcagttttacccgtgcacatgcgagcaactcagaaatgttgtatgacatccattttgttgagactaagctctcagtgtaag

SEQ ID NO: 41051 - DNA, 1179 bp, Zea Mays
gcgctcccggtctcggactctaggctcgctccagtttccgcctggctccaccaacaaaaaccaacgctccccctgcccccctctttcctccccagacccgcgctcccctccgtggcgtgcaacgcgttcctcggctcctgcaggcggcgacctcggaaaggcgggggcgtctcgtcgcgaggtcttgtctgtggattgaccaggcatttgaggccaggattttttggtgctctcattgttagctgactggtgagggtctggatctagcaatggcggaaaacacccacggtagtggtcgccacgtgcttggggacttgacaaatgttatttgcaagcgagcagccacatcagatctggagaagagtacaggtgggataaagatcagacggattgaaaagactgggactaggaaagagtacgatgcaaatgcaaaagctagcagtattgggaaaggaattgtatttggccatttgtttgatgatgttgccagagagaaatttcaaagccattctatctttcagaatagtagggttcaacacatagctgccgaagcagctggactcttatccaaggaagccaatgactcgaagaaccactatgcatcaatcggtccattagatctcagtgataaggagcaggattcttcacttgaatctgaagacgactatgatgatgaagataatgatgagacgaatggtgaattgctgcaccattttttcagctcagagctagctaataaaatgtcaacaaatgatggtgagtgcttgactcaggaggagatagttgggtcatctggaaatcagaaacctctgtcttcattggatgctacgacaggtggtgacttgccaatttctagtgctcagcatgcttctgtgagaactggtggtttggaagaagctgttgccccaaaatcttgtgcttgttctttctgtctcaaggctgcttttatgtggatggatctccattatcaggatgcaagaagccggctttctgtattgaagaaaagcatcaagtttgccaggtcattggaggaaaaatgtagaggaaatgaatatgcggccaatgtagctggatatgaatcaaagcgagctgtgggagtggagtttgaactatctcaacaacagagatcactctttctttatacagaaaatgcccttttgccatcaatatgcacctgtg

SEQ ID NO: 41052 - DNA, 1843 bp, Zea Mays
gcgctcccggtctcggactctaggctcgctccagtttccgcctggctccaccaacaaaaaccaacgctccccctgcccccctctttcctccccagacccgcgctcccctccgtggcgtgcaacgcgttcctcggctcctgcaggcggcgacctcggaaaggcgggggcgtctcgtcgcgaggcatttgaggccaggattttttggtgctctcattgttagctgactggtgagggtctggatctagcaatggcggaaaacacccacggtagtggtcgccacgtgcttggggacttgacaaatgttatttgcaagcgagcagccacatcagatctggagaagagtacaggtgggataaagatcagacggattgaaaagactgggactaggaaagagtacgatgcaaatgcaaaagctagcagtattgggaaaggaattgtatttggccatttgtttgatgatgttgccagagagaaatttcaaagccattctatctttcagaatagtagggttcaacacatagctgccgaagcagctggactcttatccaaggaagccaatgactcgaagaaccactatgcatcaatcggtccattagatctcagtgataaggagcaggattcttcacttgaatctgaagacgactatgatgatgaagataatgatgagacgaatggtgaattgctgcaccattttttcagctcagagctagctaataaaatgtcaacaaatgatggtgagtgcttgactcaggaggagatagttgggtcatctggaaatcagaaacctctgtcttcattggatgctacgacaggtggtgacttgccaatttctagtgctcagcatgcttctgtgagaactggtggtttggaagaagctgttgccccaaaatcttgtgcttgttctttctgtctcaaggctgcttttatgtggatggatctccattatcaggatgcaagaagccggctttctgtattgaagaaaagcatcaagtttgccaggtcattggaggaaaaatgtagaggaaatgaatatgcggccaatgtagctggatatgaatcaaagcgagctgtgggagtggagtttgaactatctcaacaacagagatcactctttctttatacagaaaatgcccttgtccttgccatcaatatgcacctgtgattatagcataaaacaatgtgcgtggcagtctgttgagcacacatctgctttcacatgttgatatggtttgattgctagaaggatcatggctctaagagaatgatctgtaataattggaattcatgtattctctgcttgtggtgttaaatcatttatctgggggctaatacaacaacaatgacaacaaagcctttcagtcccaaacaagttgggttaggctagagttgacacccaatagaaaacacaagttggcattctgcttttgtgaaactgaaagaattgagagagaactgcaagacagatcttgagacgctcagcaattcttcaatgagaaaatgagtgctgcatgttgcgttgctgaactgttagtttcctgagacttagtatgatcagctggcttgtcttgaagcaagatgtgctgagattgaaccacaacttaggaattatggtgcttaccatcaatttgggacttcaatttggctgtagtgattattcctatcataaagcgttggtctagtatgcttgtagctgatgtaaaaataaccatggtaaggtaggaactgtatgtttgtctcgttgaggcatcgtcatcttcacttgtaccttgcagtgagcttccttcatatgaacattctttccacgttctccaaacaaaagggaaaaccatatcgtttcgtgctt

SEQ ID NO: 41053 - DNA, 1530 bp, Zea Mays
gcgctcccggtctcggactctaggctcgctccagtttccgcctggctccaccaacaaaaaccaacgctccccctgcccccctctttcctccccagacccgcgctcccctccgtggcgtgcaacgcgttcctcggctcctgcaggcggcgacctcggaaaggcgggggcgtctcgtcgcgaggtcttgtctgtggattgaccaggcatttgaggccaggattttttggtgctctcattgttagctgactggtgagggtctggatctagcaatggcggaaaacacccacggtagtggtcgccacgtgcttggggacttgacaaatgttatttgcaagcgagcagccacatcagatctggagaagagtacaggtgggataaagatcagacggattgaaaagactgggactaggaaagagtacgatgcaaatgcaaaagctagcagtattgggaaaggaattgtatttggccatttgtttgatgatgttgccagagagaaatttcaaagccattctatctttcagaatagtagggttcaacacatagctgccgaagcagctggactcttatccaaggaagccaatgactcgaagaaccactatgcatcaatcggtccattagatctcagtgataaggagcaggattcttcacttgaatctgaagacgactatgatgatgaagataatgatgagacgaatggaggagatagttgggtcatctggaaatcagaaacctctgtcttcattggatgctacgacaggtggtgacttgccaatttctagtgctcagcatgcttctgtgagaactggtggtttggaagaagctgttgccccaaaatcttgtgcttgttctttctgtctcaaggctgcttttatgtggatggatctccattatcaggatgcaagaagccggctttctgtattgaagaaaagcatcaagtttgccaggtcattggaggaaaaatgtagaggaaatgaatatgcggccaatgtagctggatatgaatcaaagcgagctgtgggagtggagtttgaactatctcaacaacagagatcactctttctttatacagaaaatgcccttgtccgtgagtcaacgcagcttcattctgcttttgtgaaactgaaagaattgagagagaactgcaagacagatcttgagacgctcagcaattcttcaatgagaaaatgagtgctgcatgttgcgttgctgaactgttagtttcctgagacttagtatgatcagctggcttgtcttgaagcaagatgtgctgagattgaaccacaacttaggaattatggtgcttaccatcaatttgggacttcaatttggctgtagtgattattcctatcataaagcgttggtctagtatgcttgtagctgatgtaaaaataaccatggtaaggtaggaactgtatgtttgtctcgttgaggcatcgtcatcttcacttgtaccttgcagtgagcttccttcatatgaacattctttccacgttctccaaacaaaagggaaaaccatatcgtttcgtgctt

SEQ ID NO: 41054 - DNA, 1529 bp, Zea Mays
gcgctcccggtctcggactctaggctcgctccagtttccgcctggctccaccaacaaaaaccaacgctccccctgcccccctctttcctccccagacccgcgctcccctccgtggcgtgcaacgcgttcctcggctcctgcaggcggcgacctcggaaaggcgggggcgtctcgtcgcgaggtcttgtctgtggattgaccaggcatttgaggccaggattttttggtgctctcattgttagctgactggtgagggtctggatctagcaatggcggaaaacacccacggtagtggtcgccacgtgcttggggacttgacaaatgttatttgcaagcgagcagccacatcagatctggagaagagtacaggtgggataaagatcagacggattgaaaagactgggactaggaaagagtacgatgcaaatgcaaaagctagcagtattgggaaaggaattgtatttggccatttgtttgatgatgttgccagagagaaatttcaaagccattctatctttcagaatagtagggttcaacacatagctgccgaagcagctggactcttatccaaggaagccaatgactcgaagaaccactatgcatcaatcggtccattagatctcagtgataaggagcaggattcttcacttgaatctgaagacgactatgatgatgaagataatgatgagacgaatggtgaattgctgcaccattttttcagctcagagctagctaataaaatgtcaacaaatgatggtggtgacttgccaatttctagtgctcagcatgcttctgtgagaactggtggtttggaagaagctgttgccccaaaatcttgtgcttgttctttctgtctcaaggctgcttttatgtggatggatctccattatcaggatgcaagaagccggctttctgtattgaagaaaagcatcaagtttgccaggtcattggaggaaaaatgtagaggaaatgaatatgcggccaatgtagctggatatgaatcaaagcgagctgtgggagtggagtttgaactatctcaacaacagagatcactctttctttatacagaaaatgcccttgtccgtgagtcaacgcagcttcattctgcttttgtgaaactgaaagaattgagagagaactgcaagacagatcttgagacgctcagcaattcttcaatgagaaaatgagtgctgcatgttgcgttgctgaactgttagtttcctgagacttagtatgatcagctggcttgtcttgaagcaagatgtgctgagattgaaccacaacttaggaattatggtgcttaccatcaatttgggacttcaatttggctgtagtgattattcctatcataaagcgttggtctagtatgcttgtagctgatgtaaaaataaccatggtaaggtaggaactgtatgtttgtctcgttgaggcatcgtcatcttcacttgtaccttgcagtgagcttccttcatatgaacattctttccacgttctccaaacaaaagggaaaaccatatcgtttcgtgctt

SEQ ID NO: 41055 - DNA, 1428 bp, Zea Mays
ctcgcgcccccctcccttcccctggcatttgaggccaggattttttggtgctctcattgttagctgactggtgagggtctggatctagcaatggcggaaaacacccacggtagtggtcgccacgtgcttggggacttgacaaatgttatttgcaagcgagcagccacatcagatctggagaagagtacaggtgggataaagatcagacggattgaaaagactgggactaggaaagagtacgatgcaaatgcaaaagctagcagtattgggaaaggaattgtatttggccatttgtttgatgatgttgccagagagaaatttcaaagccattctatctttcagaatagtagggttcaacacatagctgccgaagcagctggactcttatccaaggaagccaatgactcgaagaaccactatgcatcaatcggtccattagatctcagtgataaggagcaggattcttcacttgaatctgaagacgactatgatgatgaagataatgatgagacgaatggtgaattgctgcaccattttttcagctcagagctagctaataaaatgtcaacaaatgatggtgagtgcttgactcaggaggagatagttgggtcatctggaaatcagaaacctctgtcttcattggatgctacgacaggtggtgacttgccaatttctagtgctcagcatgcttctgtgagaactggtggtttggaagaagctgttgccccaaaatcttgtgcttgttctttctgtctcaaggctgcttttatgtggatggatctccattatcaggatgcaagaagccggctttctgtattgaagaaaagcatcaagtttgccaggtcattggaggaaaaatgtagaggaaatgaatatgcggccaatgtagctggatatgaatcaaagcgagctgtgggagtggagtttgaactatctcaacaacagagatcactctttctttatacagaaaatgcccttgtccgtgagtcaacgcagcttcattctgcttttgtgaaactgaaagaattgagagagaactgcaagacagatcttgagacgctcagcaattcttcaatgagaaaatgagtgctgcatgttgcgttgctgaactgttagtttcctgagacttagtatgatcagctggcttgtcttgaagcaagatgtgctgagattgaaccacaacttaggaattatggtgcttaccatcaatttgggacttcaatttggctgtagtgattattcctatcataaagcgttggtctagtatgcttgtagctgatgtaaaaataaccatggtaaggtaggaactgtatgtttgtctcgttgaggcatcgtcatcttcacttgtaccttgcagtgagcttccttcatatgaacattctttccacgttctccaaacaaaagggaaaaccatatcgtttcgtgctt

SEQ ID NO: 41056 - DNA, 2194 bp, Zea Mays
ccaatcgacggcagccgtccgatgcgatcaccgcatcccgttcgcataggattttccatcccaggcatgggcgttgggcgagcagtcccccccttccacccgcgttcgcttcttccccagcatccagcaaggaaggaggaagaagaagagggaggagaggggacggtccgcgaatcctgcctagccttcgccgccttcctccgctcgagcggctcgccgaggaaatagcgaaagggcgctatgagttcagcgaatggtacaaccaatgtccatgggaaagaagcagcaccgtatgaggagcagctgttcaagattggtaaagttagaactgacctaggacaactatctggaaaatcagctctatattgctcagatgcttcaattgcaaggtacctgatagcaaggaactgggacataaggaaggctactaaaatgctgaagaaaaccttaaaatggcgttcagaatataagccagatgaaatccgttgggtgagatgcaacctctctgtatttgcgggaagaaggtttgccttggtttattactttcctagatcctacccatgtgggaacctccagcacttggtttattacttgctttgaaggatgtgacaatgttttgatgaaggatgtgacaaagttttgatgaaggatatgacaatgtgtgattaggtttatgtcagcacaaagcttttcagcatgctttgtgaaacatctggtgcattatgacatctgatttgacgggttataatctggtagaaaatcttattttgcatttcttcatgtaggatgacatatctgatgaagcggtaactggaaaaacttaccgaactgattactttgacaagatcgggcggagtatccttgtcatgagacctggatgccagaataccaagaatgccaatgggcaagtcaagtacttggtgtactgtatggagaatgcaattctaaatctgccacatggtcaggatcagatggtttggctcattgattttgctggtttcaatttaggcaacttgtcaattcaggtgacaaagatgacggcagatgtcctacaaggccattatcctgaaaggttgggtgtggcaattctttttaacgctccaaagttttttgagcctttctggaagatggcaagcccccttcttgagaagaagaccagaaacaaggtcaaatttgtatactcagatagacctgacaccatgaagatcatggaagaccttttcaacatggatgagttagaatgtgcgtttggtggcaagaacccagctactttcaatataaatgattatgctgcgaggatgagagaagatgacaagaagatgccatcattttggagccctgagaattcagctcttgcttctgagccatatcagatgagcagccaaaaagccctaggaagcgtttcaggtgcgaagactgaagatgctggatctggaaagatggacgacatggagactgctcctgaaaagagtgaagaatcgggtactgaatctggagaggaggtacaaacacggactgaatcaagcacagttgagcagaaaaacttgcctggagaagataatgccccagcagataaaagtggcctttaatctgatctccgggtatcaccatgaaacataaatgtgaaacattgataggagctctaccacatttcactaaggtttgaacatgaaaggcgacgagaaactcttttaacacggcaaatcggcatgcctgacttgttttgtagtcggcacctatttctctgtcctcaagatcttatttggggaaccttttcatgacagaatgagatctaccagatggtaaagaactaataccatactgttaccctcagttttcatgacagaatatggtctggtgttcagtttctgatatgcccttgtattttcgctggaaaagaaaaatactattgtatctggagctgttgggttaataatatatcattgttcagtttgtattctgttcagtaaccaccattgactttcagttagtatagccccacttggtacaaagacaagtgttaggcttcaaaaacttgggccttttcgctacaaacgtttatgatctttgtaacctactctatcatcacgagtcaaaacttcagaagtcgtcatagaagctgtgtctcttgggtatcgcgggggagtcgcagtggatcctagcgtccagagtcgagtagccctttctgatcttg

SEQ ID NO: 41057 - DNA, 2119 bp, Zea Mays
gggcgttgggcgagcagtcccccccttccacccgcgttcgcttcttccccagcatccagcaaggaaggaggaagaagaagagggaggagaggggacggtccgcgaatcctgcctagccttcgccgccttcctccgctcgagcggctcgccgagcgaaagggcgctatgagttcagcgaatggtacaaccaatgtccatgggaaagaagcagcaccgtatgaggagcagctgttcaagattggtaaagttagaactgacctaggacaactatctggaaaatcagctctatattgctcagatgcttcaattgcaaggtacctgatagcaaggaactgggacataaggaaggctactaaaatgctgaagaaaaccttaaaatggcgttcagaatataagccagatgaaatccgttgggtgagatgcaacctctctgtatttgcgggaagaaggtttgccttggtttattactttcctagatcctacccatgtgggaacctccagcacttggtttattacttgctttgaaggatgtgacaatgttttgatgaaggatgtgacaaagttttgatgaaggatatgacaatgtgtgattaggtttatgtcagcacaaagcttttcagcatgctttgtgaaacatctggtgcattatgacatctgatttgacgggttataatctggtagaaaatcttattttgcatttcttcatgtaggatgacatatctgatgaagcggtaactggaaaaacttaccgaactgattactttgacaagatcgggcggagtatccttgtcatgagacctggatgccagaataccaagaatgccaatgggcaagtcaagtacttggtgtactgtatggagaatgcaattctaaatctgccacatggtcaggatcagatggtttggctcattgattttgctggtttcaatttaggcaacttgtcaattcaggtgacaaagatgacggcagatgtcctacaaggccattatcctgaaaggttgggtgtggcaattctttttaacgctccaaagttttttgagcctttctggaagatggcaagcccccttcttgagaagaagaccagaaacaaggtcaaatttgtatactcagatagacctgacaccatgaagatcatggaagaccttttcaacatggatgagttagaatgtgcgtttggtggcaagaacccagctactttcaatataaatgattatgctgcgaggatgagagaagatgacaagaagatgccatcattttggagccctgagaattcagctcttgcttctgagccatatcagatgagcagccaaaaagccctaggaagcgtttcaggtgcgaagactgaagatgctggatctggaaagatggacgacatggagactgctcctgaaaagagtgaagaatcgggtactgaatctggagaggaggtacaaacacggactgaatcaagcacagttgagcagaaaaacttgcctggagaagataatgccccagcagataaaagtggcctttaatctgatctccgggtatcaccatgaaacataaatgtgaaacattgataggagctctaccacatttcactaaggtttgaacatgaaaggcgacgagaaactcttttaacacggcaaatcggcatgcctgacttgttttgtagtcggcacctatttctctgtcctcaagatcttatttggggaaccttttcatgacagaatgagatctaccagatggtaaagaactaataccatactgttaccctcagttttcatgacagaatatggtctggtgttcagtttctgatatgcccttgtattttcgctggaaaagaaaaatactattgtatctggagctgttgggttaataatatatcattgttcagtttgtattctgttcagtaaccaccattgactttcagttagtatagccccacttggtacaaagacaagtgttaggcttcaaaaacttgggccttttcgctacaaacgtttatgatctttgtaacctactctatcatcacgagtcaaaacttcagaagtcgtcatagaagctgtgtctcttgggtatcgcgggggagtcgcagtggatcctagcgtccagagtcgagtagccctttctgatcttg

SEQ ID NO: 41058 - DNA, 1823 bp, Zea Mays
gggcgttgggcgagcagtcccccccttccacccgcgttcgcttcttccccagcatccagcaaggaaggaggaagaagaagagggaggagaggggacggtccgcgaatcctgcctagccttcgccgccttcctccgctcgagcggctcgccgagcgaaagggcgctatgagttcagcgaatggtacaaccaatgtccatgggaaagaagcagcaccgtatgaggagcagctgttcaagattggtaaagttagaactgacctaggacaactatctggaaaatcagctctatattgctcagatgcttcaattgcaaggtacctgatagcaaggaactgggacataaggaaggctactaaaatgctgaagaaaaccttaaaatggcgttcagaatataagccagatgaaatccgttgggatgacatatctgatgaagcggtaactggaaaaacttaccgaactgattactttgacaagatcgggcggagtatccttgtcatgagacctggatgccagaataccaagaatgccaatgggcaagtcaagtacttggtgtactgtatggagaatgcaattctaaatctgccacatggtcaggatcagatggtttggctcattgattttgctggtttcaatttaggcaacttgtcaattcaggtgacaaagatgacggcagatgtcctacaaggccattatcctgaaaggttgggtgtggcaattctttttaacgctccaaagttttttgagcctttctggaagatggcaagcccccttcttgagaagaagaccagaaacaaggtcaaatttgtatactcagatagacctgacaccatgaagatcatggaagaccttttcaacatggatgagttagaatgtgcgtttggtggcaagaacccagctactttcaatataaatgattatgctgcgaggatgagagaagatgacaagaagatgccatcattttggagccctgagaattcagctcttgcttctgagccatatcagatgagcagccaaaaagccctaggaagcgtttcaggtgcgaagactgaagatgctggatctggaaagatggacgacatggagactgctcctgaaaagagtgaagaatcgggtactgaatctggagaggaggtacaaacacggactgaatcaagcacagttgagcagaaaaacttgcctggagaagataatgccccagcagataaaagtggcctttaatctgatctccgggtatcaccatgaaacataaatgtgaaacattgataggagctctaccacatttcactaaggtttgaacatgaaaggcgacgagaaactcttttaacacggcaaatcggcatgcctgacttgttttgtagtcggcacctatttctctgtcctcaagatcttatttggggaaccttttcatgacagaatgagatctaccagatggtaaagaactaataccatactgttaccctcagttttcatgacagaatatggtctggtgttcagtttctgatatgcccttgtattttcgctggaaaagaaaaatactattgtatctggagctgttgggttaataatatatcattgttcagtttgtattctgttcagtaaccaccattgactttcagttagtatagccccacttggtacaaagacaagtgttaggcttcaaaaacttgggccttttcgctacaaacgtttatgatctttgtaacctactctatcatcacgagtcaaaacttcagaagtcgtcatagaagctgtgtctcttgggtatcgcgggggagtcgcagtggatcctagcgtccagagtcgagtagccctttctgatcttg

SEQ ID NO: 41059 - DNA, 1853 bp, Zea Mays
ggcgttgggcgagcagtcccccccttccacccgcgttcgcttcttccccagcatccagcaaggaaggaggaagaagaagagggaggagaggggacggtccgcgaatcctgcctagccttcgccgccttcctccgctcgagcggctcgccgaggaaatagcgaaagggcgctatgagttcagcgaatggtacaaccaatgtccatgggaaagaagcagcaccgtatgaggagcagctgttcaaggtgatttaatgtcaccaggattcgattggtaaagttagaactgacctaggacaactatctggaaaatcagctctatattgctcagatgcttcaattgcaaggtacctgatagcaaggaactgggacataaggaaggctactaaaatgctgaagaaaaccttaaaatggcgttcagaatataagccagatgaaatccgttgggatgacatatctgatgaagcggtaactggaaaaacttaccgaactgattactttgacaagatcgggcggagtatccttgtcatgagacctggatgccagaataccaagaatgccaatgggcaagtcaagtacttggtgtactgtatggagaatgcaattctaaatctgccacatggtcaggatcagatggtttggctcattgattttgctggtttcaatttaggcaacttgtcaattcaggtgacaaagatgacggcagatgtcctacaaggccattatcctgaaaggttgggtgtggcaattctttttaacgctccaaagttttttgagcctttctggaagatggcaagcccccttcttgagaagaagaccagaaacaaggtcaaatttgtatactcagatagacctgacaccatgaagatcatggaagaccttttcaacatggatgagttagaatgtgcgtttggtggcaagaacccagctactttcaatataaatgattatgctgcgaggatgagagaagatgacaagaagatgccatcattttggagccctgagaattcagctcttgcttctgagccatatcagatgagcagccaaaaagccctaggaagcgtttcaggtgcgaagactgaagatgctggatctggaaagatggacgacatggagactgctcctgaaaagagtgaagaatcgggtactgaatctggagaggaggtacaaacacggactgaatcaagcacagttgagcagaaaaacttgcctggagaagataatgccccagcagataaaagtggcctttaatctgatctccgggtatcaccatgaaacataaatgtgaaacattgataggagctctaccacatttcactaaggtttgaacatgaaaggcgacgagaaactcttttaacacggcaaatcggcatgcctgacttgttttgtagtcggcacctatttctctgtcctcaagatcttatttggggaaccttttcatgacagaatgagatctaccagatggtaaagaactaataccatactgttaccctcagttttcatgacagaatatggtctggtgttcagtttctgatatgcccttgtattttcgctggaaaagaaaaatactattgtatctggagctgttgggttaataatatatcattgttcagtttgtattctgttcagtaaccaccattgactttcagttagtatagccccacttggtacaaagacaagtgttaggcttcaaaaacttgggccttttcgctacaaacgtttatgatctttgtaacctactctatcatcacgagtcaaaacttcagaagtcgtcatagaagctgtgtctcttgggtatcgcgggggagtcgcagtggatcctagcgtccagagtcgagtagccctttctgatcttg

SEQ ID NO: 41060 - DNA, 761 bp, Zea Mays
gcgagcagtcccccccttccacccgcgttcgcttcttccccagcatccagcaaggaaggaggaagaagaagagggaggagaggggacggtccgcgaatcctgcctagccttcgccgccttcctccgctcgagcggctcgccgaggaaatagcgaaagggcgctatgagttcagcgaatggtacaaccaatgtccatgggaaagaagcagcaccgtatgaggagcagctgttcaagattggtaaagttagaactgacctaggacaactatctggaaaatcagctctatattgctcagatgcttcaattgcaaggtacctgatagcaaggaactgggacataaggaaggctactaaaatgctgaagaaaaccttaaaatggcgttcagaatataagccagatgaaatccgttgggatgacatatctgatgaagcggtaactggaaaaacttaccgaactgattactttgacaagatcgggcggagtatccttgtcatgagacctggatgccagaataccaagaatgccaatgggcaagtcaagtacttggtgtactgtatggagaatgcaattctaaatctgccacatggtcaggatcagatggtttggctcattgattttgctggtttcaatttaggcaacttgtcaattcaggtgacaaagatgacggcagatgtcctacaaggccattatcctgaaaggttgggtgtggcaattctttttaacgctccaaagttttttgagcctttctggaagatctgaa

SEQ ID NO: 41061 - DNA, 1845 bp, Zea Mays
cccccttccacccgcgttcgcttcttccccagcatccagcaaggaaggaggaagaagaagagggaggagaggggacggtccgcgaatcctgcctagccttcgccgccttcctccgctcgagcggctcgccgaggaaatagcgaaagggcgctatgagttcagcgaatggtacaaccaatgtccatgggaaagaagcagcaccgtatgaggagcagctgttcaagattggtaaagttagaactgacctaggacaactatctggaaaatcagctctatattgctcagatgcttcaattgcaaggtacctgatagcaaggaactgggacataaggaaggctactaaaatgctgaagaaaaccttaaaatggcgttcagaatataagccagatgaaatccgttgggtgagatgcaacctctctgtatttgcgggaagaaggatgacatatctgatgaagcggtaactggaaaaacttaccgaactgattactttgacaagatcgggcggagtatccttgtcatgagacctggatgccagaataccaagaatgccaatgggcaagtcaagtacttggtgtactgtatggagaatgcaattctaaatctgccacatggtcaggatcagatggtttggctcattgattttgctggtttcaatttaggcaacttgtcaattcaggtgacaaagatgacggcagatgtcctacaaggccattatcctgaaaggttgggtgtggcaattctttttaacgctccaaagttttttgagcctttctggaagatggcaagcccccttcttgagaagaagaccagaaacaaggtcaaatttgtatactcagatagacctgacaccatgaagatcatggaagaccttttcaacatggatgagttagaatgtgcgtttggtggcaagaacccagctactttcaatataaatgattatgctgcgaggatgagagaagatgacaagaagatgccatcattttggagccctgagaattcagctcttgcttctgagccatatcagatgagcagccaaaaagccctaggaagcgtttcaggtgcgaagactgaagatgctggatctggaaagatggacgacatggagactgctcctgaaaagagtgaagaatcgggtactgaatctggagaggaggtacaaacacggactgaatcaagcacagttgagcagaaaaacttgcctggagaagataatgccccagcagataaaagtggcctttaatctgatctccgggtatcaccatgaaacataaatgtgaaacattgataggagctctaccacatttcactaaggtttgaacatgaaaggcgacgagaaactcttttaacacggcaaatcggcatgcctgacttgttttgtagtcggcacctatttctctgtcctcaagatcttatttggggaaccttttcatgacagaatgagatctaccagatggtaaagaactaataccatactgttaccctcagttttcatgacagaatatggtctggtgttcagtttctgatatgcccttgtattttcgctggaaaagaaaaatactattgtatctggagctgttgggttaataatatatcattgttcagtttgtattctgttcagtaaccaccattgactttcagttagtatagccccacttggtacaaagacaagtgttaggcttcaaaaacttgggccttttcgctacaaacgtttatgatctttgtaacctactctatcatcacgagtcaaaacttcagaagtcgtcatagaagctgtgtctcttgggtatcgcgggggagtcgcagtggatcctagcgtccagagtcgagtagccctttctgatcttg

SEQ ID NO: 41062 - DNA, 1610 bp, Zea Mays
attttctttgtttggcactaaatgattggtaaagttagaactgacctaggacaactatctggaaaatcagctctatattgctcagatgcttcaattgcaaggtacctgatagcaaggaactgggacataaggaaggctactaaaatgctgaagaaaaccttaaaatggcgttcagaatataagccagatgaaatccgttgggatgacatatctgatgaagcggtaactggaaaaacttaccgaactgattactttgacaagatcgggcggagtatccttgtcatgagacctggatgccagaataccaagaatgccaatgggcaagtcaagtacttggtgtactgtatggagaatgcaattctaaatctgccacatggtcaggatcagatggtttggctcattgattttgctggtttcaatttaggcaacttgtcaattcaggtgacaaagatgacggcagatgtcctacaaggccattatcctgaaaggttgggtgtggcaattctttttaacgctccaaagttttttgagcctttctggaagatggcaagcccccttcttgagaagaagaccagaaacaaggtcaaatttgtatactcagatagacctgacaccatgaagatcatggaagaccttttcaacatggatgagttagaatgtgcgtttggtggcaagaacccagctactttcaatataaatgattatgctgcgaggatgagagaagatgacaagaagatgccatcattttggagccctgagaattcagctcttgcttctgagccatatcagatgagcagccaaaaagccctaggaagcgtttcaggtgcgaagactgaagatgctggatctggaaagatggacgacatggagactgctcctgaaaagagtgaagaatcgggtactgaatctggagaggaggtacaaacacggactgaatcaagcacagttgagcagaaaaacttgcctggagaagataatgccccagcagataaaagtggcctttaatctgatctccgggtatcaccatgaaacataaatgtgaaacattgataggagctctaccacatttcactaaggtttgaacatgaaaggcgacgagaaactcttttaacacggcaaatcggcatgcctgacttgttttgtagtcggcacctatttctctgtcctcaagatcttatttggggaaccttttcatgacagaatgagatctaccagatggtaaagaactaataccatactgttaccctcagttttcatgacagaatatggtctggtgttcagtttctgatatgcccttgtattttcgctggaaaagaaaaatactattgtatctggagctgttgggttaataatatatcattgttcagtttgtattctgttcagtaaccaccattgactttcagttagtatagccccacttggtacaaagacaagtgttaggcttcaaaaacttgggccttttcgctacaaacgtttatgatctttgtaacctactctatcatcacgagtcaaaacttcagaagtcgtcatagaagctgtgtctcttgggtatcgcgggggagtcgcagtggatcctagcgtccagagtcgagtagccctttctgatcttg

SEQ ID NO: 41063 - DNA, 1122 bp, Zea Mays
caagcgggatagcccacgaacccgcatataggcttacttttgtgggttgctcatgatggcaagcccccttcttgagaagaagaccagaaacaaggtcaaatttgtatactcagatagacctgacaccatgaagatcatggaagaccttttcaacatggatgagttagaatgtgcgtttggtggcaagaacccagctactttcaatataaatgattatgctgcgaggatgagagaagatgacaagaagatgccatcattttggagccctgagaattcagctcttgcttctgagccatatcagatgagcagccaaaaagccctaggaagcgtttcaggtgcgaagactgaagatgctggatctggaaagatggacgacatggagactgctcctgaaaagagtgaagaatcgggtactgaatctggagaggaggtacaaacacggactgaatcaagcacagttgagcagaaaaacttgcctggagaagataatgccccagcagataaaagtggcctttaatctgatctccgggtatcaccatgaaacataaatgtgaaacattgataggagctctaccacatttcactaaggtttgaacatgaaaggcgacgagaaactcttttaacacggcaaatcggcatgcctgacttgttttgtagtcggcacctatttctctgtcctcaagatcttatttggggaaccttttcatgacagaatgagatctaccagatggtaaagaactaataccatactgttaccctcagttttcatgacagaatatggtctggtgttcagtttctgatatgcccttgtattttcgctggaaaagaaaaatactattgtatctggagctgttgggttaataatatatcattgttcagtttgtattctgttcagtaaccaccattgactttcagttagtatagccccacttggtacaaagacaagtgttaggcttcaaaaacttgggccttttcgctacaaacgtttatgatctttgtaacctactctatcatcacgagtcaaaacttcagaagtcgtcatagaagctgtgtctcttgggtatcgcgggggagtcgcagtggatcctagcgtccagagtcgagtagccctttctgatcttg

SEQ ID NO: 41064 - DNA, 1289 bp, Zea Mays
ggtgcgcccgcggcccgcatggccgagacgcgccagcgccgggctcccgcgctacgcgcccgtcgtgggcagatccggccgagcccgtgcctgcacaggagaccgcgcccgtgcagagggccatccccgccgccttgggccgcctcgctgcgcccatgcacgagccgaagaccgacgccgcgggcggtgtctgcgccgcgtctggtgtccgggcgttgtccgacgttcgtgcgcgcccgaaacgcgcccgcgccggggctgagtcgcgccgccgcgcctgcgctgtgagccggtcgtgccgcgcccacagccggcgtggccagatccgtgcccgagacgaccggtgctcaccgtggccgcgatagccctgatgacgtccggctttgatggtgatgtgagtggtagttaattcgaaatagaaccataggcatcgtaccttctacttctttcaccaacagcgagcacttgttccctctaacaggaaaaaaaaaattctctgatttcttgagacagtgctgataacgtgttataactcagtggctaacccagtggagagagacaaagagaaacgacaaatgaccggactgtcctttattgcagggatgcattcaggaactgaggagcggacgtcgcagccaagtgggacgccacgccatatgcccgtgcggccatgccaacgtgctgcgcggtgccccggcgggccgcgcctcggcacgcgtccactccagtgagcacggcagacgcgacgcctggcaagcagaggaagcagtagacggtagaccactactcaactagtagagcttcaagacttgctcgtgcaacaggtaatccaaacgtttgtttgcatgcacaccgaggcgctagattcggaccgacaacacgaggccgggccgatccacatgacgagggtgtcggcttagacacagctcatgtggatgattttattgaccccatgagacggtaggcaacttaacatatcacaacttggatgggaattcagttcactcttccatatgcgcctgttgttccaaaaacatccaggcagaagttctgggagctattttatggaggatttaggagaataagaataatcatgtctttagaggagaggagtctgatgttcatataattcttgcaatggtacttagtgatataaacatacggcgccatcgtttcccccgaatgcgcgaggggctctgtcctaagatggtgtgagcatgtaactatcaactgtctgttcttaatttgtttcgcattccggtcgaatgatttcaattgatcaatgaaag

SEQ ID NO: 41065 - DNA, 1074 bp, Zea Mays
ccgcggcccgcatggccgagacgcgccagcgccgggctcccgcgctacgcgcccgtcgtgggcagatccggccgagcccgtgcctgcacaggagaccgcgcccgtgcagagggccatccccgccgccttgggccgcctcgctgcgcccatgcacgagccgaagaccgacgccgcgggcggtgtctgcgccgcgtctggtgtccgggcgttgtccgacgttcgtgcgcgcccgaaacgcgcccgcgccggggctgagtcgcgccgccgcgcctgcgctgtgagccggtcgtgccgcgcccacagccggcgtggccagatccgtgcccgagacgaccggtgctcaccgtggccgcgatagccctgatgacgtccggctttgatggtgatatgcattcaggaactgaggagcggacgtcgcagccaagtgggacgccacgccatatgcccgtgcggccatgccaacgtgctgcgcggtgccccggcgggccgcgcctcggcacgcgtccactccagtgagcacggcagacgcgacgcctggcaagcagaggaagcagtagacggtagaccactactcaactagtagagcttcaagacttgctcgtgcaacaggtaatccaaacgtttgtttgcatgcacaccgaggcgctagattcggaccgacaacacgaggccgggccgatccacatgacgagggtgtcggcttagacacagctcatgtggatgattttattgaccccatgagacggtaggcaacttaacatatcacaacttggatgggaattcagttcactcttccatatgcgcctgttgttccaaaaacatccaggcagaagttctgggagctattttatggaggatttaggagaataagaataatcatgtctttagaggagaggagtctgatgttcatataattcttgcaatggtacttagtgatataaacatacggcgccatcgtttcccccgaatgcgcgaggggctctgtcctaagatggtgtgagcatgtaactatcaactgtctgttcttaatttgtttcgcattccggtcgaatgatttcaattgatcaatgaaag

SEQ ID NO: 41066 - DNA, 1448 bp, Zea Mays
gagcaatgcgtcattggattgtcgtgcatgtttgtttgactgtttattttgaaatggaaaacaagttcggcctgtttccacataggatgccaaaaagccatgactacggtctacggcagcagtacagaacagggaagaaggcgacgagacccagggcggtcaaaacgccagagatagaagccatcgccgacgtcgaatcccggccggcggtctgtttcctcctcctcctgctgctgctgactgcccgcctcgcgccgcgcatagaatccctcgctctgcctcgccctcggcctcggcatcgccactcgctttcacgctccatcatcaccaatggctcgatgccaaaaccgcaattaaaaatttcggcttgggcgtatccgtcaatacaccgagaggaggaagcctgcccactaccgcgtatctctctcctccctggctctcatccccccaccgagtcgtcgccccctcgctttcaccccacgcggaagcaagaattcgtcgtcaaattcccagcttgcgcgtgtttctgtggatttcttcccgcttccctgctcctgcctcctatgggcctttgatccggggcttcgtggatcttgggaagaggaggtgcggtgggcgcctcggcggcgatctggcggggaggatatggccagcgggaaggagccgatcgaggtcaggtttcgtctcttcgacggcacggatatcgggcctacgaagtacgatccctccaccacggtctcctcgctcaaggagttcatcctcgctcggtggccgcaaggatattggagaataaccggacacttgcagagtcccgtgttccagtaggagagatcccaggtggtgtaattacaatgcatgtggtagtgcggcctccacaagctgacaaaaacagtgagaagcagcttgccaattcccccaagcagaacagatgtggatgcaccattctctgataaggcgtctgcttggtgctgtacaatctgtgtgtacacataagattttgtatgtgctttgctgtgttcacacaagcatggattcgttttgatatccaattcttgaagccatacaaattccagaagtaagaacccacggaatacgaagatttctggatcgttttgttctagagtgtaggattggatgcttcctgctgtataaattgtgttgtcaaaactgaaaaaaaagtctctttcttttctgctatattgacttattatcgattctttctagctcggttgcttttgattcgtgtaacagaaatattgtactcatgtatatgtaacttgcaaaaggagtaatgtatggtgttatggtaattggtaaaggggaaacaaagaggtgaaaagagcgcatggctgtccaatggttttacatttgattatttggtgagcatgacctgaccctgcatgcagtagatgaaggtccagtgatgaccgtggacacaatttgctctg

SEQ ID NO: 41067 - DNA, 1230 bp, Zea Mays
gtttgtttgactgtttattttgaaatggaaaacaagttcggcctgtttccacataggatgccaaaaagccatgactacggtctacggcagcagtacagaacagggaagaaggcgacgagacccagggcggtcaaaacgccagagatagaagccatcgccgacgtcgaatcccggccggcggtctgtttcctcctcctcctgctgctgctgactgcccgcctcgcgccgcgcatagaatccctcgctctgcctcgccctcggcctcggcatcgccactcgctttcacgctccatcatcaccaatggctcgatgccaaaaccgcaattaaaaatttcggcttgggcgtatccgtcaatacaccgagaggaggaagcctgcccactaccgcgtatctctctcctccctggctctcatccccccaccgagtcgtcgccccctcgctttcaccccacgcggaagcaagaattcgtcgtcaaattcccagcttgcgcgtgtttctgtggatttcttcccgcttccctgctcctgcctcctatgggcctttgatccggggcttcgtggatcttgggaagaggaggtgcggtgggcgcctcggcggcgatctggcggggaggatatggccagcgggaaggagccgatcgaggtcaggtttcgtctcttcgacggcacggatatcgggcctacgaagtacgatccctccaccacggtctcctcgctcaaggagttcatcctcgctcggtggccgcaagataaggatatagctccaaaaactgttaatgacttgaagcttatcaatggtggaaggatattggagaataaccggacacttgcagagtcccgtgttccagtaggagagatcccaggtggtgtaattacaatgcatgtggtagtgcggcctccacaagctgacaaaaacagtgagaagcagcttgccaattcccccaagcagaacagatgtggatgcaccattctctgataaggcgtctgcttggtgctgtacaatctgtgtgtacacataagattttgtatgtgctttgctgtgttcacacaagcatggattcgttttgatatccaattcttgaagccatacaaattccagaagggaaacaaagaggtgaaaagagcgcatggctgtccaatggttttacatttgattatttggtgagcatgacctgaccctgcatgcagtagatgaaggtccagtgatgaccgtggacacaatttgctctg

SEQ ID NO: 41068 - DNA, 1175 bp, Zea Mays
ataggatgccaaaaagccatgactacggtctacggcagcagtacagaacagggaagaaggcgacgagacccagggcggtcaaaacgccagagatagaagccatcgccgacgtcgaatcccggccggcggtctgtttcctcctcctcctgctgctgctgactgcccgcctcgcgccgcgcatagaatccctcgctctgcctcgccctcggcctcggcatcgccactcgctttcacgctccatcatcaccaatggctcgatgccaaaaccgcaattaaaaatttcggcttgggcgtatccgtcaatacaccgagaggaggaagcctgcccactaccgcgtatctctctcctccctggctctcatccccccaccgagtcgtcgccccctcgctttcaccccacgcggaagcaagaattcgtcgtcaaattcccagcttgcgcgtgtttctgtggatttcttcccgcttccctgctcctgcctcctatgggcctttgatccggggcttcgtggatcttgggaagaggaggtgcggtgggcgcctcggcggcgatctggcggggaggatatggccagcgggaaggagccgatcgaggtcaggtttcgtctcttcgacggcacggatatcgggcctacgaagtacgatccctccaccacggtctcctcgctcaaggagttcatcctcgctcggtggccgcaagataaggatatagctccaaaaactgttaatgacttgaagcttatcaatggtggaaggatattggagaataaccggacacttgcagagtcccgtgttccagtaggagagatcccaggtggtgtaattacaatgcatgtggtagtgcggcctccacaagctgacaaaaacaagaagcagcttgccaattcccccaagcagaacagatgtggatgcaccattctctgataaggcgtctgcttggtgctgtacaatctgtgtgtacacataagattttgtatgtgctttgctgtgttcacacaagcatggattcgttttgatatccaattcttgaagccatacaaattccagaagggaaacaaagaggtgaaaagagcgcatggctgtccaatggttttacatttgattatttggtgagcatgacctgaccctgcatgcagtagatgaaggtccagtgatgaccgtggacacaatttgctctg

SEQ ID NO: 41069 - DNA, 754 bp, Zea Mays
cttcttttgcgctttgtgctcatgtctcacgaataaggatatagctccaaaaactgttaatgacttgaagcttatcaatggtggaaggatattggagaataaccggacacttgcagagtcccgtgttccagtaggagagatcccaggtggtgtaattacaatgcatgtggtagtgcggcctccacaagctgacaaaaacaagaagcagcttgccaattcccccaagcagaacagatgtggatgcaccattctctgataaggcgtctgcttggtgctgtacaatctgtgtgtacacataagattttgtatgtgctttgctgtgttcacacaagcatggattcgttttgatatccaattcttgaagccatacaaattccagaagtaagaacccacggaatacgaagatttctggatcgttttgttctagagtgtaggattggatgcttcctgctgtataaattgtgttgtcaaaactgaaaaaaaagtctctttcttttctgctatattgacttattatcgattctttctagctcggttgcttttgattcgtgtaacagaaatattgtactcatgtatatgtaacttgcaaaaggagtaatgtatggtgttatggtaattggtaaaggggaaacaaagaggtgaaaagagcgcatggctgtccaatggttttacatttgattatttggtgagcatgacctgaccctgcatgcagtagatgaaggtccagtgatgaccgtggacacaatttgctctg

SEQ ID NO: 41070 - DNA, 750 bp, Zea Mays
cttttgttttctggatgcatggacaataaggatatagctccaaaaactgttaatgacttgaagcttatcaatggtggaaggatattggagaataaccggacacttgcagagtcccgtgttccagtaggagagatcccaggtggtgtaattacaatgcatgtggtagtgcggcctccacaagctgacaaaaacagtgagaagcagcttgccaattcccccaagcagaacagatgtggatgcaccattctctgataaggcgtctgcttggtgctgtacaatctgtgtgtacacataagattttgtatgtgctttgctgtgttcacacaagcatggattcgttttgatatccaattcttgaagccatacaaattccagaagtaagaacccacggaatacgaagatttctggatcgttttgttctagagtgtaggattggatgcttcctgctgtataaattgtgttgtcaaaactgaaaaaaaagtctctttcttttctgctatattgacttattatcgattctttctagctcggttgcttttgattcgtgtaacagaaatattgtactcatgtatatgtaacttgcaaaaggagtaatgtatggtgttatggtaattggtaaaggggaaacaaagaggtgaaaagagcgcatggctgtccaatggttttacatttgattatttggtgagcatgacctgaccctgcatgcagtagatgaaggtccagtgatgaccgtggacacaatttgctctg

SEQ ID NO: 41071 - DNA, 761 bp, Zea Mays
taacactgtggaaaggttttgacattcatctgttagataaggatatagctccaaaaactgttaatgacttgaagcttatcaatggtggaaggatattggagaataaccggacacttgcagagtcccgtgttccagtaggagagatcccaggtggtgtaattacaatgcatgtggtagtgcggcctccacaagctgacaaaaacagtgagaagcagcttgccaattcccccaagcagaacagatgtggatgcaccattctctgataaggcgtctgcttggtgctgtacaatctgtgtgtacacataagattttgtatgtgctttgctgtgttcacacaagcatggattcgttttgatatccaattcttgaagccatacaaattccagaagtaagaacccacggaatacgaagatttctggatcgttttgttctagagtgtaggattggatgcttcctgctgtataaattgtgttgtcaaaactgaaaaaaaagtctctttcttttctgctatattgacttattatcgattctttctagctcggttgcttttgattcgtgtaacagaaatattgtactcatgtatatgtaacttgcaaaaggagtaatgtatggtgttatggtaattggtaaaggggaaacaaagaggtgaaaagagcgcatggctgtccaatggttttacatttgattatttggtgagcatgacctgaccctgcatgcagtagatgaaggtccagtgatgaccgtggacacaatttgctctg

SEQ ID NO: 41072 - DNA, 2059 bp, Zea Mays
ctgcttgttaatctttttccattccagctatctagctatgctccttgacgcgcactgctacgtgctacaatatatacatacatacataatatatataactgagacgaaggtcacccgactatgccatgagaagaccatcctggccgtgaacgggcagttcccggggccgaccatctacgcgcgcaaggacgacgtggtcatcgtcaacgtgtacaaccagggctacaagaacatcaccctccactggcacggcgtggaccagccgcggaacccgtggtccgatggcccggagtacatcacgcagtgccccatccagcccggcgccaacttcacctacaagatcatcttcaccgaggaggaaggcacgctgtggtggcacgcgcacagcgaattcgaccgcgccaccgtgcacggcgccatcgtcatccaccccaagcgcggcaccgtctacccctaccccaagccgcacaaggagatgcccatcatcctcggcgagtggtggaacgcggacgtggagcagatcctcctcgagtcccagcggaccggcggcgacgtcaacatttcggacgccaacaccatcaacggccagcccggcgacttcgccccgtgctccaaggaggacaccttcaagatgtccgtggagcacggcaagacgtacctgctccgggtcatcaacgcggggctcaccaacgagatgttcttcgccgtcgccgggcaccgcctcacggtggtcggcaccgacggccgctacctcaggccgttcaccgtcgactacatcctcatctcccccggacagaccatgaacatgctcctcgaggccaactgcgccaccgacggctcagccaacagccgctactacatggctgcgaggccgttcttcaccaacacggcagtcaatgtcgacgacaaaaacaccacggccattctggagtacacggacgcgccaccctccgcggggccaccggactcccccgacctgccggccatggacgacatcgccgcggcgacggcgtacacggcgcagctccggtccctggtcaccaaggagcatccgatcgacgtgccgatggaggtggacgagcacatgctcgtgacgatctccgtcaacacgatcccctgcgagcccaacaagacgtgcgccggccccggaaacaaccgcctcgccgcgagcctgaacaacgtcagcttcatgaacccgaccatcgacatcctcgacgcctactacgactccatcagcggcgtgtacgagccggacttccccaacaagccgcccttcttcttcaacttcaccgctcccaacccgccacaggacctctggttcacgaagcggggcaccaaggtgaaggtggtggagtacggcaccgtcctggaggtggtgttccaggacacggccatcctcggcgccgagagccaccccatgcacctgcacggcttcagcttctacgtggtgggccgaggcttcggtaacttcgacaaggacaaggaccccgccacgtacaacctggtcgacccgccgtaccagaacaccgtctccgtgcccacgggcggttgggctgcaatgcgcttccgagcggcaaatcctggtgtgtggtttatgcattgccactttgatcgtcacacggtgtggggcatggacactgtgttcattgtgaaaaatggcaagggcccggacgctcagatgatgccacgtccccctaacatgcccaagtgctgagaaaacaagggcacgagctacgactgctcgggttgcatgcaaggcgctcgatcaaaccagctaatcttagttgattggttgatttaattatttgtggtacatattttaagtagaacggttcttcaaataaaacggccagttgagatgtaattagtgtcatttgtgttcttttctctttttattcatttgattgtaagagaaaaacaaattcattatatttattatttgtgtcggtctactgctagttcaatctccaagtgtaattaaacaatgtatgtcaaatcatgtatctagtgaaaattcaatataaatgcgtgcttcatatgtgtatttatttattttttc

SEQ ID NO: 41073 - DNA, 821 bp, Zea Mays
actagcaatttctccgtgttgaattttcaattgagaccgagtctacggactacgtctaccccggttccagtttccgcgttcctcgaactcgaagaaatgtgagcctggctgtgatttttcctccctcgctagtcatcttcaagcatcaggaccgaagccacacgacaccagccgtcctcgcgatctctcctccgtctcccattccccaccgcgcccttctccccgcgcctcctcactggaatcggaagcgactcgcggggccggtgcgcaggctgctggcagcgccatccgcggtggccggctaccatggaggatctaggcatcgaggcgaaggaggctgcggttcgcgaggtggcgaagctgctcccgttcccggagctcctctcctctatcgcctctatcaaatacgactaccttacgcggcagcagataaatgatgcacaactcagtacaatggtggcagaccaggtggagcaggcccatgctggcatcaatgctctagcattatctcagataacaataaacaaactacgtgagaacttcattgatatagacaagttgtgtcaggagtgtcaaactttaattgagaaccatgacaagatcaagcttcttagcaatacaagaaacaatttgaacacaactctaaagtttttgaaaaagaagggcacacttggtgtaatggtgagagctatctcactgagttaccaggtcgcgggttcaaaacagcctctcctcatttgtgggaggaagacttgccttggtttatcctttcccagactccactcacataggagccagtgagccaccaaccttgggtctgc

SEQ ID NO: 41074 - DNA, 900 bp, Zea Mays
actagcaatttctccgtgttgaattttcaattgagaccgagtctacggactacgtctaccccggttccagtttccgcgttcctcgaactcgaagaaatgtgagcctggctgtgatttttcctccctcgctagtcatcttcaagcatcaggaccgaagccacacgacaccagccgtcctcgcgatctctcctccgtctcccattccccaccgcgcccttctccccgcgcctcctcactggaatcggaagcgactcgcggggccggtgcgcaggctgctggcagcgccatccgcggtggccggctaccatggaggatctaggcatcgaggcgaaggaggctgcggttcgcgaggtggcgaagctgctcccgttcccggagctcctctcctctatcgcctctatcaaatacgactaccttacgcggcagcagataaatgatgcacaactcagtacaatggtggcagaccaggtggagcaggcccatgctggcatcaatgctctagcattatctcagataacaataaacaaactacgtgagaacttcattgatatagacaagttgtgtcaggagtgtcaaactttaattgagaaccatgacaagatcaagcttcttagcaatacaagaaacaatttgaacacaactctaaaggatgtgggaggtatgatgtccatttctgttgaggctgctgctgcacatgactcattaagcaatgaccaggagttaattcacacttacgagcgactaatagctcttgatggtaagaggcgttttgctctagctgctgctgcatctcataaggaagaagttggaagattaagagaatactttgaggatgttgatcaaacatgggaaacatttgagaaaacattatggggccatatcactaactttttcaaactt

SEQ ID NO: 41075 - DNA, 701 bp, Zea Mays
gctacgatggccttggccatctggaggggtgcaacaagagtggactgggccacaacgtcagatggggggcagctgacggagcaacgaagtagcgagtccgacaagagtagaggtgaattcgacagtcggccaacgagggaaagatcgccggctcctgtggcctgcaaggggagcaccgctgctggccacgccggtgggagcgagtgtgcccatgtctatagaaggctaggcatctgcgcctgtggtggggcaagccttgtgcatgaggtcgcgccaacggtggagcaggcccatgctggcatcaatgctctagcattatctcagataacaataaacaaactacgtgagaacttcattgatatagacaagttgtgtcaggagtgtcaaactttaattgagaaccatgacaagatcaagcttcttagcaatacaagaaacaatttgaacacaactctaaaggatgtgggaggtatgatgtccatttctgttgaggctgctgctgcacatgactcattaagcaatgaccaggagttaattcacacttacgagctcttgatggtaagaggcgttttgctctagctgctgctgcatctcataaggaagaagttggaagattaagagaatactttgaggatgttgatcaaacatgggaaacatttgagaaaacattatggggccatatcactaactttttcaaactt

SEQ ID NO: 41076 - DNA, 1624 bp, Zea Mays
atggccttggccatctggaggggtgcaacaagagtggactgggccacaacgtcagatggggggcagctgacggagcaacgaagtagcgagtccgacaagagtagaggtgaattcgacagtcggccaacgagggaaagatcgccggctcctgtggcctgcaaggggagcaccgctgctggccacgccggtgggagcgagtgtgcccatgtctatagaaggctaggcatctgcgcctgtggtggggcaagccttgtgcatgaggtcgcgccaacggtggagcaggcccatgctggcatcaatgctctagcattatctcagataacaataaacaaactacgtgagaacttcattgatatagacaagttgtgtcaggagtgtcaaactttaattgagaaccatgacaagatcaagcttcttagcaatacaagaaacaatttgaacacaactctaaaggatgtgggaggtatgatgtccatttctgttgaggctgctgctgcacatgactcattaagcaatgaccaggagttaattcacacttacgagcgactaatagctcttgatggtaagaggcgttttgctctagctgctgctgcatctcataaggaagaagttggaagattaaggttctgcttttgaacttcaaatgagaatactttgaggatgttgatcaaacatgggaaacatttgagaaaacattatggggccatatcactaactttttcaaactttcaaaagagagccctcagacattggttcgagctttgagggttgttgaaatgcaagagatctttgatgaacaagttgcagaagaagcaactgaggctgagggtgctggtgttatagcgacaataacaaaccaacgtagaactgcaaaaaaaggtgcaggggcaacagctaccccaagaaagagcactcaagaaaaatcgaaggttcagggaaagggctacagggacaaatgctatgagtctatcagggtggctgttgaggcccgcttcaacaagttgcttactgagcttgtttttgtggaggacttgatggaagctttggaggaagccaaagcaattggagaggagcttggtgatatatatgattatgttgcaccatgctttccttctagatatgaaattttccagctcatggtaaacctatacactgagagattcattcagatgcttcgacttctcagtgatagagcaaacgatattcaaaatataaacatcttgaaggtgactagttgggtcgtacaatatcaagaagatttgattggtcttggtgtggatgaatcacttgcccaagtttgttctgaaagtggtgcattggatcccctcatgaacatgtatgttgagcgtatgcaggcaacaaccaagaaatggtacaataacattttggaggctgacaaaacacaaccaccaaagagtagagaggatggaaaactatatacacctgcagcagtggatctattcagaatattgaccgagcaagttcagatagttagagacaacagcacatatgtcatgctatatcgcatcgctcttgcggttattcagggttggaagggtatatatagcatgttatgggccaaggcccattacaaggaagatgttgagattgcagcgaaactcgg

SEQ ID NO: 41077 - DNA, 4685 bp, Zea Mays
gtcttgcttcccgtgcacctaaccagtccgagctctcctttgttgattggtggcacagagcttgcaaacacctgcagagggacaaaaagaaaggattgaattccctgattattttgggtgcttggatgatctggaaacattgtaacagatgtgtttttgagtcaactaatcccagccttggtgtcctgctctctgatctccaggtgcagcaccatctatggtgtagggctggggccaaggccctgcgtgagttaggtcagttaggtggattgtcttagtgtctgttggtctggttggtctgtcccaagtctctctctctctccttttttttctcttttgcagcccatctccttgggtccgaagggacgtggtgtggtgctgtatggacccctccctatttttctccttaatacaatgatacgtaactctcctgcgtattcaagaaaaaaatatttaagccacataaaatagtactgttttgaacatagacatggtccccaaaacaactttgatcaaatatctgtatcaaaatatatgttttttgaagggaaaatgctgtaggggaaacccctacaacgcgattttattgaaacttttttgaaatggaaagaaaattacaagcgggatcaaagaagacaaggaagaagctatcgagagtttagccaaagcaatagactagttttaagaggggtaaaatctcagcatttgcgtcgccaagaagaaaaagaaggagccttattcctaaagatgaagtcattcctatgcttccaaatgcaccaaaccactagtgccaaaatttccatgaagaaactgtggccaaaggcacccttggtctcatgaatcatcgaaaagaagtcaagatcatgattccaatggagacccacataactctagcagtctgtacagaaaggacaacgaaacaacaggtgctaactgctaagtcgtctcttcgcagtgcaggtcacatagagtgcagtcaaggttgttgtccggtggcaaaaagccctttcttctaagaatgttcttggagttgattctgtctccgaagaccagctatataaaaatcttgaatttcttcccaaccttggactgtcaaatctaattaaaggcagcaggaggctggattgactgaaaagtaaggctataacttggatgagctgaaagtagaattgccccacggacggataggtccatttgtctttaacagctgtagagttctgaaggtaactcacaagcttgtggaaaccaagatattcctgagcggtctgagaaaataaaggagtatggaaattgtgctctagatccatgttggttaaaaattcttgaatttagcattcttttttcttggcgaaagagaagagacaagggaaagtgaatctgggggagatattgttccaaacatcaagccacaacagaattgttctgccatccccagcccaaggcatagtatggcctctgaaatagtcaaccagcctggaaacatccttccaccataaagagcctgttttagggtagccatgggagaccctgcccccagattagtgagtggtccaaattagatttacccaaggtatgtcttctctgccatagaatttgtgaatgtatttaagcaagagggtcgtgttctgaatcttcaaattgagaacacccaagccccctctatttctaggacagcacactttgtcctaggcaaccagagggtttcaagtgcgcattttaactgctgctgacagtcccttctgattgtttaactgctgccgacagtcccttctgatacaatcgataccgttaatgaccattaccggtatcttaagtgtgcacattgtaaagatgggcatcgctgagaaagtagagttgaccagagtaagtcttcctgctatagataaccaagaactgatggtactgagccttctttcaactttggtgatgagagggagatagttttgactttcggcctcatgaggcccattggcaaacccaaatatgtgaacgggaaggtgccaacttgtgacatccaaacattgccgccagctgagtggttttggtgacatcaaggttgatcgccgacaagggaaggggaagggggaggtgatggttgccgaagcagcggacacggtggcacctgccgtggtgggggagagggtggcccgaggcatctgcaacccagcctcagaacagaggacgggtcagcggcggcgccgaccgtgatggggaaggagaggcccacccagggtgcctgcaacccaaccgatgccagatgaagagcagtctgagcagaggcggtggactgagtggcacattcattggggaggggagcggaagcacgagggccgcgttattgctggcggccgcggagaagagagcggcgatgcaccaactagtggtcgtgctcgcgccggcggctgtgcgcatgccagctgctgcgcccacgccgcagcgaaaggaggtggtggcagcagccagtaaagcaggggacactgcggcagcgacttggaggaagggggggagggtggtgttcgtggtggagaagcccgacggagcttgctactttgcttctattgcaacacagattggagaggagcttggtgatatatatgattatgttgcaccatgctttccttctagatatgaaattttccagctcatggtaaacctatacactgagagattcattcagatgcttcgacttctcagtgatagagcaaacgatattcaaaatataaacatcttgaaggtgactagttgggtcgtacaatatcaagaagatttgattggtcttggtgtggatgaatcacttgcccaagtttgttctgaaagtggtgcattggatcccctcatgaacatgtatgttgagcgtatgcaggcaacaaccaagaaatggtacaataacattttggaggctgacaaaacacaaccaccaaagagtagagaggatggaaaactatatacacctgcagcagtggatctattcagaatattgaccgagcaagttcagatagttagagacaacagcacatatgtcatgctatatcgcatcgctcttgcggttattcaggtatttatatatttgccctatgagattatggcagcagcagggtcaggaagagcggcggtggccgttgaggatagagaggggagcgccgttgagaggcccaaggcgggaaagaagagggcgagatggcgcaaggggtcaacgcaggctgagtggcagcgcagagccacgacaaggggcagtaccagagagcgtggagttgccgacaggggaagggagcagtccggctgctggagagggcagcaggaccgcagaagcgccgtgaaagagggcgttggtgtggagggtgtctacgggaaggccagcgagttggctcggtgtcgaggaagacgtcgtcatgcgaagcaccggcggcggcggacagaggtcgtgggcggtgatggggctgcaccgcgcaggcatgcgcaagggagtggccgcactgggtggcgacgcagagccacagcaaggggcggcaccagggatcgtgggggtcgccggcaggggaagggagcagcccgactgcgagagagggtcatgcttgattttcaagcagctgagaggcaaagacttgaggagccgattttttatgttggcctggcatgtctatgtgcattgattaacaataacatgcattgctacgaactttcatcagagctaagtagcagtacattggaggcgcttccacaaaactatgctgaacaggttaattttgaagacacctgcaaaggatttctcgaggttgccaaggaggctgtcctccaaactgttacggttatttttgaagacccaggtgtgcatgatctactcgtgaagctttaccagagagactggctggagggaatggtcacagaatatcttgttgagacatttgctgattacttcggtgacgttaaaatgtatattgaagaaagaccatttcgaagatttgtggaggcttgcatagaagaaacaatcgtggtctatgttgatcatctcctttcccagaaaaactacataaaagaggaaacaatagagaggatgaggttagatgaagagaagcttatggatttctttagggaacacgtcaacgtgacaaaagttgaaagtagagtgcggattctggcagatatgagagatctagcttcagctgggagtttggatagctttactctcattttcacaaatatactggaacatcaacctgattgcccgcctgaggttgttgagaagcttgtggcaatgcgggaagacattccaagaaaggaagccaaggagattgtacaagaatgcaaagagatatacgagaactcgctcgtggatggcaaccctcgcaagtcaggttttgtgttcggcaaattgaagtgcttgacagcaaagaaaggcatatggaggaagcgtgggcagtaagtggcgacttgcagcagagtggacgaacttatcaccaaggcaaagattgtacatttcacttctctatgatcattcttttttcgatgctactgttgggtttcacgtttatactatcagtatgtactcagcttgaggagcaaacatgtaatttattcaataaaatggttgttatttgcaataatataaaattattgcaagataggttcttcggctttctggactgcacaacagagtttagagaatggtatgctttatgattcagagt

SEQ ID NO: 41078 - DNA, 1062 bp, Zea Mays
atgaagagcagtctgagcagaggcggtggactgagtggcacattcattggggaggggagcggaagcacgagggccgcgttattgctggcggccgcggagaagagagcggcgatgcaccaactagtggtcgtgctcgcgccggcggctgtgcgcatgccagctgctgcgcccacgccgcagcgaaaggaggtggtggcagcagccagtaaagcaggggacactgcggcagcgacttggaggaagggggggagggtggtgttcgtggtggagaagcccgacggagcttgctactttgcttctattgcaacacagattggagaggagcttggtgatatatatgattatgttgcaccatgctttccttctagatatgaaattttccagctcatggtaaacctatacactgagagattcattcagatgcttcgacttctcagtgatagagcaaacgatattcaaaatataaacatcttgaaggtgactagttgggtcgtacaatatcaagaagatttgattggtcttggtgtggatgaatcacttgcccaagtttgttctgaaagtggtgcattggatcccctcatgaacatgtatgttgagcgtatgcaggcaacaaccaagaaatggtacaataacattttggaggctgacaaaacacaaccaccaaagagtagagaggatggaaaactatatacacctgcagcagtggatctattcagaatattgaccgagcaagttcagatagttagagacaacagcacatatgtcatgctatatcgcatcgctcttgcggttattcaggtcatgcttgattttcaagcagctgagaggcaaagacttgaggagccgattttttatgttggcctggcatgtctatgtgcattgattaacaataacatgcattgctacgaactttcatcagagctaagtagcagtacattggaggcgcttccacaaaactatgctgaacaggtgcaaatctgcgacaaagcttttgctctttattacatgtcattctttgaaccatgttttaacttgtcaagagatgatttcatgtttttttaa

SEQ ID NO: 41079 - DNA, 759 bp, Zea Mays
aatgattctgtacagaatagtcactgctgtacactgggttcataccaatttgatacaacattcacctccaaaaagaaaattcacatggacataaaaactacataaaagaggaaacaatagagaggatgaggttagatgaagagaagcttatggatttctttagggaacacgtcaacgtgacaaaagttgaaagtagagtgcggattctggcagatatgagagatctagcttcagctgggagtttggatagctttactctcattttcacaaatatactggaacatcaacctgattgcccgcctgaggttgttgagaagcttgtggcaatgcgggaagacattccaagaaaggaagccaaggagattgtacaagaatgcaaagagatatacgagaactcgctcgtggatggcaaccctcgcaagtcaggttttgtgttcggcaaattgaagtgcttgacagcaaagaaaggcatatggaggaagcgtgggcagtaagtggcgacttgcagcagagtggacgaacttatcaccaaggcaaagattgtacatttcacttctctatgatcattcttttttcgatgctactgttgggtttcacgtttatactatcagtatgtactcagcttgaggagcaaacatgtaatttattcaataaaatggttgttatttgcaataatataaaattattgcaagataggttcttcggctttctggactgcacaacagagtttagagaatggtatgctttatgattcagagt

SEQ ID NO: 41080 - DNA, 2693 bp, Zea Mays
cctttgatgtgagtgtagaaccagttatactgataaaatttgctccagcttctgttgcaagggcttttgccaagagtgtttttcctgtcccaggaggcccaaaaagcaaaacacctttacagggctgacaaggtgcacacaatcaaatctttgttagaaattcagtaaagcacttagaccaattaaaatatgcatagcttctgataagacaattatcacaatgttggatgcattgatagaactagaactcaaatatcttgagaatgaagctaaagcaacaagctgtctaagaaatagtggtttcacttgcagaatctccacattttggtttatatgtaacatatgtatctttaattgcacgatctcattttgtaatatacgaaagagtttatctaagaaccacagatcaatttaattgaagagtctctgcctttggttttatctgattcacttgaaagctaaaacttatttctgcaaccatatgaaatttgcatgcctcaaatcacattacacattgaaaagcaaccatcataaaattagacttgaatacaattaggtgaataaatgtgaagtcatgtatgacaaattggtaccggtaccaatgtgaaccgagcagtagcttggatggttagtgccaccagttaagaggatagccacccaggcccgaacctagggctcaccaatttgcgggtacttctcaaggaaagtggttccagggtactcctctatcttataattgaaaatgcctagaggaattctctcccagtggtcaagaaaaaacaatagaaacaatctactgctaaaaaggctccatgattaagttttgacagatgaagaagaagaacggtccaatggagcaatataaactagctaaaggctatgaggacataatgcacgcatccacatcaaaaaaactagaccagcctaggaggaactaggtggaaagtggcattttattatcattaataagaagaaagcacacaaatttgcctcgacgacgactaacacttgaacatgggtggtctgggtgtacatccacctcaagctagctcatctcccttccacattatacgtttcatacagttttgtatctattgttaatttcttattatgtcttacactatcaaaacaatgattaggcgcaagaaacaaatgttggtgactatgtcctgccaattagaggattttggcattcttgtgtcatcttgccttcttgatatttatttatttcttgatatttcattcttgtacctgtaggtttgggggaaaattgtgtttgtgagacatgcacggtgttcagcctcctacaccctaagtcgcatcgagggaaacaaccatgtcagacagtcaccacgatcgacgctgacgtgccactttgcttccctggacccttctcagatgctgctgcttcccacacccggacagcgagccgtatgcggaggacaacgagggcccatgcccattcttggtccttgcttctcttctgcctccatcccatactactccagctccaccggcaacgcttcaacctcctccgagctcgacaatgttgcaaagaagcgcggacccgaactgcagcgagagggacatggtcctccgcaactagcgaaagagtcactcaatggcgagttgctgactatcgtgacaatggtgcacccaatccaccccgacccacgatgtaggaaaacccatctccacccatccatacagaccccatgagggaacgcagcccaaagaacacgtcaaaacacaccccattagcaggcatatgcagattactgcatccataacaatgaggtaaaacctcagaaaatgttgaaagatgtgctagatttctgctgcaacatcaaggagctcgctgctctgcaaggtctgctggtctgctcatcttttgatgcgagtgatcaccttacctgtatcaactccacacacttcaggtctgagacaaccagaccataagaatatttctcaccgtcataaaccatgacatggggggtggggttatatctttgcagtccaccgattggcaaccaaaaggtagctctgtgtctaatacttttcaagatacgtcaagcaggggaaatacttcaatggagcgatatgagctggggagattgctagggaacaaggtctacagaaaagggggaaattcttagtgagaatgccaccacaaatgctgccccaacacttgctacaaggcgtcgaggcgcaagaagatatgaagtccctgcctgctacaaacctaaatgcctttgaaattaacccattctcaacagggttggacctgtctggtttatttatttatcaaaaaggagtgcataaatgggacaaggttcacttcagataagcctgccctggccatcatctcaatcttgaagatgttgcaaaagcactgaatcgcaggataacgaagaaagataacggcatatcaagactaaagggaagggagggaggaatggtgtccttcagcttgacatggagattgttaagattacaccatcctaccatattactgagatgaaacaaatgaagcttgaaattaaaactcaattgtacatggagaaacaaaaaatcaaatctgctaagaggtaaattagatcaactgaaacgggtgtacattgaactgaagattgaatgttagtttagagggttaaccgcacatagggcaaactgggaggcagggtacttttgtt

SEQ ID NO: 41081 - DNA, 1948 bp, Zea Mays
ggccgcaagcaccatagcacaagcagcagccgacctcctcgaacgagccgagccctcgcccagtcgccgccgcccgcgcccctcccactccccaccgcgcttcagcttcagactgcacacacgagtatagggcaaaagagccgagtcgaggcgccaccgaaggtgcgagaatcaacgagccgccggcgagcgagaatcaacgagccgccgggccgaaggtgcgcctcgcctcgcccgtccgcctgcccgccccagtgcgctcctgggccgccgcggggcggagatcaacagcgtacctcccacggcttccgtcggttcctgatttaggatgtgtacagaggggctgtattcttgtgtataggttctctttctatcggtcaactgttgctgattcggacggaatgttggaggatcaatcttgcctgatatcaaggtcgctgccgggttcctgtgagcaggaatccagactagcttacatgacttaccacctacttgagatcacgaggagtaagcgcccgcctgggaccctgtcgattgagcacgacgtcgtggcagcattgactaaaaggacaaagtcctctgagcaccaaaacagcgaggcgctggattgtcaaggaagtaatggtcagggcgactcagattcaagcaccctgataagttccattggccgggacaactcgatcaactgtcttgctcgttgttctcgttctgactatggttctatcgcatcactgaaccggagcttccgatcgcttgtgcgcagtggcgaactgtacaaggagcgtcggcagcaggggatttcagaacactgggtctacttctcttgcaacgtgcaggagtgggaggcgtatgacccctaccgttcacggtggatgacgctcccaaggatgccccgcaacgaatgtttcatgcactctgacaaggagtcgcttgccgtgggcaccgagcttctggtgtttggaaaggagatcctctcgcatattatcctgagctatagcatcctgacacattcatggtcgcggggcgttgaaatgaacgcccctagatgtttgtttggatcagctagttttggagagaaagcaattatagccggaggcatggatgctgatggaagggtgcttcgctccgtcgagctgtataactcggaaaccaagaggtggacaacacttccaagcatgaataaggctaggcggaagtgctctggtgtcttcatggatggcaagttctatgtgatcggtggaatggccagtaacacagaagtgcttacttgtggagaagagtacgacctagatagaggtacctggcgggtgatagagaacatgtccgaggggctcaatggtgcaagcggcgctcctccactcgtcgccgttgtcgaaaacgagctatatgcagcgcagtacgccggaaagctagtgaggaagtacaataaaagggacaactcgtggacgacgctgggggagttaccggagcggccagaagccgtggatggctggggcattgcgttccggggctgcggagagcggctgttggtcatcggtggaccgagagtgctgggcggcgggatgatcgagctccattcctggattccaagcgaggggccactgcagtggaacatgatcggaagcaagccctcggattttactcaaggttcgtccaatagagctagtcggttccgtgtactcgttaatagctagctacccattggttcctgtgctcagcacattctatttgcagtccatctgtacctttggtccatatgatatactctgttgaaatgagtttttttctgagatggacgcgtacaggtgataaattgtaattggggggtgggtaaccgtgcatctatatgatttgtttgtatcatgttctgaaccgtgtctcaacgctgtaattctattgtgcaaatgtctcttttccaagaactgcatgaaaaaaaaaagaaaagaaa

SEQ ID NO: 41082 - DNA, 1804 bp, Zea Mays
ggccgcaagcaccatagcacaagcagcagccgacctcctcgaacgagccgagccctcgcccagtcgccgccgcccgcgcccctcccactccccaccgcgcttcagcttcagactgcacacacgagtatagggcaaaagagccgagtcgaggcgccaccgaaggtgcgagaatcaacgagccgccggcgagcgagaatcaacgagccgccgggccgaaggtgcgcctcgcctcgcccgtccgcctgcccgccccagtgcgctcctgggccgccgcggggcggagatcaacagcgtacctcccacggcttccgtcggttcctgatttaggatgtgtacagaggggctgtattcttgtgtataggttctctttctatcggtcaactgttgctgattcggacggaatgttggaggatcaatcttgcctgatatcaaggtcgctgccgggttcctgtgagcaggaatccagactagcttacatgacttaccacctacttgagatcacgaggagtaagcgcccgcctgggaccctgtcgattgagcacgacgtcgtggcagcattgactaaaaggacaaagtcctctgagcaccaaaacagcgaggcgctggattgtcaaggaagtaatggtcagggcgactcagattcaagcaccctgataagttccattggccgggacaactcgatcaactgtcttgctcgttgttctcgttctgactatggttctatcgcatcactgaaccggagcttccgatcgcttgtgcgcagtggcgaactgtacaaggagcgtcggcagcaggggatttcagaacactgggtctacttctcttgcaacgtgcaggagtgggaggcgtatgacccctaccgttcacggtggatgacgctcccaaggatgccccgcaacgaatgtttcatgcactctgacaaggagtcgcttgccgtgggcaccgagcttctggtgtttggaaaggagatcctctcgcatattatcctgagctatagcatcctgacacattcatggtcgcggggcgttgaaatgaacgcccctagatgtttgtttggatcagctagttttggagagaaagcaattatagccggaggcatggatgctgatggaagggtgcttcgctccgtcgagctgtataactcggaaaccaagaggtggacaacacttccaagcatgaataaggctaggcggaagtgctctggtgtcttcatggatggcaagttctatgtgatcggtggaatggccagtaacacagaagtgcttacttgtggagaagagtacgacctagatagaggtacctggcgggtgatagagaacatgtccgaggggctcaatggtgcaagcggcgctcctccactcgtcgccgttgtcgaaaacgagctatatgcagcgcagtacgccggaaagctagtgaggaagtacaataaaagggacaactcgtggacgacgctgggggagttaccggagcggccagaagccgtggatggctggggcattgcgttccggggctgcggagagcggctgttggtcatcggtggaccgagagtgctgggcggcgggatgatcgagctccattcctggattccaagcgaggggccactgcagtggaacatgatcggaagcaagccctcgggttgagtggttgggtgctctgtgtcgtggagattgagaggccatgttttgtttgtcgagttgtgcctataatagcctggcgtgggtttgttcggacccgtcagtttgcagcgtaggatcattggctagaatttctaacgcatcatcatagaaagattagtgaaaaagat

SEQ ID NO: 41083 - DNA, 1999 bp, Zea Mays
cttcacagtggagtatccgtccatccatggttctggtttactagtcccgtttcagtttctcttctgccgtgcgtgtaggatcgcctcagttgatgttgacgccttgccaagctgcgggagcacatttattcctaaacataggataattcgcagtttttactgaatcctcatgctccatgccaaggccgccccagatttaggatgtgtacagaggggctgtattcttgtgtataggttctctttctatcggtcaactgttgctgattcggacggaatgttggaggatcaatcttgcctgatatcaaggtcgctgccgggttcctgtgagcaggaatccagactagcttacatgacttaccacctacttgagatcacgaggagtaagcgcccgcctgggaccctgtcgattgagcacgacgtcgtggcagcattgactaaaaggacaaagtcctctgagcaccaaaacagcgaggcgctggattgtcaaggaagtaatggtcagggcgactcagattcaagcaccctgataagttccattggccgggacaactcgatcaactgtcttgctcgttgttctcgttctgactatggttctatcgcatcactgaaccggagcttccgatcgcttgtgcgcagtggcgaactgtacaaggagcgtcggcagcaggggatttcagaacactgggtctacttctcttgcaacgtgcaggagtgggaggcgtatgacccctaccgttcacggtggatgacgctcccaaggatgccccgcaacgaatgtttcatgcactctgacaaggagtcgcttgccgtgggcaccgagcttctggtgtttggaaaggagatcctctcgcatattatcctgagctatagcatcctgacacattcatggtcgcggggcgttgaaatgaacgcccctagatgtttgtttggatcagctagttttggagagaaagcaattatagccggaggcatggatgctgatggaagggtgcttcgctccgtcgagctgtataactcggaaaccaagaggtggacaacacttccaagcatgaataaggctaggcggaagtgctctggtgtcttcatggatggcaagttctatgtgatcggtggaatggccagtaacacagaagtgcttacttgtggagaagagtacgacctagatagaggtacctggcgggtgatagagaacatgtccgaggggctcaatggtgcaagcggcgctcctccactcgtcgccgttgtcgaaaacgagctatatgcagcgcagtacgccggaaagctagtgaggaagtacaataaaagggacaactcgtggacgacgctgggggagttaccggagcggccagaagccgtggatggctggggcattgcgttccggggctgcggagagcggctgttggtcatcggtggaccgagagtgctgggcggcgggatgatcgagctccattcctggattccaagcgaggggccactgcagtggaacatgatcggaagcaagccctcgggtaactttgtctataactgtgctgtcatggggtgctgatacgtgcgcccctcaaaacataccgtcgacgacacacgaaagattgtgatattgggtttttttttattatcaaatggcataaagcactgattaattccgcctgacgggtaatctctgcattcttttttttgacatttcagattttactcaaggttcgtccaatagagctagtcggttccgtgtactcgttaatagctagctacccattggttcctgtgctcagcacattctatttgcagtccatctgtacctttggtccatatgatatactctgttgaaatgagtttttttctgagatggacgcgtacaggtgataaattgtaattggggggtgggtaaccgtgcatctatatgatttgtttgtatcatgttctgaaccgtgtctcaacgctgtaattctattgtgcaaatgtctcttttccaagaactgcatgaaaaaaaaaagaaaagaaa

SEQ ID NO: 41084 - DNA, 3132 bp, Zea Mays
ctcgaaccggtccagattactctgaccggaccgacctttcttcgtcttccccgttcggtatttccgccctcggcgccgggaaaccctagcccgcgtccatggacgatccctcctccgcctccaacaagcgcaagcgcgggcgcaagcccaaggtgtcgccgccctcccccgaccgctcatccccctctgcggtggccgcccccgctcccgttccggttgcgcgccgtggccgcaagccgcgacgtcatgaggaccccgccgacgcggacgccgcgcgtccgccgtccccgctccgccgcagggtgcttaatacggtggcaaatggaggcgatgcggtggcggaggcaggccccgcgagctgggacgaggtggtgagggtggtgccgtgcatggacgccgtggtcaaggtgttctgcgtgcacacggagcccaacttctcgctgccgtggcagcggaagcggcagtacagctctagcagtagcgggtttatcatcagcggccgccgtgtcctcaccaatgcccactccgtggagcactatacccaggttaagcttaagaagcgcggctctgacaccaagtaccttgccaccgtcctggccatcggcacagagtgcgatattgcgctcttaactgtcaatgacgatgaattctgggaaggagtttcacctgtcgagttcggaacattaccggcccttcaggacgcagttactgttgttggttatccaattggaggagatactatatccgtgacaagtggagttgtctctaggatagaaatactttcatacgttcatggttctacagaacttctaggattgcagatagatgcagctattaattcaggaaattcaggtggtccagcttttaatgatagaggcaaatgtgtcggtatagcatttcaatctcttaaacatgaagatgccgagaatataggctatgtgataccgactccagttattacacatttcatcgaggactacaaaaattctggaggatacacagggtttcctatactaggagttgaatggcagaaaatggagaatcctgatctccgtaaagcaatgggaatgaaaccagatcaaaagggtgttcgtgttaggagggtggagcccacggctccagaatctggatgcctacaaccgtctgatattattcttagctttgatggtgttgacattgctaatgatggaacagccagacaagctgtcccggttccctacacattgatcctcgatgtcaggatgctgagtggtgggggaggaggtgggaatggcagcagcggcggcgggggagaaggcatggacggcgggcagcgtggagatggcagatgcgatcgcgcgtcgtgcagcagcggagatgacagacatggtcgcatggcagaggaaagatggcagacctggtcgcacggcagcagagggacagcagatgtggtcgcgtggcagcggagatgtcgggcgcagccaggaggaggcagacgtcagcagaaacgaagggtggaggctgatggcgacaatgacagaagggaggaagagagaaagcagagttgggactcgtgtgtgcatctgggagatggtggagggataaggtggggacctcctccaactttggtgtatgaccctaaaacactggttgtggccaactacatgaaggaacatggctacttgttcctccacactgctgtggatactatctctaagcaggtgcttgtatcagatatcaatataggttatgaagaaatagttaatactcaggttcttgctttcaatggccagcctgtaaaaaatttaaagaacttagcgaccatggtggaaaattgcaaggatgaatttttgaagtttgatctggagtatgaccagattgttgtcctcgagacgaaaactgcaaagtctgctacccaggacattctgacgacgcactgtataccgtctgcaatgtcggatgaccttaaggcctagacgcctagtagtgagaggtgggagcatgatgcagccctgggccatcaggtgggccaacagcttgggccacattttcggttgaattgattagcgcagcatactacctggtccgggagcaaaagaaaccccaatgtttctgtgttacatgaattaaatgttttttgaggggtttatcaaagagcagactgtctaagcttccccattatagaaggtttgagggagtaccactgtcagataacgataaactggagatgttacagcagaggtgtgaaagcgatagtagctagtaagaatccgatttttttctattcacatgattacattacaactactacatcaaattattaacggtaaaggaatcattggtaaaatatttgcatcttgtttctggacaaataagatcgcaaatatttaagggttgtgtaccaaagttatcccctcatcgcttggttgtcctcatcatgccgtaggtgttctctcgattagtatggaagagtgtagctggcttccagctcaagcgatgagggaatttggattctggccttagaccatggcaccttccactcctgctttggaagcgtctgtatccgttagcgctgagaggcacaccttgccttcactcctctttgcttccctctcgcgatatgcttgcaggttggtagtggtagctcgtccggttccaatgtcttttatttcgttcaacaactatctagatgtacaagtgccattgaccttggcgacttcgcttccgcatggtttgtttttgtcgtccgttgtgcaagattactactcgagtactaaacttgatagaatagaatcaatcgagtctctggtctctattttatgtcacacaacaatacatgtcattggtatttataaaggtcgtcgtcttcatcatttcattattttctagtgtaaaatagcactaaactgtttgcttacaagtatttttgaagctcttctcaacgaaaggaggtgtttataccatgtccttggagttttcttgaactcacacaacacattgaataacctataaacatgatcaagacatttaaggttactcaatatagattagttcatttataaagttatttaaaaagtacttctaatgtttatgttaagtctcttatttttgtctttaagcatcttattgtcaagagctatagcatgatcaccg

SEQ ID NO: 41085 - DNA, 3257 bp, Zea Mays
ctctgaccggaccgacctttcttcgtcttccccgttcggtatttccgccctcggcgccgggaaaccctagcccgcgtccatggacgatccctcctccgcctccaacaagcgcaagcgcgggcgcaagcccaaggtgtcgccgccctcccccgaccgctcatccccctctgcggtggccgcccccgctcccgttccggttgcgcgccgtggccgcaagccgcgacgtcatgaggaccccgccgacgcggacgccgcgcgtccgccgtccccgctccgccgcagggtgcttaatacggtggcaaatggaggcgatgcggtggcggaggcaggccccgcgagctgggacgaggtggtgagggtggtgccgtgcatggacgccgtggtcaaggtgttctgcgtgcacacggagcccaacttctcgctgccgtggcagcggaagcggcagtacagctctagcagtagcgggtttatcatcagcggccgccgtgtcctcaccaatgcccactccgtggagcactatacccaggttaagcttaagaagcgcggctctgacaccaagtaccttgccaccgtcctggccatcggcacagagtgcgatattgcgctcttaactgtcaatgacgatgaattctgggaaggagtttcacctgtcgagttcggaacattaccggcccttcaggacgcagttactgttgttggttatccaattggaggagatactatatccgtgacaagtggagttgtctctaggatagaaatactttcatacgttcatggttctacagaacttctaggattgcagatagatgcagctattaattcaggaaattcaggtggtccagcttttaatgatagaggcaaatgtgtcggtatagcatttcaatctcttaaacatgaagatgccgagaatataggctatgtgataccgactccagttattacacatttcatcgaggactacaaaaattctggaggatacacaggcctgctgcagtggtgactggtgagagctgtctcactgagtcaccaggtcatgggttcaaagcagcctctctgtatttgtgggggaagacttgcttcggtttatccctttcctagacccgactcatgggagcttctgacactagggtttcctatactaggagttgaatggcagaaaatggagaatcctgatctccgtaaagcaatgggaatgaaaccagatcaaaagggtgttcgtgttaggagggtggagcccacggctccagaatctggatgcctacaaccgtctgatattattcttagctttgatggtgttgacattgctaatgatggaacagccagacaagctgtcccggttccctacacattgatcctcgatgtcaggatgctgagtggtgggggaggaggtgggaatggcagcagcggcggcgggggagaaggcatggacggcgggcagcgtggagatggcagatgcgatcgcgcgtcgtgcagcagcggagatgacagacatggtcgcatggcagaggaaagatggcagacctggtcgcacggcagcagagggacagcagatgtggtcgcgtggcagcggagatgtcgggcgcagccaggaggaggcagacgtcagcagaaacgaagggtggaggctgatggcgacaatgacagaagggaggaagagagaaagcagagttgggactcgtgtgtgcatctgggagatggtggagggataaggtggggacctcctccaactttggtgtatgaccctaaaacactggttgtggccaactacatgaaggaacatggctacttgttcctccacactgctgtggatactatctctaagcaggtgcttgtatcagatatcaatataggttatgaagaaatagttaatactcaggttcttgctttcaatggccagcctgtaaaaaatttaaagaacttagcgaccatggtggaaaattgcaaggatgaatttttgaagtttgatctggagtatgaccagattgttgtcctcgagacgaaaactgcaaagtctgctacccaggacattctgacgacgcactgtataccgtctgcaatgtcggatgaccttaaggcctagacgcctagtagtgagaggtgggagcatgatgcagccctgggccatcaggtgggccaacagcttgggccacattttcggttgaattgattagcgcagcatactacctggtccgggagcaaaagaaaccccaatgtttctgtgttacatgaattaaatgttttttgaggggtttatcaaagagcagactgtctaagcttccccattatagaaggtttgagggagtaccactgtcagataacgataaactggagatgttacagcagaggtgtgaaagcgatagtagctagtaagaatccgatttttttctattcacatgattacattacaactactacatcaaattattaacggtaaaggaatcattggtaaaatatttgcatcttgtttctggacaaataagatcgcaaatatttaagggttgtgtaccaaagttatcccctcatcgcttggttgtcctcatcatgccgtaggtgttctctcgattagtatggaagagtgtagctggcttccagctcaagcgatgagggaatttggattctggccttagaccatggcaccttccactcctgctttggaagcgtctgtatccgttagcgctgagaggcacaccttgccttcactcctctttgcttccctctcgcgatatgcttgcaggttggtagtggtagctcgtccggttccaatgtcttttatttcgttcaacaactatctagatgtacaagtgccattgaccttggcgacttcgcttccgcatggtttgtttttgtcgtccgttgtgcaagattactactcgagtactaaacttgatagaatagaatcaatcgagtctctggtctctattttatgtcacacaacaatacatgtcattggtatttataaaggtcgtcgtcttcatcatttcattattttctagtgtaaaatagcactaaactgtttgcttacaagtatttttgaagctcttctcaacgaaaggaggtgtttataccatgtccttggagttttcttgaactcacacaacacattgaataacctataaacatgatcaagacatttaaggttactcaatatagattagttcatttataaagttatttaaaaagtacttctaatgtttatgttaagtctcttatttttgtctttaagcatcttattgtcaagagctatagcatgatcaccg

SEQ ID NO: 41086 - DNA, 2778 bp, Zea Mays
cgacctttcttcgtcttccccgttcggtatttccgccctcggcgccgggaaaccctagcccgcgtccatggacgatccctcctccgcctccaacaagcgcaagcgcgggcgcaagcccaaggtgtcgccgccctcccccgaccgctcatccccctctgcggtggccgcccccgctcccgttccggttgcgcgccgtggccgcaagccgcgacgtcatgaggaccccgccgacgcggacgccgcgcgtccgccgtccccgctccgccgcagggtgcttaatacggtggcaaatggaggcgatgcggtggcggaggcaggccccgcgagctgggacgaggtggtgagggtggtgccgtgcatggacgccgtggtcaaggtgttctgcgtgcacacggagcccaacttctcgctgccgtggcagcggaagcggcagtacagctctagcagtagcgggtttatcatcagcggccgccgtgtcctcaccaatgcccactccgtggagcactatacccaggttaagcttaagaagcgcggctctgacaccaagtaccttgccaccgtcctggccatcggcacagagtgcgatattgcgctcttaactgtcaatgacgatgaattctgggaaggagtttcacctgtcgagttcggaacattaccggcccttcaggacgcagttactgttgttggttatccaattggaggagatactatatccgtgacaagtggagttgtctctaggatagaaatactttcatacgttcatggttctacagaacttctaggattgcagatagatgcagctattaattcaggaaattcaggtggtccagcttttaatgatagaggcaaatgtgtcggtatagcatttcaatctcttaaacatgaagatgccgagaatataggctatgtgataccgactccagttattacacatttcatcgaggactacaaaaattctggaggatacacagggtttcctatactaggagttgaatggcagaaaatggagaatcctgatctccgtaaagcaatgggaatgaaaccagatcaaaagggtgttcgtgttaggagggtggagcccacggctccagaatctggatgcctacaaccgtctgatattattcttagctttgatggtgttgacattgctaatgatggaacagccagacaagctgtcccggttccctacacattgatcctcgatgtcaggatgctgagtggtgggggaggaggtgggaatggcagcagcggcggcgggggagaaggcatggacggcgggcagcgtggagatggcagatgcgatcgcgcgtcgtgcagcagcggagatgacagacatggtcgcatggcagaggaaagatggcagacctggtcgcacggcagcagagggacagcagatgtggtcgcgtggcagcggagatgtcgggcgcagccaggaggaggcagacgtcagcagaaacgaagggtggaggctgatggcgacaatgacagaagggaggaagagagaaagcagagttgggactcgtgtgtgcatctgggagatggtggagggataaggtggggacctcctccaactttggtgtatgaccctaaaacactggttgtggccaactacatgaaggaacatggctacttgttcctccacactgctgtggatactatctctaagcaggtgcttgtatcagatatcaatataggttatgaagaaatagttaatactcaggttcttgctttcaatggccagcctgtaaaaaatttaaagaacttagcgaccatggtggaaaattgcaaggatgaatttttgaagtttgatctggagtatgaccaggattacatacccacggtgttcgacaatttcagtgcaaatgtcgttgtggatggcaccacggtgaatttgggcctgtgggataccgcagggcaggaagattacaaccgactgaggcctctaagctaccgtggtgcagatgttttcgtgcttgcattctcacttgtgagtcgagctagctatgagaatatcatgaagaagtggataccggagcttcagcattatgcacgtggggtgcctgttgtgttggtaggcacaaaatttgatcttcgtgaagacaagcactacttgatggaccatcctgggttggtgcctgttaccacagcacaaggggaggaacttcgtagacaaattggtgctatgtattacatcgaatgcagttcgaagacacagcagaatgtcaaagctgtgttcgatgctgccatcaaggttgtaatccagcctccaactaaactaagagaaaagaagaaaaagaaatcacgcaagggatgttcgatggtgaacatcttatctggaagaaaaatgctatgcttcaagtcctgaatgatcgaagggggtcttacctgaactaataccatgagtgtgaccccaagttcgcgaagcttgaaatcttgatgcgctcgttgcgcatgtatatttgcacctttggttattaatcactagaggtagatgattgaaactaatctgcttaaccaatgtgcactgctgggcgctggcgtggttagctatatcagttaggcagttcgacagaggtcaaagagattgagattttgttctttcttggcaatgtcacagcttttgtgaatctggtctcatcatactgtccgctagtttatccaatgattccatggtggaatcaatccatagcaacattgtgttgaatgatcctttgcttttgcgctaagcatataacattccagttttggtgaaagctggaagtgaaactctcttctttc

SEQ ID NO: 41087 - DNA, 1456 bp, Zea Mays
aaaaagcttgtggtggtatcacaggtgcttgtatcagatatcaatataggttatgaagaaatagttaatactcaggttcttgctttcaatggccagcctgtaaaaaatttaaagaacttagcgaccatggtggaaaattgcaaggatgaatttttgaagtttgatctggagtatgaccagattgttgtcctcgagacgaaaactgcaaagtctgctacccaggacattctgacgacgcactgtataccgtctgcaatgtcggatgaccttaaggcctagacgcctagtagtgagaggtgggagcatgatgcagccctgggccatcaggtgggccaacagcttgggccacattttcggttgaattgattagcgcagcatactacctggtccgggagcaaaagaaaccccaatgtttctgtgttacatgaattaaatgttttttgaggggtttatcaaagagcagactgtctaagcttccccattatagaaggtttgagggagtaccactgtcagataacgataaactggagatgttacagcagaggtgtgaaagcgatagtagctagtaagaatccgatttttttctattcacatgattacattacaactactacatcaaattattaacggtaaaggaatcattggtaaaatatttgcatcttgtttctggacaaataagatcgcaaatatttaagggttgtgtaccaaagttatcccctcatcgcttggttgtcctcatcatgccgtaggtgttctctcgattagtatggaagagtgtagctggcttccagctcaagcgatgagggaatttggattctggccttagaccatggcaccttccactcctgctttggaagcgtctgtatccgttagcgctgagaggcacaccttgccttcactcctctttgcttccctctcgcgatatgcttgcaggttggtagtggtagctcgtccggttccaatgtcttttatttcgttcaacaactatctagatgtacaagtgccattgaccttggcgacttcgcttccgcatggtttgtttttgtcgtccgttgtgcaagattactactcgagtactaaacttgatagaatagaatcaatcgagtctctggtctctattttatgtcacacaacaatacatgtcattggtatttataaaggtcgtcgtcttcatcatttcattattttctagtgtaaaatagcactaaactgtttgcttacaagtatttttgaagctcttctcaacgaaaggaggtgtttataccatgtccttggagttttcttgaactcacacaacacattgaataacctataaacatgatcaagacatttaaggttactcaatatagattagttcatttataaagttatttaaaaagtacttctaatgtttatgttaagtctcttatttttgtctttaagcatcttattgtcaagagctatagcatgatcaccg

SEQ ID NO: 41088 - DNA, 985 bp, Zea Mays
ttgtggtggtatcacaggtgcttgtatcagatatcaatataggttatgaagaaatagttaatactcaggttcttgctttcaatggccagcctgtaaaaaatttaaagaacttagcgaccatggtggaaaattgcaaggatgaatttttgaagtttgatctggagtatgaccaggtaaaatatttgcatcttgtttctggacaaataagatcgcaaatatttaagggttgtgtaccaaagttatcccctcatcgcttggttgtcctcatcatgccgtaggtgttctctcgattagtatggaagagtgtagctggcttccagctcaagcgatgagggaatttggattctggccttagaccatggcaccttccactcctgctttggaagcgtctgtatccgttagcgctgagaggcacaccttgccttcactcctctttgcttccctctcgcgatatgcttgcaggttggtagtggtagctcgtccggttccaatgtcttttatttcgttcaacaactatctagatgtacaagtgccattgaccttggcgacttcgcttccgcatggtttgtttttgtcgtccgttgtgcaagattactactcgagtactaaacttgatagaatagaatcaatcgagtctctggtctctattttatgtcacacaacaatacatgtcattggtatttataaaggtcgtcgtcttcatcatttcattattttctagtgtaaaatagcactaaactgtttgcttacaagtatttttgaagctcttctcaacgaaaggaggtgtttataccatgtccttggagttttcttgaactcacacaacacattgaataacctataaacatgatcaagacatttaaggttactcaatatagattagttcatttataaagttatttaaaaagtacttctaatgtttatgttaagtctcttatttttgtctttaagcatcttattgtcaagagctatagcatgatcaccg

SEQ ID NO: 41089 - DNA, 1128 bp, Zea Mays
ggtactccaattttcttcccatggactcatcctagatacaggagtggctgcttgactgtaccaatagcacgaagagaccacgcctaaacaagacaccaacgggacagggcgataaaaatgaagagggactgagggagggagggagggcgcttctctaggcagtagtgaggtgagtgagagagactgaggaggcatgtgaccctcttcactcgcttcaccctgttcatcactcgcttgtacaagaagtcacgcaccaaacgggcaagggcaaacaccaccaaagaaggcgagaacgcactccgtccctctcctccaggaccgcccgctcttatcccgtttctcccttctctgggctcggagaatcggagatggcgtccagcgcctctcggttcatcaagtgcgtcacggtcggcgacggtgccgtgggcaagacatgtatgctcatctgctacaccagcaacaagttccccactgattacatacccacggtgttcgacaatttcagtgcaaatgtcgttgtggatggcaccacggtgaatttgggcctgtgggataccgcagggcaggaagattacaaccgactgaggcctctaagctaccgtggtgcagatgttttcgtgcttgcattctcacttgtgagtcgagctagctatgagaatatcatgaagaagtggataccggagcttcagcattatgcacgtggggtgcctgttgtgttggtaggcacaaaatttgatcttcgtgaagacaagcactacttgatggaccatcctgggttggtgcctgttaccacagcacaaggggaggaacttcgtagacaaattggtgctatgtattacatcgaatgcagttcgaagacacagcagaatgtcaaagctgtgttcgatgctgccatcaaggttgtaatccagcctccaactaaactaagagaaaagaagaaaaagaaatcacgcaagggatgttcgatggttgtccggggaagagataaaccgaggcaaaccttcaacccgcaaatgcgtagaggatagggacggaggcagcggtggggggcaggctggctcgagccccctctaccgctctcgagaccatggagcccctctgaagcctcccctaaaatttaaaatgtac

SEQ ID NO: 41090 - DNA, 1444 bp, Zea Mays
attttcttcccatggactcatcctagatacaggagtggctgcttgactgtaccaatagcacgaagagaccacgcctaaacaagacaccaacgggacagggcgataaaaatgaagagggactgagggagggagggagggcgcttctctaggcagtagtgaggtgagtgagagagactgaggaggcatgtgaccctcttcactcgcttcaccctgttcatcactcgcttgtacaagaagtcacgcaccaaacgggcaagggcaaacaccaccaaagaaggcgagaacgcactccgtccctctcctccaggaccgcccgctcttatcccgtttctcccttctctgggctcggagaatcggagatggcgtccagcgcctctcggttcatcaagtgcgtcacggtcggcgacggtgccgtgggcaagacatgtatgctcatctgctacaccagcaacaagttccccactgattacatacccacggtgttcgacaatttcagtgcaaatgtcgttgtggatggcaccacggtgaatttgggcctgtgggataccgcagggcaggaagattacaaccgactgaggcctctaagctaccgtggtgcagatgttttcgtgcttgcattctcacttgtgagtcgagctagctatgagaatatcatgaagaagtggataccggagcttcagcattatgcacgtggggtgcctgttgtgttggtaggcacaaaatttgatcttcgtgaagacaagcactacttgatggaccatcctgggttggtgcctgttaccacagcacaaggggaggaacttcgtagacaaattggtgctatgtattacatcgaatgcagttcgaagacacagcagttggcttactttgtcggtaacatgtagaatgtcaaagctgtgttcgatgctgccatcaaggttgtaatccagcctccaactaaactaagagaaaagaagaaaaagaaatcacgcaagggatgttcgatggtgaacatcttatctggaagaaaaatgctatgcttcaagtcctgaatgatcgaagggggtcttacctgaactaataccatgagtgtgaccccaagttcgcgaagcttgaaatcttgatgcgctcgttgcgcatgtatatttgcacctttggttattaatcactagaggtagatgattgaaactaatctgcttaaccaatgtgcactgctgggcgctggcgtggttagctatatcagttaggcagttcgacagaggtcaaagagattgagattttgttctttcttggcaatgtcacagcttttgtgaatctggtctcatcatactgtccgctagtttatccaatgattccatggtggaatcaatccatagcaacattgtgttgaatgatcctttgcttttgcgctaagcatataacattccagttttggtgaaagctggaagtgaaactctcttctttc

SEQ ID NO: 41091 - DNA, 988 bp, Zea Mays
gtagacccgtccctgtctccaacttcagagcatccaatcgctcaacagcgccactgatgagcctctgtcgtcgtcgtcatcagtgaaccaggcgaggcgacgatcggacccgggtcgtaagcggtaagcccaccggctcaacagcaggctgcagatccccccaccccccacgcaactccatctcctctccgcctccacctgcacccatcgagcaccgaacggcggcggcatggaggctggcggcgaggagttcgcgatcggcgtggtgatctccgcgaagaccaccctgggggaggagttcgagggccagatcgtcgccttcgaccgcccctccaacctcctcgttatccaggagggcgtgggtagggcggagaggggggagcggaggaacgtgagggtcctcaaagcgaactacatccgggagttctcggtggtcagtaagggtgacgaccctctcgatcctgccagctgcatgctggacctcaactccatttatgcccgggaggatgctgcactcagagattgaagctgagagaattggtgttggtgtcaccccagaagctcaaagtatatttgatgcgctgtccaagacgcttccggttcagtgggacaagactgacattgtcgtaatgaaggaggttcgtgtacgcagtccgtacctgcctgaaaatgttaatggaggaacagctgcagcaaatgaacgcgttaagaaagtgattgactttgaaaggaaaagattacattcacgtgtacctggccaattctcttgattaaaaggcttgactattttttacattagcctcgtgttgtatttctaatactgcatccagttttcttattctcatcgatgcggttttctataaaatgtttcagcaaaaatctgtcgtaataatcacatcaactagctagatctgtactgtttggtagttattcagatttttataaaaatattttggatccaaataaatgtttaggagataaatcagaa

SEQ ID NO: 41092 - DNA, 680 bp, Zea Mays
aactctgcatttgagttgctcgtcctctccccactttctatcacgcaattcctatctcgcagtcgtcgccgctccccggccgggacccagcagagcagagcaggcagtgtcggcgcagcatggggaactgccaggcggcggaggcggcgacggtgctgctccagcacccgggcgggcgggtggagcggctctactggtcaaccagcgccgccgaggtcatgcgcgccaacccaggccactacgtcgcgctcgtcacgctccgcgtcgccgaggagcggcaggacgcccccggcggcgagcggcgcaccgtgcgcctcacgcgcgtcaagctgctcaagcccaaggaggcgctgctcctcggccacgtctaccgcctcatcaccacccaggaggtggcgagggcggtgcgggcgaggaaggaggagaagcagaggaaagcgcagcagctgcttgagtcgaggcagggtgtcgcgaggggcgcggccgagggggaggacgacgacgacgaggcagccctggacgccagccttgatcagttggcgcgtcaggacaacagcagccggagctccagtgcagggcaacggcagtggcggccgtcgctgcagagcatcgaagaggccacgacctgatgtcagctcagctcagtacactcataccacgcaaccgtagggttcatgaca

SEQ ID NO: 41093 - DNA, 6777 bp, Zea Mays
gcgacatatttgctgcctcacttcacgccgctttgtttctcgctgtctctcgactctctactcactactgcccaattgagcccctccgcttccgcccttccgcccttccgccaccaccaccacacctcgtccagcggcggtcggcaaaccctagaaccttagacccatccgccatactgcggttactgggcgcgggctagggccgggcctccgtaatcgcagcttgcggcgatgccgcttttcatctccgacgaggagctccgtctcctcggcggcgacacggctgccgttgccgagcgggctgatgctgccatccgtgagctccggcggcaggtggataccgtacgcgccgaggcggatgccgctgcgatcgctgccgagcagacctgcgccctcctcgagcaacggtacgcctccctctccgcggagttcgatcgctccaaggccgaggctgccgagctcaccgcctctgccgagcgccgcgctgccgagcttgcctcctctcaggcggagatacatcagcttcgcatccaggcgattgctaaggatggtgaggtggagaggttgaaaattgaaatctcggagctgcacaagtccaagtgccagtcgctggagttgattgagcagagagatgcagaaattaaagagaaggacggcatcatccagagctactacaataaaattgtaaacctggcagaaacttctgctggtaaagaggccaggatacaagaggtcgaagcaaagtttacccattgtcaagcaatttgcaatcgcatgactcaggagaaggagctgcttgaaaagcacaatgtctggcttgatgaagaactgaaagcaaaagtgaagaacttggctgaactaagaaaaacaaatatggatgaggaggctcggttgtcagcaagtattgctgagcttgaaagagagatatctgaatcctctagctccttgaggcgaagcaaagaacgcatctctgaactggagcaaagggtatcctacatggaaaaggagttgcgctcaacaaaggatactgcagctgctaatgaacaacgtctgggtgctgagctttcaactgtcaagaaacttgctgagcttcaccaagaaagttctgaggaatggtcgaaaaaggctggggagctcgaaggtgttattaaagcattagagacacatctgacccaagttgaagatgaatacaaggaaaagcttgagaaggagaccttgtccaggagagaccttgaaaaggaagctgtcaacttgaagcagaagcttgaaaagtgtgaatttgatctggagaatacaaggaagtccagtgaattgagcctcgttccattgaccagcattgcagcaggctcttctgatgtagtagacacaacagtacaaggactgcctatttctgatgcagttaatcagaatgatctaatggttattccaaaggtacctagtggtgtttctggtactgctttagctgcttctcttcttcgtgatggttggagtcttgctaagatctatgagaaataccaagaagctactgatgcttttcttcatgagaggcggggaaggagacatgcagaagcagttttggaaagggttttgcatgaaatagaagagaaggccgagcttatcctagatgaacgggctgaacatgagaggatggttgaagcttatgctatgatggatcagaaattgcagcaagcattgctggagcacgacaattttgaaaacaatgttaggaatctaaagtctgagctgaaaagacgggaacgtgatcatagcgtggcacagaaggaaatagatgacctgcaaaaacaagttgctgtccttttaaaagaatgccaagacatacaacttcgttgtggttctagccttcctaatgtaggttatgtcgcttcttcaagcttagtcaatgttctttccaatgtagagcatgatatcaaggacaatatgtcttttaaagacatcaacgggttagttcaacaaaatgttcaactaagaaatcaaattcacatgctctcagccgatcttgacaaaaaggatatggaactacgggagagcttccaaatcgagttgaagaaaattacagatgctgctgcgtccagggttgaaaaagttatgaagaaatctgaagaacaagcaataatgattgaatctctccatcgatctgtggcgatgtatcggaaactttgtgaggagcagcagaaggctcgttcaaatgttgaatcggcacccactactctgcaagatagcagcagaacagacctgatggttctgtttgaaggatcacaggaagtctcgaagaaagcttatgagcaagtctctgaacgagccagaagccttgatgaagagttgacaaaattgaggactgagcttgagtctctgcggtctgagcgtgataaggcggtgcttgaagctgattttgctcgggaccggcttaatgggtttgcagcggagcttgagcatcagaggaaggagtctaactctgcttcacttagaaatgcggagttgactcgtttagtagttgattatgaaagaagacttcgtgaagatttggattctaaacaagctttagaggagaatctaaggaagctatcaatggaggtgtccacattgaagaatgcaaaagagagtttagagaagtcagagagaagagctttggatgaagtccgtgatttaacggagcgagtgcatcgtttgcaggccacaatcgacacaatccataccactgaggaggtccaagagaatgctaggtccatggaaaggagaaatcatgaggaacacattaagcgactggaaagggattgggctgagcttaacaaggagcttcaagagcaacgagatcatgtccgtgttttgtctcttgacaagaaaaatgtcttcgacagctgcatgaagcaggtagaggatatgagaaaagagctaaataactcgtggaaagctgtttctgatgctgaagcaagggctgccattgcggaggccaagtgttctgatctagaggcaaaggtgaaatcgagaaaggccatttcaagggatggttgccatgaaatctcagccgcatctgaggagaatgatgaactattccagttgaaagaggagttagaaaaatacaaggaggaagcacaagcaaataagaactacatggttcagtacaaagaaatcgcacactcaaatgaagttgcgttgaagcaattggaatctgcacatcaggactacaaggctgagaccgaggttggcaggaaagccttggaagatgagattgttaacttgagggataagttatcagaaatggagaagagttatgtcattaagtgtgaagaagctgccaatgcaattgaatctaaagagaagcacatcacttctctcatgaatgaaatttctgttttaagaacagaagtttctcagaaactaccacagttagaaaaattggaaattgaattggctttgtcaaagagttcacttgatgagcagtataagcgctggcgaactgcccaagataattatgaacgccaggttattctgcaatctgagacgatacaggagttgacaaatacttctaagcagctatcttcgttgcagcatgaaatcactgtacttcgccagactgcagatgcactgaaaaatgaaaatgaatgtctaagatcttctgctgaacaagaaaagataggcttattgaaagagaaggacgatgccctgcagaagtataatgagcttaatgatcagaatagaattctacacaatcagttagaagctttacacattcggttagccgagaaagaacggaatattgctgggctttcatcacatcgtactgataattcacatgcagaagatgatctacaaagtgtcatcagttatctgcgcagatcgaaagaaatagccgaaacagagatatcattgcttaaacaggagaagtctcggcttcagatagaactggaaagttctttaaagtctgccaaggaggcacaggacttgttgcgaagtcaagctgatagtgccagggcattgatgttcaaggatgaagagttcaagtcactgcagattcaggtcagagaaattaacttgcttcgtgaaagcaacatacaacttagggaggagaacaggcacaattttgaagaatgccagaaattccgtgaagaagctcaaaaggctaaaatggaatctgagaggttgcagaaccttctactggagaaggaggtagacgctgaaatgtgcaaaagagaactggaaatgcagaaggcagaaatagctaatctcaaccaaagtatttctgagctgattgaaaatagcaaaggcattgatttgaacacttatgaagccatgaagaatgaacttcaaaatatcaaatcaaccttgagagagaattctatggagcttgaaagtgcaaagatactgctttctgagaaagaagttgccataaaaattttggaggataagctttcattatgtcaatctgaattggattccaaggaaaagaagctgaatgatgtagaggcgtcccttaaatctgagattgacaagcataagaagattaatttaaacttaaagagaaagcatgacaatttgatgaaggagaagggagagattgctaaagaaaatcaaagccttgtaaagcagatggaggatcttaaatcaactcagaagacaacatctgaaacaacacttgagcaggctattaaagaaaaggatttcaggatacagacattagaaagaactctggaaaaggaaagagatgataacaagaaagagaaggcaaagagtaggaggaatgagaacacaatctttggtgcacttcagaaggtgcaacaggacaagaaacaagtagaggagtctatagataagcataagcaggctgtgagagagttgattgagaattatcctggattatcatctgaagtgccacctatctctgcactagaagagcaacttctttcatacttccgtgcagctaaagatatggaggaatcttctagtcccttccgtgatggtgcagcaactcaaactccagttgttgaaactgcccctgtggatgcacctacttcagctggaggacgtccagtagatacttcgtcaaggccagctaaagctaaaatgacggaagaaagagcagttcccaaaccaagcagtgaagtacgtaggcctggaggaagaagaccccttgttcgtcctactcttgaacgaactgaagaacctcatgctgatacagatatatcagctgttgatgcctccacagttcaggacaaaggggggccaccagcagagcaagaaacttctggaattttacctgtgttacagcctttgagtcgtaaacggcttatcacatcttcacagacggtagacagtgcctcgcagggtgaggctaatgatgtcaatcctccatctaagaagcccaaggaggaagaatcttcacaagggactagtgaactcaaaagtggtcaaccacctcttggggatgtagcggcacaggttaatgtgcttccagccactgatgacctagatggacaacagcctacagaagagatcgatactgatcaggcacctgagccaatggtagaggttgaggcaacaagggaagaggatgggggtgataaagatgactctggagatgcatcaacggacatcaaaggccaggatgctgatgctaatattgacgcaaatgcaattcctttagaagaagagcatgtagtggcaaagtcagaggcaataattgaatcatttgatgatgaccggaaaacagaagattcgaaggaagatgctcagcgtactactgcaactgatgttgatgatgacatggaggagggagagttggcagaggaacctgaagacaagagtgacgttgatatgtcagagatcgagggtgaggctacagccgaacgtgctgctgtggaaccggaccaaagtcctataacacaacctggtgcagctgatgcctcaccaagcagaactgcagatgcatctcctgctcgtgaaccttcccctagtccggtccaagctggtgcatcttctcgaccccagaatactagcactgcaacagaggcacgtgaaccttcctctaacccagcccaagctggtgcgtcttctgaacagcggaacaccagtactgtagtggaggctgctgaaactcgttccagaacaatcaacttaagtgagagggccagacaaaacaggcaaaccaggtttcaacgcgcacaacaacctggcactgctcggggtcgtggccagcaatctgttacactcagggtatggtttctttattcttgttcatttcagttgggtgcttatatccagcattgagctgattcggggctgcctttgttttgcagaaagatgctacgggtcgaggatcaaggggccgcggggggcgtggtcagtcctagtaaagtagattgtcttttctcgtgcagggataattttgtccattgggatagagacccttgtatttttagattgatcgacgaacttcatggggatacagagacccttgtgtttttagattgatcgacgaattttgtctcattggtttttactaaatgttccctgacctgcgtgcgaatccttgtgggttctgagaccgctatatctaatccaaactgttgtgtttgttggtactatgggctggagctgcacctcctgaatcccaatagcactagcatttttcacatagccataaaaatgatgctacgtgaagcattccttggggtggatccctacccgggcttctaaaccacgactttatacatgactttcatttctctttgtatatggactaaaatgacttgttagtgttta

SEQ ID NO: 41094 - DNA, 6778 bp, Zea Mays
gacatatttgctgcctcacttcacgccgctttgtttctcgctgtctctcgactctctactcactactgcccaattgagcccctccgcttccgcccttccgcccttccgccaccaccaccacacctcgtccagcggcggtcggcaaaccctagaaccttagacccatccgccatactgcggttactgggcgcgggctagggccgggcctccgtaatcgcagcttgcggcgatgccgcttttcatctccgacgaggagctccgtctcctcggcggcgacacggctgccgttgccgagcgggctgatgctgccatccgtgagctccggcggcaggtggataccgtacgcgccgaggcggatgccgctgcgatcgctgccgagcagacctgcgccctcctcgagcaacggtacgcctccctctccgcggagttcgatcgctccaaggccgaggctgccgagctcaccgcctctgccgagcgccgcgctgccgagcttgcctcctctcaggcggagatacatcagcttcgcatccaggcgattgctaaggatggtgaggtggagaggttgaaaattgaaatctcggagctgcacaagtccaagtgccagtcgctggagttgattgagcagagagatgcagaaattaaagagaaggacggcatcatccagagctactacaataaaattgtaaacctggcagaaacttctgctggtaaagaggccaggatacaagaggtcgaagcaaagtttacccattgtcaagcaatttgcaatcgcatgactcaggagaaggagctgcttgaaaagcacaatgtctggcttgatgaagaactgaaagcaaaagtgaagaacttggctgaactaagaaaaacaaatatggatgaggaggctcggttgtcagcaagtattgctgagcttgaaagagagatatctgaatcctctagctccttgaggcgaagcaaagaacgcatctctgaactggagcaaagggtatcctacatggaaaaggagttgcgctcaacaaaggatactgcagctgctaatgaacaacgtctgggtgctgagctttcaactgtcaagaaacttgctgagcttcaccaagaaagttctgaggaatggtcgaaaaaggctggggagctcgaaggtgttattaaagcattagagacacatctgacccaagttgaagatgaatacaaggaaaagcttgagaaggagaccttgtccaggagagaccttgaaaaggaagctgtcaacttgaagcagaagcttgaaaagtgtgaatttgatctggagaatacaaggaagtccagtgaattgagcctcgttccattgaccagcattgcagcaggctcttctgatgtagtagacacaacagtacaaggactgcctatttctgatgcagttaatcagaatgatctaatggttattccaaaggtacctagtggtgtttctggtactgctttagctgcttctcttcttcgtgatggttggagtcttgctaagatctatgagaaataccaagaagctactgatgcttttcttcatgagaggcggggaaggagacatgcagaagcagttttggaaagggttttgcatgaaatagaagagaaggccgagcttatcctagatgaacgggctgaacatgagaggatggttgaagcttatgctatgatggatcagaaattgcagcaagcattgctggagcacgacaattttgaaaacaatgttaggaatctaaagtctgagctgaaaagacgggaacgtgatcatagcgtggcacagaaggaaatagatgacctgcaaaaacaagttgctgtccttttaaaagaatgccaagacatacaacttcgttgtggttctagccttcctaatgtaggttatgtcgcttcttcaagcttagtcaatgttctttccaatgtagagcatgatatcaaggacaatatgtcttttaaagacatcaacgggttagttcaacaaaatgttcaactaagaaatcaaattcacatgctctcagccgatcttgacaaaaaggatatggaactacgggagagcttccaaatcgagttgaagaaaattacagatgctgctgcgtccagggttgaaaaagttatgaagaaatctgaagaacaagcaataatgattgaatctctccatcgatctgtggcgatgtatcggaaactttgtgaggagcagcagaaggctcgttcaaatgttgaatcggcacccactactctgcaagatagcagcagaacagacctgatggttctgtttgaaggatcacaggaagtctcgaagaaagcttatgagcaagtctctgaacgagccagaagccttgatgaagagttgacaaaattgaggactgagcttgagtctctgcggtctgagcgtgataaggcggtgcttgaagctgattttgctcgggaccggcttaatgggtttgcagcggagcttgagcatcagaggaaggagtctaactctgcttcacttagaaatgcggagttgactcgtttagtagttgattatgaaagaagacttcgtgaagatttggattctaaacaagctttagaggagaatctaaggaagctatcaatggaggtgtccacattgaagaatgcaaaagagagtttagagaagtcagagagaagagctttggatgaagtccgtgatttaacggagcgagtgcatcgtttgcaggccacaatcgacacaatccataccactgaggaggtccaagagaatgctaggtccatggaaaggagaaatcatgaggaacacattaagcgactggaaagggattgggctgagcttaacaaggagcttcaagagcaacgagatcatgtccgtgttttgtctcttgacaagaaaaatgtcttcgacagctgcatgaagcaggtagaggatatgagaaaagagctaaataactcgtggaaagctgtttctgatgctgaagcaagggctgccattgcggaggccaagtgttctgatctagaggcaaaggtgaaatcgagaaaggccatttcaagggatggttgccatgaaatctcagccgcatctgaggagaatgatgaactattccagttgaaagaggagttagaaaaatacaaggaggaagcacaagcaaataagaactacatggttcagtacaaagaaatcgcacactcaaatgaagttgcgttgaagcaattggaatctgcacatcaggactacaaggctgagaccgaggttggcaggaaagccttggaagatgagattgttaacttgagggataagttatcagaaatggagaagagttatgtcattaagtgtgaagaagctgccaatgcaattgaatctaaagagaagcacatcacttctctcatgaatgaaatttctgttttaagaacagaagtttctcagaaactaccacagttagaaaaattggaaattgaattggctttgtcaaagagttcacttgatgagcagtataagcgctggcgaactgcccaagataattatgaacgccaggttattctgcaatctgagacgatacaggagttgacaaatacttctaagcagctatcttcgttgcagcatgaaatcactgtacttcgccagactgcagatgcactgaaaaatgaaaatgaatgtctaagatcttctgctgaacaagaaaagataggcttattgaaagagaaggacgatgccctgcagaagtataatgagcttaatgatcagaatagaattctacacaatcagttagaagctttacacattcggttagccgagaaagaacggaatattgctgggctttcatcacatcgtactgataattcacatgcagaagatgatctacaaagtgtcatcagttatctgcgcagatcgaaagaaatagccgaaacagagatatcattgcttaaacaggagaagtctcggcttcagatagaactggaaagttctttaaagtctgccaaggaggcacaggacttgttgcgaagtcaagctgatagtgccagggcattgatgttcaaggatgaagagttcaagtcactgcagattcaggtcagagaaattaacttgcttcgtgaaagcaacatacaacttagggaggagaacaggcacaattttgaagaatgccagaaattccgtgaagaagctcaaaaggctaaaatggaatctgagaggttgcagaaccttctactggagaaggaggtagacgctgaaatgtgcaaaagagaactggaaatgcagaaggcagaaatagctaatctcaaccaaagtatttctgagctgattgaaaatagcaaaggcattgatttgaacacttatgaagccatgaagaatgaacttcaaaatatcaaatcaaccttgagagagaattctatggagcttgaaagtgcaaagatactgctttctgagaaagaagttgccataaaaattttggaggataagctttcattatgtcaatctgaattggattccaaggaaaagaagctgaatgatgtagaggcgtcccttaaatctgagattgacaagcataagaagattaatttaaacttaaagagaaagcatgacaatttgatgaaggagaagggagagattgctaaagaaaatcaaagccttgtaaagcagatggaggatcttaaatcaacagctcagaagacaacatctgaaacaacacttgagcaggctattaaagaaaaggatttcaggatacagacattagaaagaactctggaaaaggaaagagatgataacaagaaagagaaggcaaagagtaggaggaatgagaacacaatctttggtgcacttcagaaggtgcaacaggacaagaaacaagtagaggagtctatagataagcataagcaggctgtgagagagttgattgagaattatcctggattatcatctgaagtgccacctatctctgcactagaagagcaacttctttcatacttccgtgcagctaaagatatggaggaatcttctagtcccttccgtgatggtgcagcaactcaaactccagttgttgaaactgcccctgtggatgcacctacttcagctggaggacgtccagtagatacttcgtcaaggccagctaaagctaaaatgacggaagaaagagcagttcccaaaccaagcagtgaagtacgtaggcctggaggaagaagaccccttgttcgtcctactcttgaacgaactgaagaacctcatgctgatacagatatatcagctgttgatgcctccacagttcaggacaaaggggggccaccagcagagcaagaaacttctggaattttacctgtgttacagcctttgagtcgtaaacggcttatcacatcttcacagacggtagacagtgcctcgcagggtgaggctaatgatgtcaatcctccatctaagaagcccaaggaggaagaatcttcacaagggactagtgaactcaaaagtggtcaaccacctcttggggatgtagcggcacaggttaatgtgcttccagccactgatgacctagatggacaacagcctacagaagagatcgatactgatcaggcacctgagccaatggtagaggttgaggcaacaagggaagaggatgggggtgataaagatgactctggagatgcatcaacggacatcaaaggccaggatgctgatgctaatattgacgcaaatgcaattcctttagaagaagagcatgtagtggcaaagtcagaggcaataattgaatcatttgatgatgaccggaaaacagaagattcgaaggaagatgctcagcgtactactgcaactgatgttgatgatgacatggaggagggagagttggcagaggaacctgaagacaagagtgacgttgatatgtcagagatcgagggtgaggctacagccgaacgtgctgctgtggaaccggaccaaagtcctataacacaacctggtgcagctgatgcctcaccaagcagaactgcagatgcatctcctgctcgtgaaccttcccctagtccggtccaagctggtgcatcttctcgaccccagaatactagcactgcaacagaggcacgtgaaccttcctctaacccagcccaagctggtgcgtcttctgaacagcggaacaccagtactgtagtggaggctgctgaaactcgttccagaacaatcaacttaagtgagagggccagacaaaacaggcaaaccaggtttcaacgcgcacaacaacctggcactgctcggggtcgtggccagcaatctgttacactcagggtatggtttctttattcttgttcatttcagttgggtgcttatatccagcattgagctgattcggggctgcctttgttttgcagaaagatgctacgggtcgaggatcaaggggccgcggggggcgtggtcagtcctagtaaagtagattgtcttttctcgtgcagggataattttgtccattgggatagagacccttgtatttttagattgatcgacgaacttcatggggatacagagacccttgtgtttttagattgatcgacgaattttgtctcattggtttttactaaatgttccctgacctgcgtgcgaatccttgtgggttctgagaccgctatatctaatccaaactgttgtgtttgttggtactatgggctggagctgcacctcctgaatcccaatagcactagcatttttcacatagccataaaaatgatgctacgtgaagcattccttggggtggatccctacccgggcttctaaaccacgactttatacatgactttcatttctctttgtatatggactaaaatgacttgttagtgttta

SEQ ID NO: 41095 - DNA, 6529 bp, Zea Mays
ttccgccaccaccaccacacctcgtccagcggcggtcggcaaaccctagaaccttagacccatccgccatactgcggttactgggcgcgggctagggccgggcctccgtaatcgcagcttgcggcgatgccgcttttcatctccgacgaggagctccgtctcctcggcggcgacacggctgccgttgccgagcgggctgatgctgccatccgtgagctccggcggcaggtggataccgtacgcgccgaggcggatgccgctgcgatcgctgccgagcagacctgcgccctcctcgagcaacggtacgcctccctctccgcggagttcgatcgctccaaggccgaggctgccgagctcaccgcctctgccgagcgccgcgctgccgagcttgcctcctctcaggcggagatacatcagcttcgcatccaggcgattgctaaggatggtgaggtggagaggttgaaaattgaaatctcggagctgcacaagtccaagtgccagtcgctggagttgattgagcagagagatgcagaaattaaagagaaggacggcatcatccagagctactacaataaaattgtaaacctggcagaaacttctgctggtaaagaggccaggatacaagaggtcgaagcaaagtttacccattgtcaagcaatttgcaatcgcatgactcaggagaaggagctgcttgaaaagcacaatgtctggcttgatgaagaactgaaagcaaaagtgaagaacttggctgaactaagaaaaacaaatatggatgaggaggctcggttgtcagcaagtattgctgagcttgaaagagagatatctgaatcctctagctccttgaggcgaagcaaagaacgcatctctgaactggagcaaagggtatcctacatggaaaaggtcaagaaacttgctgagcttcaccaagaaagttctgaggaatggtcgaaaaaggctggggagctcgaaggtgttattaaagcattagagacacatctgacccaagttgaagatgaatacaaggaaaagcttgagaaggagaccttgtccaggagagaccttgaaaaggaagctgtcaacttgaagcagaagcttgaaaagtgtgaatttgatctggagaatacaaggaagtccagtgaattgagcctcgttccattgaccagcattgcagcaggctcttctgatgtagtagacacaacagtacaaggactgcctatttctgatgcagttaatcagaatgatctaatggttattccaaaggtacctagtggtgtttctggtactgctttagctgcttctcttcttcgtgatggttggagtcttgctaagatctatgagaaataccaagaagctactgatgcttttcttcatgagaggcggggaaggagacatgcagaagcagttttggaaagggttttgcatgaaatagaagagaaggccgagcttatcctagatgaacgggctgaacatgagaggatggttgaagcttatgctatgatggatcagaaattgcagcaagcattgctggagcacgacaattttgaaaacaatgttaggaatctaaagtctgagctgaaaagacgggaacgtgatcatagcgtggcacagaaggaaatagatgacctgcaaaaacaagttgctgtccttttaaaagaatgccaagacatacaacttcgttgtggttctagccttcctaatgtaggttatgtcgcttcttcaagcttagtcaatgttctttccaatgtagagcatgatatcaaggacaatatgtcttttaaagacatcaacgggttagttcaacaaaatgttcaactaagaaatcaaattcacatgctctcagccgatcttgacaaaaaggatatggaactacgggagagcttccaaatcgagttgaagaaaattacagatgctgctgcgtccagggttgaaaaagttatgaagaaatctgaagaacaagcaataatgattgaatctctccatcgatctgtggcgatgtatcggaaactttgtgaggagcagcagaaggctcgttcaaatgttgaatcggcacccactactctgcaagatagcagcagaacagacctgatggttctgtttgaaggatcacaggaagtctcgaagaaagcttatgagcaagtctctgaacgagccagaagccttgatgaagagttgacaaaattgaggactgagcttgagtctctgcggtctgagcgtgataaggcggtgcttgaagctgattttgctcgggaccggcttaatgggtttgcagcggagcttgagcatcagaggaaggagtctaactctgcttcacttagaaatgcggagttgactcgtttagtagttgattatgaaagaagacttcgtgaagatttggattctaaacaagctttagaggagaatctaaggaagctatcaatggaggtgtccacattgaagaatgcaaaagagagtttagagaagtcagagagaagagctttggatgaagtccgtgatttaacggagcgagtgcatcgtttgcaggccacaatcgacacaatccataccactgaggaggtccaagagaatgctaggtccatggaaaggagaaatcatgaggaacacattaagcgactggaaagggattgggctgagcttaacaaggagcttcaagagcaacgagatcatgtccgtgttttgtctcttgacaagaaaaatgtcttcgacagctgcatgaagcaggtagaggatatgagaaaagagctaaataactcgtggaaagctgtttctgatgctgaagcaagggctgccattgcggaggccaagtgttctgatctagaggcaaaggtgaaatcgagaaaggccatttcaagggatggttgccatgaaatctcagccgcatctgaggagaatgatgaactattccagttgaaagaggagttagaaaaatacaaggaggaagcacaagcaaataagaactacatggttcagtacaaagaaatcgcacactcaaatgaagttgcgttgaagcaattggaatctgcacatcaggactacaaggctgagaccgaggttggcaggaaagccttggaagatgagattgttaacttgagggataagttatcagaaatggagaagagttatgtcattaagtgtgaagaagctgccaatgcaattgaatctaaagagaagcacatcacttctctcatgaatgaaatttctgttttaagaacagaagtttctcagaaactaccacagttagaaaaattggaaattgaattggctttgtcaaagagttcacttgatgagcagtataagcgctggcgaactgcccaagataattatgaacgccaggttattctgcaatctgagacgatacaggagttgacaaatacttctaagcagctatcttcgttgcagcatgaaatcactgtacttcgccagactgcagatgcactgaaaaatgaaaatgaatgtctaagatcttctgctgaacaagaaaagataggcttattgaaagagaaggacgatgccctgcagaagtataatgagcttaatgatcagaatagaattctacacaatcagttagaagctttacacattcggttagccgagaaagaacggaatattgctgggctttcatcacatcgtactgataattcacatgcagaagatgatctacaaagtgtcatcagttatctgcgcagatcgaaagaaatagccgaaacagagatatcattgcttaaacaggagaagtctcggcttcagatagaactggaaagttctttaaagtctgccaaggaggcacaggacttgttgcgaagtcaagctgatagtgccagggcattgatgttcaaggatgaagagttcaagtcactgcagattcaggtcagagaaattaacttgcttcgtgaaagcaacatacaacttagggaggagaacaggcacaattttgaagaatgccagaaattccgtgaagaagctcaaaaggctaaaatggaatctgagaggttgcagaaccttctactggagaaggaggtagacgctgaaatgtgcaaaagagaactggaaatgcagaaggcagaaatagctaatctcaaccaaagtatttctgagctgattgaaaatagcaaaggcattgatttgaacacttatgaagccatgaagaatgaacttcaaaatatcaaatcaaccttgagagagaattctatggagcttgaaagtgcaaagatactgctttctgagaaagaagttgccataaaaattttggaggataagctttcattatgtcaatctgaattggattccaaggaaaagaagctgaatgatgtagaggcgtcccttaaatctgagattgacaagcataagaagattaatttaaacttaaagagaaagcatgacaatttgatgaaggagaagggagagattgctaaagaaaatcaaagccttgtaaagcagatggaggatcttaaatcaactcagaagacaacatctgaaacaacacttgagcaggctattaaagaaaaggatttcaggatacagacattagaaagaactctggaaaaggaaagagatgataacaagaaagagaaggcaaagagtaggaggaatgagaacacaatctttggtgcacttcagaaggtgcaacaggacaagaaacaagtagaggagtctatagataagcataagcaggctgtgagagagttgattgagaattatcctggattatcatctgaagtgccacctatctctgcactagaagagcaacttctttcatacttccgtgcagctaaagatatggaggaatcttctagtcccttccgtgatggtgcagcaactcaaactccagttgttgaaactgcccctgtggatgcacctacttcagctggagttgcaggacgtccagtagatacttcgtcaaggccagctaaagctaaaatgacggaagaaagagcagttcccaaaccaagcagtgaagtacgtaggcctggaggaagaagaccccttgttcgtcctactcttgaacgaactgaagaacctcatgctgatacagatatatcagctgttgatgcctccacagttcaggacaaaggggggccaccagcagagcaagaaacttctggaattttacctgtgttacagcctttgagtcgtaaacggcttatcacatcttcacagacggtagacagtgcctcgcagggtgaggctaatgatgtcaatcctccatctaagaagcccaaggaggaagaatcttcacaagggactagtgaactcaaaagtggtcaaccacctcttggggatgtagcggcacaggttaatgtgcttccagccactgatgacctagatggacaacagcctacagaagagatcgatactgatcaggcacctgagccaatggtagaggttgaggcaacaagggaagaggatgggggtgataaagatgactctggagatgcatcaacggacatcaaaggccaggatgctgatgctaatattgacgcaaatgcaattcctttagaagaagagcatgtagtggcaaagtcagaggcaataattgaatcatttgatgatgaccggaaaacagaagattcgaaggaagatgctcagcgtactactgcaactgatgttgatgatgacatggaggagggagagttggcagaggaacctgaagacaagagtgacgttgatatgtcagagatcgagggtgaggctacagccgaacgtgctgctgtggaaccggaccaaagtcctataacacaacctggtgcagctgatgcctcaccaagcagaactgcagatgcatctcctgctcgtgaaccttcccctagtccggtccaagctggtgcatcttctcgaccccagaatactagcactgcaacagaggcacgtgaaccttcctctaacccagcccaagctggtgcgtcttctgaacagcggaacaccagtactgtagtggaggctgctgaaactcgttccagaacaatcaacttaagtgagagggccagacaaaacaggcaaaccaggtttcaacgcgcacaacaacctggcactgctcggggtcgtggccagcaatctgttacactcaggaaagatgctacgggtcgaggatcaaggggccgcggggggcgtggtcagtcctagtaaagtagattgtcttttctcgtgcagggataattttgtccattgggatagagacccttgtatttttagattgatcgacgaacttcatggggatacagagacccttgtgtttttagattgatcgacgaattttgtctcattggtttttactaaatgttccctgacctgcgtgcgaatccttgtgggttctgagaccgctatatctaatccaaactgttgtgtttgttggtactatgggctggagctgcacctcctgaatcccaatagcactagcatttttcacatagccataaaaatgatgctacgtgaagcattccttggggtggatccctacccgggcttctaaaccacgactttatacatgactttcatttctctttgtatatggactaaaatgacttgttagtgttta

SEQ ID NO: 41096 - DNA, 6526 bp, Zea Mays
ttccgccaccaccaccacacctcgtccagcggcggtcggcaaaccctagaaccttagacccatccgccatactgcggttactgggcgcgggctagggccgggcctccgtaatcgcagcttgcggcgatgccgcttttcatctccgacgaggagctccgtctcctcggcggcgacacggctgccgttgccgagcgggctgatgctgccatccgtgagctccggcggcaggtggataccgtacgcgccgaggcggatgccgctgcgatcgctgccgagcagacctgcgccctcctcgagcaacggtacgcctccctctccgcggagttcgatcgctccaaggccgaggctgccgagctcaccgcctctgccgagcgccgcgctgccgagcttgcctcctctcaggcggagatacatcagcttcgcatccaggcgattgctaaggatggtgaggtggagaggttgaaaattgaaatctcggagctgcacaagtccaagtgccagtcgctggagttgattgagcagagagatgcagaaattaaagagaaggacggcatcatccagagctactacaataaaattgtaaacctggcagaaacttctgctggtaaagaggccaggatacaagaggtcgaagcaaagtttacccattgtcaagcaatttgcaatcgcatgactcaggagaaggagctgcttgaaaagcacaatgtctggcttgatgaagaactgaaagcaaaagtgaagaacttggctgaactaagaaaaacaaatatggatgaggaggctcggttgtcagcaagtattgctgagcttgaaagagagatatctgaatcctctagctccttgaggcgaagcaaagaacgcatctctgaactggagcaaagggtatcctacatggaaaaggtcaagaaacttgctgagcttcaccaagaaagttctgaggaatggtcgaaaaaggctggggagctcgaaggtgttattaaagcattagagacacatctgacccaagttgaagatgaatacaaggaaaagcttgagaaggagaccttgtccaggagagaccttgaaaaggaagctgtcaacttgaagcagaagcttgaaaagtgtgaatttgatctggagaatacaaggaagtccagtgaattgagcctcgttccattgaccagcattgcagcaggctcttctgatgtagtagacacaacagtacaaggactgcctatttctgatgcagttaatcagaatgatctaatggttattccaaaggtacctagtggtgtttctggtactgctttagctgcttctcttcttcgtgatggttggagtcttgctaagatctatgagaaataccaagaagctactgatgcttttcttcatgagaggcggggaaggagacatgcagaagcagttttggaaagggttttgcatgaaatagaagagaaggccgagcttatcctagatgaacgggctgaacatgagaggatggttgaagcttatgctatgatggatcagaaattgcagcaagcattgctggagcacgacaattttgaaaacaatgttaggaatctaaagtctgagctgaaaagacgggaacgtgatcatagcgtggcacagaaggaaatagatgacctgcaaaaacaagttgctgtccttttaaaagaatgccaagacatacaacttcgttgtggttctagccttcctaatgtaggttatgtcgcttcttcaagcttagtcaatgttctttccaatgtagagcatgatatcaaggacaatatgtcttttaaagacatcaacgggttagttcaacaaaatgttcaactaagaaatcaaattcacatgctctcagccgatcttgacaaaaaggatatggaactacgggagagcttccaaatcgagttgaagaaaattacagatgctgctgcgtccagggttgaaaaagttatgaagaaatctgaagaacaagcaataatgattgaatctctccatcgatctgtggcgatgtatcggaaactttgtgaggagcagcagaaggctcgttcaaatgttgaatcggcacccactactctgcaagatagcagcagaacagacctgatggttctgtttgaaggatcacaggaagtctcgaagaaagcttatgagcaagtctctgaacgagccagaagccttgatgaagagttgacaaaattgaggactgagcttgagtctctgcggtctgagcgtgataaggcggtgcttgaagctgattttgctcgggaccggcttaatgggtttgcagcggagcttgagcatcagaggaaggagtctaactctgcttcacttagaaatgcggagttgactcgtttagtagttgattatgaaagaagacttcgtgaagatttggattctaaacaagctttagaggagaatctaaggaagctatcaatggaggtgtccacattgaagaatgcaaaagagagtttagagaagtcagagagaagagctttggatgaagtccgtgatttaacggagcgagtgcatcgtttgcaggccacaatcgacacaatccataccactgaggaggtccaagagaatgctaggtccatggaaaggagaaatcatgaggaacacattaagcgactggaaagggattgggctgagcttaacaaggagcttcaagagcaacgagatcatgtccgtgttttgtctcttgacaagaaaaatgtcttcgacagctgcatgaagcaggtagaggatatgagaaaagagctaaataactcgtggaaagctgtttctgatgctgaagcaagggctgccattgcggaggccaagtgttctgatctagaggcaaaggtgaaatcgagaaaggccatttcaagggatggttgccatgaaatctcagccgcatctgaggagaatgatgaactattccagttgaaagaggagttagaaaaatacaaggaggaagcacaagcaaataagaactacatggttcagtacaaagaaatcgcacactcaaatgaagttgcgttgaagcaattggaatctgcacatcaggactacaaggctgagaccgaggttggcaggaaagccttggaagatgagattgttaacttgagggataagttatcagaaatggagaagagttatgtcattaagtgtgaagaagctgccaatgcaattgaatctaaagagaagcacatcacttctctcatgaatgaaatttctgttttaagaacagaagtttctcagaaactaccacagttagaaaaattggaaattgaattggctttgtcaaagagttcacttgatgagcagtataagcgctggcgaactgcccaagataattatgaacgccaggttattctgcaatctgagacgatacaggagttgacaaatacttctaagcagctatcttcgttgcagcatgaaatcactgtacttcgccagactgcagatgcactgaaaaatgaaaatgaatgtctaagatcttctgctgaacaagaaaagataggcttattgaaagagaaggacgatgccctgcagaagtataatgagcttaatgatcagaatagaattctacacaatcagttagaagctttacacattcggttagccgagaaagaacggaatattgctgggctttcatcacatcgtactgataattcacatgcagaagatgatctacaaagtgtcatcagttatctgcgcagatcgaaagaaatagccgaaacagagatatcattgcttaaacaggagaagtctcggcttcagatagaactggaaagttctttaaagtctgccaaggaggcacaggacttgttgcgaagtcaagctgatagtgccagggcattgatgttcaaggatgaagagttcaagtcactgcagattcaggtcagagaaattaacttgcttcgtgaaagcaacatacaacttagggaggagaacaggcacaattttgaagaatgccagaaattccgtgaagaagctcaaaaggctaaaatggaatctgagaggttgcagaaccttctactggagaaggaggtagacgctgaaatgtgcaaaagagaactggaaatgcagaaggcagaaatagctaatctcaaccaaagtatttctgagctgattgaaaatagcaaaggcattgatttgaacacttatgaagccatgaagaatgaacttcaaaatatcaaatcaaccttgagagagaattctatggagcttgaaagtgcaaagatactgctttctgagaaagaagttgccataaaaattttggaggataagctttcattatgtcaatctgaattggattccaaggaaaagaagctgaatgatgtagaggcgtcccttaaatctgagattgacaagcataagaagattaatttaaacttaaagagaaagcatgacaatttgatgaaggagaagggagagattgctaaagaaaatcaaagccttgtaaagcagatggaggatcttaaatcaacagctcagaagacaacatctgaaacaacacttgagcaggctattaaagaaaaggatttcaggatacagacattagaaagaactctggaaaaggaaagagatgataacaagaaagagaaggcaaagagtaggaggaatgagaacacaatctttggtgcacttcagaaggtgcaacaggacaagaaacaagtagaggagtctatagataagcataagcaggctgtgagagagttgattgagaattatcctggattatcatctgaagtgccacctatctctgcactagaagagcaacttctttcatacttccgtgcagctaaagatatggaggaatcttctagtcccttccgtgatggtgcagcaactcaaactccagttgttgaaactgcccctgtggatgcacctacttcagctggaggacgtccagtagatacttcgtcaaggccagctaaagctaaaatgacggaagaaagagcagttcccaaaccaagcagtgaagtacgtaggcctggaggaagaagaccccttgttcgtcctactcttgaacgaactgaagaacctcatgctgatacagatatatcagctgttgatgcctccacagttcaggacaaaggggggccaccagcagagcaagaaacttctggaattttacctgtgttacagcctttgagtcgtaaacggcttatcacatcttcacagacggtagacagtgcctcgcagggtgaggctaatgatgtcaatcctccatctaagaagcccaaggaggaagaatcttcacaagggactagtgaactcaaaagtggtcaaccacctcttggggatgtagcggcacaggttaatgtgcttccagccactgatgacctagatggacaacagcctacagaagagatcgatactgatcaggcacctgagccaatggtagaggttgaggcaacaagggaagaggatgggggtgataaagatgactctggagatgcatcaacggacatcaaaggccaggatgctgatgctaatattgacgcaaatgcaattcctttagaagaagagcatgtagtggcaaagtcagaggcaataattgaatcatttgatgatgaccggaaaacagaagattcgaaggaagatgctcagcgtactactgcaactgatgttgatgatgacatggaggagggagagttggcagaggaacctgaagacaagagtgacgttgatatgtcagagatcgagggtgaggctacagccgaacgtgctgctgtggaaccggaccaaagtcctataacacaacctggtgcagctgatgcctcaccaagcagaactgcagatgcatctcctgctcgtgaaccttcccctagtccggtccaagctggtgcatcttctcgaccccagaatactagcactgcaacagaggcacgtgaaccttcctctaacccagcccaagctggtgcgtcttctgaacagcggaacaccagtactgtagtggaggctgctgaaactcgttccagaacaatcaacttaagtgagagggccagacaaaacaggcaaaccaggtttcaacgcgcacaacaacctggcactgctcggggtcgtggccagcaatctgttacactcaggaaagatgctacgggtcgaggatcaaggggccgcggggggcgtggtcagtcctagtaaagtagattgtcttttctcgtgcagggataattttgtccattgggatagagacccttgtatttttagattgatcgacgaacttcatggggatacagagacccttgtgtttttagattgatcgacgaattttgtctcattggtttttactaaatgttccctgacctgcgtgcgaatccttgtgggttctgagaccgctatatctaatccaaactgttgtgtttgttggtactatgggctggagctgcacctcctgaatcccaatagcactagcatttttcacatagccataaaaatgatgctacgtgaagcattccttggggtggatccctacccgggcttctaaaccacgactttatacatgactttcatttctctttgtatatggactaaaatgacttgttagtgttta

SEQ ID NO: 41097 - DNA, 6532 bp, Zea Mays
ttccgccaccaccaccacacctcgtccagcggcggtcggcaaaccctagaaccttagacccatccgccatactgcggttactgggcgcgggctagggccgggcctccgtaatcgcagcttgcggcgatgccgcttttcatctccgacgaggagctccgtctcctcggcggcgacacggctgccgttgccgagcgggctgatgctgccatccgtgagctccggcggcaggtggataccgtacgcgccgaggcggatgccgctgcgatcgctgccgagcagacctgcgccctcctcgagcaacggtacgcctccctctccgcggagttcgatcgctccaaggccgaggctgccgagctcaccgcctctgccgagcgccgcgctgccgagcttgcctcctctcaggcggagatacatcagcttcgcatccaggcgattgctaaggatggtgaggtggagaggttgaaaattgaaatctcggagctgcacaagtccaagtgccagtcgctggagttgattgagcagagagatgcagaaattaaagagaaggacggcatcatccagagctactacaataaaattgtaaacctggcagaaacttctgctggtaaagaggccaggatacaagaggtcgaagcaaagtttacccattgtcaagcaatttgcaatcgcatgactcaggagaaggagctgcttgaaaagcacaatgtctggcttgatgaagaactgaaagcaaaagtgaagaacttggctgaactaagaaaaacaaatatggatgaggaggctcggttgtcagcaagtattgctgagcttgaaagagagatatctgaatcctctagctccttgaggcgaagcaaagaacgcatctctgaactggagcaaagggtatcctacatggaaaaggtcaagaaacttgctgagcttcaccaagaaagttctgaggaatggtcgaaaaaggctggggagctcgaaggtgttattaaagcattagagacacatctgacccaagttgaagatgaatacaaggaaaagcttgagaaggagaccttgtccaggagagaccttgaaaaggaagctgtcaacttgaagcagaagcttgaaaagtgtgaatttgatctggagaatacaaggaagtccagtgaattgagcctcgttccattgaccagcattgcagcaggctcttctgatgtagtagacacaacagtacaaggactgcctatttctgatgcagttaatcagaatgatctaatggttattccaaaggtacctagtggtgtttctggtactgctttagctgcttctcttcttcgtgatggttggagtcttgctaagatctatgagaaataccaagaagctactgatgcttttcttcatgagaggcggggaaggagacatgcagaagcagttttggaaagggttttgcatgaaatagaagagaaggccgagcttatcctagatgaacgggctgaacatgagaggatggttgaagcttatgctatgatggatcagaaattgcagcaagcattgctggagcacgacaattttgaaaacaatgttaggaatctaaagtctgagctgaaaagacgggaacgtgatcatagcgtggcacagaaggaaatagatgacctgcaaaaacaagttgctgtccttttaaaagaatgccaagacatacaacttcgttgtggttctagccttcctaatgtaggttatgtcgcttcttcaagcttagtcaatgttctttccaatgtagagcatgatatcaaggacaatatgtcttttaaagacatcaacgggttagttcaacaaaatgttcaactaagaaatcaaattcacatgctctcagccgatcttgacaaaaaggatatggaactacgggagagcttccaaatcgagttgaagaaaattacagatgctgctgcgtccagggttgaaaaagttatgaagaaatctgaagaacaagcaataatgattgaatctctccatcgatctgtggcgatgtatcggaaactttgtgaggagcagcagaaggctcgttcaaatgttgaatcggcacccactactctgcaagatagcagcagaacagacctgatggttctgtttgaaggatcacaggaagtctcgaagaaagcttatgagcaagtctctgaacgagccagaagccttgatgaagagttgacaaaattgaggactgagcttgagtctctgcggtctgagcgtgataaggcggtgcttgaagctgattttgctcgggaccggcttaatgggtttgcagcggagcttgagcatcagaggaaggagtctaactctgcttcacttagaaatgcggagttgactcgtttagtagttgattatgaaagaagacttcgtgaagatttggattctaaacaagctttagaggagaatctaaggaagctatcaatggaggtgtccacattgaagaatgcaaaagagagtttagagaagtcagagagaagagctttggatgaagtccgtgatttaacggagcgagtgcatcgtttgcaggccacaatcgacacaatccataccactgaggaggtccaagagaatgctaggtccatggaaaggagaaatcatgaggaacacattaagcgactggaaagggattgggctgagcttaacaaggagcttcaagagcaacgagatcatgtccgtgttttgtctcttgacaagaaaaatgtcttcgacagctgcatgaagcaggtagaggatatgagaaaagagctaaataactcgtggaaagctgtttctgatgctgaagcaagggctgccattgcggaggccaagtgttctgatctagaggcaaaggtgaaatcgagaaaggccatttcaagggatggttgccatgaaatctcagccgcatctgaggagaatgatgaactattccagttgaaagaggagttagaaaaatacaaggaggaagcacaagcaaataagaactacatggttcagtacaaagaaatcgcacactcaaatgaagttgcgttgaagcaattggaatctgcacatcaggactacaaggctgagaccgaggttggcaggaaagccttggaagatgagattgttaacttgagggataagttatcagaaatggagaagagttatgtcattaagtgtgaagaagctgccaatgcaattgaatctaaagagaagcacatcacttctctcatgaatgaaatttctgttttaagaacagaagtttctcagaaactaccacagttagaaaaattggaaattgaattggctttgtcaaagagttcacttgatgagcagtataagcgctggcgaactgcccaagataattatgaacgccaggttattctgcaatctgagacgatacaggagttgacaaatacttctaagcagctatcttcgttgcagcatgaaatcactgtacttcgccagactgcagatgcactgaaaaatgaaaatgaatgtctaagatcttctgctgaacaagaaaagataggcttattgaaagagaaggacgatgccctgcagaagtataatgagcttaatgatcagaatagaattctacacaatcagttagaagctttacacattcggttagccgagaaagaacggaatattgctgggctttcatcacatcgtactgataattcacatgcagaagatgatctacaaagtgtcatcagttatctgcgcagatcgaaagaaatagccgaaacagagatatcattgcttaaacaggagaagtctcggcttcagatagaactggaaagttctttaaagtctgccaaggaggcacaggacttgttgcgaagtcaagctgatagtgccagggcattgatgttcaaggatgaagagttcaagtcactgcagattcaggtcagagaaattaacttgcttcgtgaaagcaacatacaacttagggaggagaacaggcacaattttgaagaatgccagaaattccgtgaagaagctcaaaaggctaaaatggaatctgagaggttgcagaaccttctactggagaaggaggtagacgctgaaatgtgcaaaagagaactggaaatgcagaaggcagaaatagctaatctcaaccaaagtatttctgagctgattgaaaatagcaaaggcattgatttgaacacttatgaagccatgaagaatgaacttcaaaatatcaaatcaaccttgagagagaattctatggagcttgaaagtgcaaagatactgctttctgagaaagaagttgccataaaaattttggaggataagctttcattatgtcaatctgaattggattccaaggaaaagaagctgaatgatgtagaggcgtcccttaaatctgagattgacaagcataagaagattaatttaaacttaaagagaaagcatgacaatttgatgaaggagaagggagagattgctaaagaaaatcaaagccttgtaaagcagatggaggatcttaaatcaacagctcagaagacaacatctgaaacaacacttgagcaggctattaaagaaaaggatttcaggatacagacattagaaagaactctggaaaaggaaagagatgataacaagaaagagaaggcaaagagtaggaggaatgagaacacaatctttggtgcacttcagaaggtgcaacaggacaagaaacaagtagaggagtctatagataagcataagcaggctgtgagagagttgattgagaattatcctggattatcatctgaagtgccacctatctctgcactagaagagcaacttctttcatacttccgtgcagctaaagatatggaggaatcttctagtcccttccgtgatggtgcagcaactcaaactccagttgttgaaactgcccctgtggatgcacctacttcagctggagttgcaggacgtccagtagatacttcgtcaaggccagctaaagctaaaatgacggaagaaagagcagttcccaaaccaagcagtgaagtacgtaggcctggaggaagaagaccccttgttcgtcctactcttgaacgaactgaagaacctcatgctgatacagatatatcagctgttgatgcctccacagttcaggacaaaggggggccaccagcagagcaagaaacttctggaattttacctgtgttacagcctttgagtcgtaaacggcttatcacatcttcacagacggtagacagtgcctcgcagggtgaggctaatgatgtcaatcctccatctaagaagcccaaggaggaagaatcttcacaagggactagtgaactcaaaagtggtcaaccacctcttggggatgtagcggcacaggttaatgtgcttccagccactgatgacctagatggacaacagcctacagaagagatcgatactgatcaggcacctgagccaatggtagaggttgaggcaacaagggaagaggatgggggtgataaagatgactctggagatgcatcaacggacatcaaaggccaggatgctgatgctaatattgacgcaaatgcaattcctttagaagaagagcatgtagtggcaaagtcagaggcaataattgaatcatttgatgatgaccggaaaacagaagattcgaaggaagatgctcagcgtactactgcaactgatgttgatgatgacatggaggagggagagttggcagaggaacctgaagacaagagtgacgttgatatgtcagagatcgagggtgaggctacagccgaacgtgctgctgtggaaccggaccaaagtcctataacacaacctggtgcagctgatgcctcaccaagcagaactgcagatgcatctcctgctcgtgaaccttcccctagtccggtccaagctggtgcatcttctcgaccccagaatactagcactgcaacagaggcacgtgaaccttcctctaacccagcccaagctggtgcgtcttctgaacagcggaacaccagtactgtagtggaggctgctgaaactcgttccagaacaatcaacttaagtgagagggccagacaaaacaggcaaaccaggtttcaacgcgcacaacaacctggcactgctcggggtcgtggccagcaatctgttacactcaggaaagatgctacgggtcgaggatcaaggggccgcggggggcgtggtcagtcctagtaaagtagattgtcttttctcgtgcagggataattttgtccattgggatagagacccttgtatttttagattgatcgacgaacttcatggggatacagagacccttgtgtttttagattgatcgacgaattttgtctcattggtttttactaaatgttccctgacctgcgtgcgaatccttgtgggttctgagaccgctatatctaatccaaactgttgtgtttgttggtactatgggctggagctgcacctcctgaatcccaatagcactagcatttttcacatagccataaaaatgatgctacgtgaagcattccttggggtggatccctacccgggcttctaaaccacgactttatacatgactttcatttctctttgtatatggactaaaatgacttgttagtgttta

SEQ ID NO: 41098 - DNA, 915 bp, Zea Mays
gggaagagaaggcgttcagcacttaccggtcaattgtcctccttagcgacggatttgccaatggcgccgtgttgtggctcggcccgggacgggagcgggtttgaccccttgacaagccacccaagcgcgaagaaggcggcgccggcaaggatggcggtgccccaggcgtgggagtaccagcggctgtactgccgcacggcaaaccgccactggtcccgaagagtcgccgcatcggggatcgcggcatctggcgggtttgggtatccggcactgcccgggtgtgcgttgccgacgccgggcaagcgggggcgagcgacgctgccctccgccggctggggcggtggggacgtggtgggcttctcctggtggtttgccattccggccttatggatcgaccacccacaaccgctcgacgaggagaggagacaggagaggcgagcaatattatgtactaggacaagcctgaaacaagcttcggcgtggaggcctaacctccgcacggggatagaagggcggtgcacggagaatgtcctacattataggagtagagatggtatgatacactttaaaaaagatacttaatggatgctgctaattcagaatattaaatgtaaaataatattgttcctctacacaaaacttgttctcacaacctgtagccctacatgttatagtacttatatatcattacaaaatggcaccattcaatcactcctatgtttcactcctaatgttaaatattggcttgttcaaacaaggcatgattgcaaaatacttacacattggcatgcatagtcttaatttttgcataaataagcagccactgctagtaatgaactccagagtaaaagaatccacctttgacaaatggtgaattgtgatcataccaatacactccactcgataacatagatg

SEQ ID NO: 41099 - DNA, 261 bp, Zea Mays
attgtgcttttaccttggataggggcggtggatggtgaggggaggagggcggcgggtcttccgaacggatggagtgggcagcgctacttttcggcgaatacgcagattgtgcttttaccttggataggtgcggtggatggtgaagggaggagggcggcggttcttccgagcggatggaatgggcagcgctactattcggcggatggggtgggcggcgctactggtatgaagggagtcgacggcggagggagatggggatga

SEQ ID NO: 41100 - DNA, 2188 bp, Zea Mays
ggcccggcctggtcgcccgctcctcctctcctcggcagctcggctcacccgcgcgcgtgagccgcttaaatttcaattcaaacttcccaacggaaaaccctcacggctcacgaacgggcacccgctcaccctgtcacccaccccaccccaaccccatccccaccttgcgcctgcgagccacgccgagccgatctaagagccaaagccgcagccgcagccgcacgggagcggacggagaaaattttgaaacgcgggcgaggccgccaccaccgcgccaaatcgagccatccagattccattcgacggccggaagtcagatccgtgcatctataatacttccaggaattctctcctctcccaagacccgcaccgcaccacgcgaaatcaagtcctgcaaaagcctcgcggctacctcacgtggatcggcgacggcgatgacggcgtccttctcttccgtcgccgaggtagcggttcccgctgctgcggcggtgatggcatcagctttgccgcaggagcagcagcaggcgcggccgcggccgcggccgatgcacgctggtggtggtggtggtggcggcggcggcgccaatggccgccaccacgcgtacagccgcaaggacaagtcactcggcctcctctgctccaacttcgtggttctctacaaccgcgacgacgtggagtccatcgggctggacgaagcggccaaatgcctcggcgtggagaggcgccggatctacgacattgtcaacgtgctcgagagcgttggagttagttcttccttctcctgcatttctgattcttgtgaggaaagccaagaatcgctacacctggataggtttcggcggagtctcaatatccttgcgagaactcaaggaaagggcgttaagggagaagtctggcttggctcctctgcaaaccgagcagcaatctgctgccacaatttctgaagacgaagatgatgatacattggccaatccgggtgcttatatcgagactgagagattgagtcaaactgtggacaaaccttctggcaaaccgggcgcatccggttgccgccttagatctgatcataggaaggaaaagtcacttgggctgctcacacagaatttcgtgaagctcttcctcaccatggaggttgacacgatctcactcgatgaagctgcaaaactgctccttggagaaggccacgaggagaccaatatgagaactaaagttcggaggttatatgacattgccaatgtcctgtcttcactgaatctaattgagaagatacatcaaggggactcgagaaagcctgcgtttcgttggttgggtagggcaacgctgaacacagaaaatggtgtcacagttgctgtgcccccaccagggaagatcgcatcaaagaaaagagcgtttggaacagaactcactaacattgacatgcatagaagtaatctagattcaaaaaataagaagaaagcaaaacttgtacagagtagtggtgatgtcttgacgaattgcaaattagctgtgcgtagtcggctggggcagggtaaacaaagtggctttgtttatggtcctttccacccttctggcgcaaggaaacatggacttgatggcggcaataagcctgggcaaagggagagggctgaggactgggagagcctttctgcttcatttcgaccacagtaccagaaccaagcactcagtgatctatttgtccattatgtcgacgcgtggaagacatggtattctgaatttgctcaaggcagcagcatcatgcaacaacactttggtcatcctgttaaccattttttgtaggcaaattttagggccaagcattgcagttcttagtgcatgcttgtgtattttacctgtacaatctgttaaaacggaggaaacaaagacatgattgagcctagggttcattgtatttactcaatgcaggatgtttctaggctatttcaggtggaactattagagagggataccccaggagtgtgaggtgtttcccaatctctctaatagaaacatcatgatcatctcacttctgtgggttctctattgttaattgttgtttatgtgcttacctatgtggattctaaaacttcctctgtcaccggccatgctgatgaaacatgtcataatgaagtataccttgtgtatgtctatcacgacaaaaaaaaaggattgtattcaaattaaatttcag

SEQ ID NO: 41101 - DNA, 2094 bp, Zea Mays
aataaattgttgtcatttgttaagcatattgcaaatctattaggacaatcgcggtctgcgccgtcagcctgccaagctcagcggggcggaggcaggccaaaccaacccacctccaacacaagcgaataaaagtctcgcgtctatcttcttccttccttccttcctaccaacctcccctccctccccacgcccaccgccccgcatccaccccgaaaccctagtggatcgtcgccatggccgcagccgccctcattcgccgcctccccgctgcccgggcccaggccccggcattcatggcggcgcgaccgatctccgactccacggcagcgttcaccatcgagacatctgtccctttcacctcccacctcgtcgacccaccctcgcgtgatgtcaccaccacccccgctgagctcgtcaccttcttccgcgacatgtccctcatgcgccgcatggagatcgcggccgactccctctacaaagccaagcttatccgtgggttctgccacctctacgacggccaggaggccgtcgccgtcggcatggaggccgccatcacccgctccgattccatcatcaccgcctaccgcgaccactgtacctacctcgcccgcggaggggacctcgtctccgccttctccgagctgatgggccgcgaggctgggtgctcccgcgggaagggcggatccatgcatttctacaagaaggacgccaatttctacggtgggcacggcatcgtaggcgctcaggtgcccctcggatgcggcctggccttcgctcaaaagtacaagaaggaggacacggccacgttcgcgctctatggtgacggtgcggctaaccagggacagctctttgaggctctcaacatttcggccctctggaagctgcctgccatattggtctgcgagaacaaccattatgggatgggaacagcggagtggagggcagcaaagagccctgcctactacaagcgtggcgactatgtgcctggattgaaggttgatggaatggatgttcttgctgtgaagcaagcgtgcaaatttgcaaaagatcatgctgtcgcaaatggcccaattatccaacattggccctgtttgggaccgtggtctgtggccgcacggtgtggtaaccgagccgtggttccacagctgcggtatcggtaatccacagtgcaattaaaataacaatttgtgtctgctatctgctaatgagtggtccttgagatggatacctacagataccatggccactctatgtcagatccaggaagcacttaccgcaccagggatgagatttcaggtgtcaggcaggaacgggatccaattgaaagggttagaaagttgcttttgactcatgacctggcaaatgctgctgagctcaagaatatggagaaagaaatcaggaaacaagtagatgacgctattgctaaagcaaaggaaagttctatgcctgatacttctgaactcttcacaaatgtttataagaagggcttcggcgtggagtcatttgggccagacaggaaggagatgagagcttctcttccgtaggttggcagcatgatgaggcagtcctcattacatggtatgatagccaggaaaaataatttttgatgaaggcctcaggcattattggaatattttatcgggaaatgaacctgtatagagatgcgttgtctggaggatcagcttcgttgtttcgcccttttttcatttctacaattcagttttaactgctgctggctggcttcttattgaagctaatatcaccatccaagaaaaccgaagctagaggattataaatttgatcacacgtatcgtctagcactgcacggtgtttgcttgatcagtttctaactagcatggtacatgtaggacagtgcgtcattacacttccacctgtggattaatttttctacccagcgtggtgcatatgttgataaactgattttttttactagttgcacagtgatatttatttatgtagcatgcggcagtttaattgatgtagctgttcgggcctgcgagtccggagtagcttcctcgatttggaggtccagtagggcctgtggcggcagcctcccatgggatgggacatgac

SEQ ID NO: 41102 - DNA, 929 bp, Zea Mays
ctagtgccggccacatgagtggggtctggggaaggcataaaccgaggtccttgagatggatacctacagataccatggccactctatgtcagatccaggaagcacttaccgcaccagggatgagatttcaggtgtcaggcaggaacgggatccaattgaaagggttagaaagttgcttttgactcatgacctggcaaatgctgctgagctcaagaatatggagaaagaaatcaggaaacaagtagatgacgctattgctaaagcaaaggaaagttctatgcctgatacttctgaactcttcacaaatgtttataagaagggcttcggcgtggagtcatttgggccagacaggaaggagatgagagcttctcttccgtaggttggcagcatgatgaggcagtcctcattacatggtatgatagccaggaaaaataatttttgatgaaggcctcaggcattattggaatattttatcgggaaatgaacctgtatagagatgcgttgtctggaggatcagcttcgttgtttcgcccttttttcatttctacaattcagttttaactgctgctggctggcttcttattgaagctaatatcaccatccaagaaaaccgaagctagaggattataaatttgatcacacgtatcgtctagcactgcacggtgtttgcttgatcagtttctaactagcatggtacatgtaggacagtgcgtcattacacttccacctgtggattaatttttctacccagcgtggtgcatatgttgataaactgattttttttactagttgcacagtgatatttatttatgtagcatgcggcagtttaattgatgtagctgttcgggcctgcgagtccggagtagcttcctcgatttggaggtccagtagggcctgtggcggcagcctcccatgggatgggacatgac

SEQ ID NO: 41103 - DNA, 1743 bp, Zea Mays
cttgcttctaactccaaacagatactgaaacaagaaaactaagccctaatatatatacaagttacaggtctccattcatatcgacatctcagaggtcctgtataagataatgaatgaatttatctcaagcaaaaaacacagttcagtattctagaagttggagaaatgataaaatggatcattagtaacagtgacgctagcattcataacacaaaaactaagtggacaaggaagttcagttgcatatagcaaacatcaaccatacaaataaagggtctaattaagttgtttttaaaataatgaacatcacaaatctgagcatcaggcagtgtggctacgattcttttatcctaaaaaggatcccaaacagctatatcaactccacaattagttgttgaaatttggcccaggaacaagctgatgattcaatctctgcaagcaatattaagccatgccaatttaaagctcatatggcatttcgataaaggttgtaagactatatggtgcacagaccaataactgcttccagagcaataattcattttccatgtgttaaacataacacagcaagcgcttcaaaacttgtcatcaaaaaaatcaaatctgctctgatgatacttacatcatttactgtcaactcagcaagtggaacatgtgaacaaaattcgagctaatagaagtaacacacagaaacgacaagtctagcagttctttttgtgcatccgttgcatgatattatgcaggccttacaatattcatctatgcacaaacaaatcaaacgaaactctgaaggaaatggagaagagatcgctggcattaaacattaccggatcaggtgaaatggagaagagaccactggcatttcagccttgcttctcctcccggggccttaaaaaaccagatagagggttccattttgtactgactgcgtgtttaagtgaaaatatatagacacatgaaagactctgtttcgaaacaaagtttcagtcgaacaacgatcaatttatacccataaatgggaatgctaaatctgtgattacgcgatttgaactagaaacccctcgcaatattttttctctttttggactcaaccacaaaggattcgtctaaaccaattaacaaactcttgcttcgattttctggggtacctttcaagtgtaccaataaatactttgctagtaaggaatcaaatgctggagaatacttttctaatagatactcgaatgaaaaattttgataccacagtccttgcaactccccttgtcggatccttatcaaaagctcaattttgtactggatcagggcatcctattagtaaacccgtttggactgatttatcagattgggatattcttgatcgttttggtcggatatgtagaaatatttttcattatcatagtggatcttggtaggtgaaacgagcagcaccaatgcacatgcataactgtatattaacttggaatggacaacaggaacaaatgagaagataagtgttggtatgctttgtacaataagaagaggtaagaagccaacttttgctaagactgataccaaaaaaaaacaagtggcaataccgtgggacaccacagaacaatctatattacatggatttcgcagatgacatgggagaagtgagtaggcgagtgcttacgaagggagtgaggtgggatttgagatgccccttttgggagcgtcggctgagtggtagaagcgggaggaggtctcgagggctggtgactccct

SEQ ID NO: 41104 - DNA, 1799 bp, Zea Mays
cttgtcgacccagaccacccaggtggaggtgaggcgtccaagactccaagcaaagcaagcaacctgacattgccaattgccatcaccatcttggcagaaatcctcctccaagatggtcgttttgggccaacaacgtacgactcctcccacaggggggctgctgccggagaaatccgtgcaggagcagaactcagtctcatcatcttcctccacccgacagatgattggaggaggtatccagtggtggagcaggtcgctgtgggtcaagtccagggcgtggatccggaaccccatgaacatggccctgtccgtctggatcctggccgtcggcgtctcgggcgccatcctcttcatggtgatgacggggatgctcaaccgcgtgctgccaagcaagccgcggagggacacgtggttcgaggtgaacaaccagatcctgaacgcgctcttcaccctcatgtgcctgtaccagcacccgaggaggttctaccacctggccctcgtgtgccgctggaaggccggcgacatgcaccagctccgccaagcgtactgcaaggacggggcctgcaagcccaacgagaggaagcacatgacggctgtcatcctgctgctccacctcaactgctttgctcagtacgcgctctgtggcctcaaccttggctaccggaggccccggcgtccggtggtcggtgtcgccctcaccgtagcggtcgccatctgcgcgccggccgtcgctgggatgtacaacaacctcagtcctctcgggagagactacgaggcgccggcgccggcggaggggatgataataagtgaggaagagtcgcagctccagcgcaaaacgcccgacaccgagaggcgctactcgttggtgccacggcaaggacaaggagaagaaccgcagtgggtcggcgggctgtgggaggacctgtgggacgacatgtcgctggcgtacctgtcgctgttctgcagctgctgcgtgttcgggtggaacgcgagcaggctcggcttgggcaacatgtacgtccacgtcgccaccttcgtgctcctgtgcctggcgcccttcttcatcttggacctggcggccatcaacgtggacgacgaggcggtcagggacgcgctggggctggccggcatcttcctctgcgtgttcggcctgctctacggcggattctggaggatccagatgcgcaggcggttcggcctccccgagaaccgcgcctgctgcggcaagccggacctcaccgactgcctactgtggctctgctgctacccgtgctcgctagcgcaggaggtccgtacggcagacgcctacgaggtggtggtggtgctggacacgccgatgcatcgccatccgactctgcaggaagagctggccacgatgcaggagccaccagatgaagaagaaggaggcggtgtcatccccccttcgacagtgtcagctacacgctcataagcagtacccaacatgtacaggatgagcagtttcaatttcaacatcaggtggtcatttcaatgtatccatgcagccgctgaatatcatcattaaaaaaagcagcaaaaacagccttctctagtaaagatcatcttcgtcgtcatcgtcgtcttcatctctgatgatgttgcgttcatcccacagcgggcaggagcagcttgctttcttattcttccattctttcccacaggtgtagcagaactcatagccgcacctgcaatgcaacagagggctttttagcactggcacacatagtagttatcataaaggagaatgcctggccttacacgcagatcatgtggtagcagcc

SEQ ID NO: 41105 - DNA, 2463 bp, Zea Mays
aagaagttgactattgaatttttagatgtacaccaataattctcccacagaccacagctgatctgctgaaacaagaggtgaaaaaaaaatttatcgatgcactggactagatgcatatcagatttacacttcttgctgaacaaatgactcaaaacatcatgcagttgcattacaacaaatggtccattctagggtttacctgcaccttagtgtttgtgagtactggataactgtaaactgacatcttagtgaactacccattgactggacatgatgttttggtcaagacatggctaaaaaactacggtgaaacccacaaagctaatgatgtttgacatctcaaattctaacacttatttatgtttctgatgaacagggagagtagagaaaaataatacaatgttttcagttcaaactggtcttgagaatcaactatcaatgaaaaagtctgacccatcttatccatatattcttttttccccctgcaatgaaataagcaagacaagcaatgcatgttcagataagttgggttcatggcaccacagaacagtcatttctagtataggccaaggcctaatgtaccaaatcgcgtccagtacgctacagtgctgctagctcctcaactgacatgaagcatccagtaagattcagaactgacaaatacttggctggttggcagatgagcctcctcaaccccatggggcaccttgtgctcatcaattcggttcttgacagccatctgaattacgtcatgggtgcaatgaaaatgcctaaagggacaatctgcggcatcgaccagcgccgtcgaagtttcctctgggctggccaaaaaacaaccactggcgcccactgccttgttgcctgggactctgtaaccaaaggacgagctgatggcggcctcggtgtgaaggatctggaaacttgcaacacgtgcctccacctgaggctcctccaccgccttcacaactcgacatgctcgtcttggggggcctgggaaagacaacacatctgcttggctaccctcactggtaacctccccggtgcccactggcacgccctccgctccggcctccctatctatcgggcaatcactacttgtgaagtcagaaatggtcatggcaccgctttctggcatgatgcttggtgctccgacaacgaccttgcttcaaccttccccgccctcctgtcgcatgtgaagaaccctgagcttggcatccatgacgtgctgactcaaggtcttcagtccaccctggtcacccgcctctcggaacaggccaggcaggaacttgctgcactgaacgaaaagcttaacttggtcaccctcaccgctgccccagatgtcagacactgagcagtcaccaaaaaatatgggaacctctgcactggcctcctgtacaagttactcaaaaatcaaagacttctccccaatgtccaccttcgtctggaagaacaaagctcccccgagagtccggtttttggcttggcttgcgtcaaaggacaggttacagacccgggtgaacatcaaaaagaaaggcattatggaggacaatatatgcgaaatctgccacgcaacaccagaaacaacaatgcacattctcttcaactgtggttttgcaacgaccttctggagatcccggaggacaccaactgcaagagactccatttcctcccccacccccgaacctgcatggccaaaacttcaccactctcacccttcactgctactggcatctctggaagagaaggaatgtcagggtcttcagggaggagatgacttcactacaatccactctctgttcgcctgcagagcagacgcctgtctttgggcacaccgcctccacccaagcagacgccatctacctactccttggtgtaatattctaagccccacgtagcaaccccccccttctatgctgttatagatacctttgtggggcgccagtattcaaggagaaggacggctaaggaaccgaatgccagcagggatagttaaggaaagacaatcaacaaataaggagaaaagggcaggtaacaattgtgactacaaatcagggatacttagtttccttagctagttggttgccaaataatagcagattagttccttaaaatatctgcttgttttcttgagctgtaagtcgtctgcctctataaaggtgcaggctgtagtttgtattaggcatccaagaaataaagatcctccttagggcgggatcgtcttgggtcatcctggctgggcacaacgccagcacagggaacctagacggtcagcgtcctcctcttccctacgcactgcgtcattccaacatccccctccactcacccttgagagacaccaggaaacacaagttacagacttaccagagggaagtcggtaacaaattggtatcagattcagacgtcgcatcgacaaccatgtccggcggcgtgaccgatcctgacggcaagagcagcgatcagaag

SEQ ID NO: 41106 - DNA, 3005 bp, Zea Mays
cggagtcccaggcacccagccaacctttttctactcttctggcagtctctgtctcccacacattctctctctaaactcccatgtcagcccgtctttatcgattaaggtcactttaccactagttaaagacgagcgccgcgtgcagacggagtggtagaaaaagctggatgtccatcgccttgcttccagcaacagcagcagaagtggcgcactgtgctttgcggtggcggaggctgcgagagaggaggaacttgcaagccgacttccatggctgccgccttctccgccgctatcctcttccacctgctgctgctcctcttctcgccgtccgctgcgcagcctggtttcattagcttggactgcgggggagctcgtgatcacacggatgccattgggatccagtggacctctgatgccagcttcgtctctggcggccaggccgcgcagctgctggtccagaatggcctgcagcagacccagcagcagctgaccaccgtgcgctacttccccgcggacaacaggaagcactgctacaccatgaacgtcaggaacaggacgcgctaccttgtcagggccactttcctctacggcaacttcgataacagcaacgtctacccgaagttcgatatctccctcggagcgtctccctggtccaccatcgtcgtcgacgacgccaccacccccgtcgttgaggaagccatcatcttggctgctgctcccacgctcagtgtatgtctctccaatgccagcacgggacagcccttcatctctactctggagcttcgacagtttaacggttcgctctactacaccactgacgagacacgcttctttcttggactgtctgcgaggataaattttggcgcaggaagcaatgattcagtgagatatcctgatgatccatttgatagaatctgggaatctgattctgtgaggagagcaaattaccttgttgatgttgctccagggactgaaagaatatcaactacaaaacccatatttgtcggtaccaacgaagaaccacctgaaaaggtcatgcaaacagcagtagttggccaggatgggtcattgaactaccgccttgatttggaaggtttcccagcaaatgcttggggagtctcgtattttgcagaaattgaagatttggcaccaaatgaaacgaggaaatttaagttagaggtccctggcatgccagcactcagtaaaccaactgttgatgtggaggagaatgctcaagggaaataccgtttgtatgaaccaggctacacgaatttgtcacttccgtttgttttctcctttgggttcaggaagacgaatgattcttcaaaggggcctattttgaatgccctggagatttacaaatatgtccaaattactatgggatcacaggatgcaaatatcatggccagcatggtatcacgatatccacaggaaggttgggcacaagagggtggtgatccgtgcttaccagcatcatggtcctgggtgcaatgcagttcagaaacttctccaaggatattctcaatcacattgtctgggaagaacattaccggaagtatcccggtggaactgacaaagctatcagggttggttgagctaaggcttgatggtaattcattttctggccaaattcctgatttcagagaatgtgggaatttgcagtatattcaccttgagaacaatcagttaactggtgaattgccatcttctttgggtgacctacctaacctgaaagagttgtatgttcaaaataacaagctgtctgggcaggttccaaaagcacttttcaagagaagcattattttgaacttctcaggtaacagtggccttcacatagtaagcaatggcattagccacaccataattgttatatgtctggtgattggagccgttgtcttactgggtgttgctattgggtgctatttcattacatgtaggagaaagaagaaatctcatgaagacactgttgtcattgcagcagcaccagctaaaaaacttggttcatattttagtgaagtggctacagaatcagcacacagattttctttatctgaaattgaaaatgctactggcaaatttgagagaagaattgggtctggaggctttggcatagtatactatggaaagttggctgatgggagagagattgcagtcaaacttctcacgaatgactcgtatcagggaatcagagaattcttgaatgaggtgacattgctttccagaatacatcatagacacctggttacattccttggttacagtcagcaagatggcaaaaacatactagtgtatgagttcatgcataatgggacactaaaagagcaccttcgtggagctgataatgaaaagataactagctggctgaagcgtcttgagattgcagaagattctgcgaaaggtatagagtatctccacacgggatgctccccaacaatcatccatagagacctgaagagcagtaacattctcctagacaagaacatgagagcaaaagtggcagacttcggtctttcgaaacctgcagtggatgggtctcatgtgtcaagtatagttcgagggacagttggatacctggacccagagtactacatctcgcagcagctgacggagaagagcgacatctacagcttcggcgtgattttgctggagctcatctctgggcatgaacccatctcgaatgacaactttgggctcaactgccggaacattgttgcgtgggcccgatcgcacatcgagagcgggaacatccacgccatcattgatgagtcgttggacagaggctgctatgacctgcagtcggtgtggaagatcgcggaggtagcgtggagcagaatggaggagcatctttcgacgagctgctcatgcagccgggtctcagatgagatgagaacaacctactcgtaccttgagtccattgtatgtagtaattaatgtgtttactacattttttttgagaaacaaattaagtaatgctagcaaaggaaccagtatattattattattat

SEQ ID NO: 41107 - DNA, 3096 bp, Zea Mays
cactttaccactagttaaagacgagcgccgcgtgcagacggagtggtagaaaaagctggatgtccatcgccttgcttccaggttttctccaaccatgtccaccaacacactgatctagtactaggactagtactagatcgatcctgcctgcctgcctgcttgtaacagcaacagcagcagaagtggcgcactgtgctttgcggtggcggaggctgcgagagaggaggaacttgcaagccgacttccatggctgccgccttctccgccgctatcctcttccacctgctgctgctcctcttctcgccgtccgctgcgcagcctggtttcattagcttggactgcgggggagctcgtgatcacacggatgccattgggatccagtggacctctgatgccagcttcgtctctggcggccaggccgcgcagctgctggtccagaatggcctgcagcagacccagcagcagctgaccaccgtgcgctacttccccgcggacaacaggaagcactgctacaccatgaacgtcaggaacaggacgcgctaccttgtcagggccactttcctctacggcaacttcgataacagcaacgtctacccgaagttcgatatctccctcggagcgtctccctggtccaccatcgtcgtcgacgacgccaccacccccgtcgttgaggaagccatcatcttggctgctgctcccacgctcagtgtatgtctctccaatgccagcacgggacagcccttcatctctactctggagcttcgacagtttaacggttcgctctactacaccactgacgagacacgcttctttcttggactgtctgcgaggataaattttggcgcaggaagcaatgattcagtgagatatcctgatgatccatttgatagaatctgggaatctgattctgtgaggagagcaaattaccttgttgatgttgctccagggactgaaagaatatcaactacaaaacccatatttgtcggtaccaacgaagaaccacctgaaaaggtcatgcaaacagcagtagttggccaggatgggtcattgaactaccgccttgatttggaaggtttcccagcaaatgcttggggagtctcgtattttgcagaaattgaagatttggcaccaaatgaaacgaggaaatttaagttagaggtccctggcatgccagcactcagtaaaccaactgttgatgtggaggagaatgctcaagggaaataccgtttgtatgaaccaggctacacgaatttgtcacttccgtttgttttctcctttgggttcaggaagacgaatgattcttcaaaggggcctattttgaatgccctggagatttacaaatatgtccaaattactatgggatcacaggatgcaaatatcatggccagcatggtatcacgatatccacaggaaggttgggcacaagagggtggtgatccgtgcttaccagcatcatggtcctgggtgcaatgcagttcagaaacttctccaaggatattctcaatcacattgtctgggaagaacattaccggaagtatcccggtggaactgacaaagctatcagggttggttgagctaaggcttgatggtaattcattttctggccaaattcctgatttcagagaatgtgggaatttgcagtatattcaccttgagaacaatcagttaactggtgaattgccatcttctttgggtgacctacctaacctgaaagagttgtatgttcaaaataacaagctgtctgggcaggttccaaaagcacttttcaagagaagcattattttgaacttctcaggtaacagtggccttcacatagtaagcaatggcattagccacaccataattgttatatgtctggtgattggagccgttgtcttactgggtgttgctattgggtgctatttcattacatgtaggagaaagaagaaatctcatgaagcagcaccagctaaaaaacttggttcatattttagtgaagtggctacagaatcagcacacagattttctttatctgaaattgaaaatgctactggcaaatttgagagaagaattgggtctggaggctttggcatagtatactatggaaagttggctgatgggagagagattgcagtcaaacttctcacgaatgactcgtatcagggaatcagagaattcttgaatgaggtgacattgctttccagaatacatcatagacacctggttacattccttggttacagtcagcaagatggcaaaaacatactagtgtatgagttcatgcataatgggacactaaaagagcaccttcgtggagctgataatgaaaagataactagctggctgaagcgtcttgagattgcagaagattctgcgaaaggtatagagtatctccacacgggatgctccccaacaatcatccatagagacctgaagagcagtaacattctcctagacaagaacatgagagcaaaagtggcagacttcggtctttcgaaacctgcagtggatgggtctcatgtgtcaagtatagttcgagggacagttggatacctggacccagagtactacatctcgcagcagctgacggagaagagcgacatctacagcttcggcgtgattttgctggagctcatctctgggcatgaacccatctcgaatgacaactttgggctcaactgccggaacattgttgcgtgggcccgatcgcacatcgagagcgggaacatccacgccatcattgatgagtcgttggacagaggctgctatgacctgcagtcggtgtggaagatcgcggaggtggccataatgtgtgtgaagcccaagggcgcccagaggcctcccatctcggaagtgctcaaggagatccaggacgccattgccatggagcgggtgctcgtgtccaattgcagcaacaggatgggttcaggtagcgtggagcagaatggaggagcatctttcgacgagctgctcatgcagccgggtctcagatgagatgagaacaacctactcgtaccttgagtccattgtatgtagtaattaatgtgtttactacattttttttgagaaacaaattaagtaatgctagcaaaggaaccagtatattattattattat

SEQ ID NO: 41108 - DNA, 1129 bp, Zea Mays
tgattggtccctaatatggacggatgccatgccattcaagtacaactgcggctgccctgcccagcccaggcccctaccactacaacattaagctctgccgacagtgttagtttcacagcctgtgtaaaagtcttcagatctttccaagtcaaaattcgaacggccaccgagtgctcaccgacatggctatgaccacccacatctacccttttacattagcatccaaagtctcctcgctggaataagcagcgggtgtccttttttttttgaaacacgacaacgtgatccccagctgagcactttagactcagatggaggatccaggatcaactctaccaggatagacctgggcaagtaacaattttcccgtagcatgtgctctgggatcatagtcagaatattccactgccacatgttaagtagctgacgttcaaaggtataaagccaatgcttattacttccagctacagaccttctagatttccaggtgtttccaagagcatatatcaaaaaggaaaccaccaagtgtttgtttaacggaaacgggacaaattttgtgagttgtgacaactgtttctcctgtgcatttgtgcctaatagcacatttccacagaaaaaacataaacttgcccctttttcgtttttttaaagaaagacgataatggatcatgatccaaatggttcttcacaaaatgttaatgttaggaccctaaataaaatttacttcaaaaatgaatagaaataggaccctccttaaatattatagtgtaaaatttagagcccattgtcaaccctaatggtgggtcatttccgaagcagtagtctaaaaaatacagtgattcccgcattgttctccaacactcaattcaacagtcagcaacaaattccagtttcatattattataaggcgatatgtcgatcatggcggacaggcggagttactattttattattgttcaacacatgaaaaacagtctgcagacattgaagatagcaacttacttgcacagtgagtatgctaccaaaggatgcaactactcttcaacgtatttgtcttaatgttgaatcaaagacccatccataactccacttcatgtctccatttgcataaattgtcacctaactgatc

SEQ ID NO: 41109 - DNA, 1491 bp, Zea Mays
tccaggtagtagctgtagcctgtaactgcgcgacgcgccggcgagggtgtccggtggccatggcggggtggtcctgcacgcggtgcggcgggccgacgacaactggaacctgtggcgatagcagattcaggtaagaattgaagacaatgatgtcggcatccctccagacactggcatgcttctcaattctgtctgcccttatgatccgatctgtggagggaagcataccaatgccttgaaggagatgagtgagccattgaagattttcaagcagcttgatggcatcaaatctgttttggaaaaaaggaaaactattctgtccggtacgtacatccagtctgaaaagattagcagagaagaaaggatgccggcggggagacgagacatgctggagaatgggatgaggcacctagctagctgttggattcctgcacgaggccaagaagaagccgtgcggacgatcagatgcaccgaacgaatgctcgcatgaaattgaatgaacgcacacacagggaatgaaggaaggaagctccggtattgatccgccggccgacagatgctgtctgatcaacactacactatgatgagtctatgacatgagtggagtggagggacggtgcacatgcatcttgggcagtctgcagtgtgcaaggacgagagcatgcggtttgcttttggcggctctattctacctgcaactcatcagcagggagggaaggtagaagaggagcaacgtgtaggaggtacagtaacaacaagctagcatgccaagtaacacactactgttcctgtcgcgtacagtacgtccattttacgtactgggatctgggaatgggatgctggtgcagcagtacgtagcagagagccagcagcaccgggggtccagtccaggggcctgcctaccctcctctctataccgtctgcatcaagacgtgcatctaaaggtcaacagaaagaaaggtacccatgctgtgctagcagacacaaccaccgcaccaccaaccatgttttttttgtttagtcgatcctaatggcaaatcaaaccgtggggctcaacgacatgcatgatgcagatgcatgcagctagcatcgtcgggccaccgacggtttgacaatgtgctccatgttggagagagactgattaataatgtatgcgtgccttctcaccctgactttattattcttagcatttaaatcatgtactgtaaaaaatcaccaatatatagtaccctttttatgtcaaggcacacctgtgatgatatgcaatgtctgagggttttattataggatttggaacgaaattgacgttttactacgactggtatatgcaccgaaaaagaagttcattttcgtcctagtacgcgagatatatatatgctggattgttcatcatttccctcaggtcaaaaggtgaacaacacaactggggaggggaccgactacgacctacaacacacactgtgcaaggattcggggacaaggaaaaaaaaa

SEQ ID NO: 41110 - DNA, 1674 bp, Zea Mays
caatattctcccccagccattcggtaagaattgaagacaatgatgtcggcatccctccagacactggcatgcttctcaattctgtctgcccttatgatccggtactccacccggtggataatggggttgtcgctgttagattccaccagtagtggtgaccagtagaaatctatcgttgcgttgtattcctgaaaatgattatatgttcaaacaggctaaccagataaaaccgttttttttttgtatcctgcagatctgtggagggaagcataccaatgccttgaaggagatgagtgagccattgaagattttcaagcagcttgatggcatcaaatctgttttggaaaaaaggaaaactattctgtccggtacgtacatccagtctgaaaagattagcagagaagaaaggatgccggcggggagacgagacatgctggagaatgggtacaattattactggaatgtgcaccagctgaagctgattgattgagtctttaaataaataaataaataaaaaggctggtaaaattaaacctgtatcagtggttgcaatcgaatggtggtccacgtgattccctgcaggatgaggcacctagctagctgttggattcctgcacgaggccaagaagaagccgtgcggacgatcagatgcaccgaacgaatgctcgcatgaaattgaatgaacgcacacacagggaatgaaggaaggaagctccggtattgatccgccggccgacagatgctgtctgatcaacactacactatgatgagtctatgacatgagtggagtggagggacggtgcacatgcatcttgggcagtctgcagtgtgcaaggacgagagcatgcggtttgcttttggcggctctattctacctgcaactcatcagcagggagggaaggtagaagaggagcaacgtgtaggaggtacagtaacaacaagctagcatgccaagtaacacactactgttcctgtcgcgtacagtacgtccattttacgtactgggatctgggaatgggatgctggtgcagcagtacgtagcagagagccagcagcaccgggggtccagtccaggggcctgcctaccctcctctctataccgtctgcatcaagacgtgcatctaaaggtcaacagaaagaaaggtacccatgctgtgctagcagacacaaccaccgcaccaccaaccatgttttttttgtttagtcgatcctaatggcaaatcaaaccgtggggctcaacgacatgcatgatgcagatgcatgcagctagcatcgtcgggccaccgacggtttgacaatgtgctccatgttggagagagactgattaataatgtatgcgtgccttctcaccctgactttattattcttagcatttaaatcatgtactgtaaaaaatcaccaatatatagtaccctttttatgtcaaggcacacctgtgatgatatgcaatgtctgagggttttattataggatttggaacgaaattgacgttttactacgactggtatatgcaccgaaaaagaagttcattttcgtcctagtacgcgagatatatatatgctggattgttcatcatttccctcaggtcaaaaggtgaacaacacaactggggaggggaccgactacgacctacaacacacactgtgcaaggattcggggacaaggaaaaaaaaa

SEQ ID NO: 41111 - DNA, 2247 bp, Zea Mays
cacgggccaacgtgccacttcccccactcgtcttcgccagaaacccgctggcgctttggtctctgtcgtccaagttcccatctccggccaccaatagttccgacccgtaagcaccaacgccccatttgccactaccctaccgcgcaccggcaaagcgcagcgccaggccgcagcttgcaggggcaggcggcggcgggcagggcaaccgccactgcagccgggatccggcggccagcggcaaccggcggggggcaggcggtcgggacctggtgtcggtctacagccagacagcagcagcagcagcgtgaccctcaaaatcctagaccactaccgtatggtccactgctcctttgctggtgtcgtccactgctcctctgcaacgtcgtttgatctcctgtgcagtctgcacacgcgtgttgaaggagttgattcctggacagcacacgatagcacaatcctctactggttcattcctggactaccggtggtaatctgacctgctatatcgctttgcttattatctatattcatcaaagcatctatttgatcataatgttaaaagcgcgggcaagtttctagtgcttatcatttgccctccggtcaccccgttgtcgcgcgaagccgacgctatttcattccccgacaggaccggggctccgctgccgcctcttcgcccctatatggcggtcccgaggcctcaaatccgtgccctacgtcggggcacgctgcttctcttccttgtcccgctcatctactctgtgtccaggctgcaaccctgggctccagaaaagggtgtgtgcctgccacccccaaccgcgccgaagcggcctgaccatctcgtgctcggccccgccgccggacaggaccgccccgaccgcctacagtgccgaggacttagagctctgaacaagattggcatatcaagtgaagagaactattctggagaacatgtttcttttgctactgtattcacaacctacaattctgtctcagctggagatgacaatgttccatctgattctgtaactgttggaaacagttcttatagcaaaatagaaagatccatggccattctgaacactttcatcagtttcataaaggtatcaatgccaagaagcgacttgatcatattgactgatcctggttcaaaaatttcagtaaatcaagggactgctacactattgccagttgaaggaaactattctcgaggaaatttgatgcttcagagaataaagacatacattgcatttctggagcaaaagcttgtggaatttgataggatggagaggttgaatcattttgttttaactgattccgatatagcagtggttggtgatcttggacatatattcaaaaaatatcctcattttcatctggctgttacttttcgtaataacaaagggcaaccgttgaattctgggtttgttgcggtaaggggaaccagggatggcatcactaacgctgtggaattcttgaaacaagtccttggaacttacagtttaagatatatgaaggcttctcgtatgcttggtgaccaattagcacttgcatgggttgtcaagtctcatctaccatcggctttcggaaaattttctaagaatgaagcatttactggtgaagttaatggaacatctgttctcttcttgccttgtgctgtttataattggaccccgcctgagggtgctggacagtttcatggtgtacccttggatgttaaggttgttcatttcaaaggttccagaaagcgattgatgcttgaggcatggaatttctacagctcaacctctaagctgtctgatatgctatgcctaatcttgagaagtggccggacgaaatatgacttctgaacttttgggttaaaactgacacatgttgatactgttcaaagctgttgtatgttcaagtatagtacaaaaaaatgctgaccatgaggctgtcattgcaagaattcagatcagcataaaaaattgctagtagcattcagtatgtaacaaaaacatgtgagaacccatacgagaaccacgcagggtgaccatcgccttgtgttcttttggtttatccctacctgttaaatatgtaatgtggttccccaccaatgtgcgctatgtaggcaatttcgccgtcagatgtcgtcagcagtattaaatagagctggcgctgtttcaatgtgtcaccggcaaaatttgcagatgtttttttttgctgtcattcatcgcattttcacccattgttgagcaccgttttgag

SEQ ID NO: 41112 - DNA, 1058 bp, Zea Mays
cttcccccactcgtcttcgccagaaacccgctggcgctttggtctctgtcgtccaagttcccatctccggccaccaatagttccgacccgtaagcaccaacgccccatttgccactaccctaccgcgcaccggcaaagcgcagcgccaggccgcagcttgcaggggcaggcggcggcgggcagggcaaccgccactgcagccgggatccggcggccagcggcaaccggcggggggcaggcggtcgggacctggtgtcggtctacagccagacagcagcagcagcagcgtgaccctcaaaatcctagaccactaccgtatggtccactgctcctttgctggtgtcgtccactgctcctctgcaacgtcgtttgatctcctgtgcagtctgcacacgcgtgttgaaggagttgattcctggacagcacacgatagcacaatcctctactggttcattcctggactaccggtggtaatctgcgcgggcaagtttctagtgcttatcatttgccctccggtcaccccgttgtcgcgcgaagccgacgctatttcattccccgacaggaccggggctccgctgccgcctcttcgcccctatatggcggtcccgaggcctcaaatccgtgccctacgtcggggcacgctgcttctcttccttgtcccgctcatctactctgtgtccaggctgcaaccctgggctccagaaaagggtgtgtgcctgccacccccaaccgcgccgaagcggcctgaccatctcgtgctcggccccgccgccggacaggaccgccccgaccgcctacagtgccgaggacttagagctctgaacaagattggcatatcaagtgaagagaactattctggagaacatgtttcttttgctactgtattcacaacctacaattctgtctcagctggagatgacaatgttccatctgattctgtaactgttggaaacagttcttatagcaaaatagaaagatccatggccattctgaacactttcatcagtttcataaagattgcaaggaaccccatatatttgacttacagttgaatttct

SEQ ID NO: 41113 - DNA, 2624 bp, Zea Mays
cttcccccactcgtcttcgccagaaacccgctggcgctttggtctctgtcgtccaagttcccatctccggccaccaatagttccgacccgtaagcaccaacgccccatttgccactaccctaccgcgcaccggcaaagcgcagcgccaggccgcagcttgcaggggcaggcggcggcgggcagggcaaccgccactgcagccgggatccggcggccagcggcaaccggcggggggcaggcggtcgggacctggtgtcggtctacagccagacagcagcagcagcagcgtgaccctcaaaatcctagaccactaccgtatggtccactgctcctttgctggtgtcgtccactgctcctctgcaacgtcgtttgatctcctgtgcagtctgcacacgcgtgttgaaggagttgattcctggacagcacacgatagcacaatcctctactggttcattcctggactaccggtggtaatctgtctttaggaccgatagtttgatgcttcaacaaatgtgtatatatgactaatacattgtcaggtacttttggtttgcgacccattgtaatataatatctaatatggccatcgtcctacgtttgtatattccgacttttcaatgctacaaacatatgcatacttgctgatcatgttgttaatctatcatgtataagaatgtataaccctccatacttggtgctttacattctaaccatgttgctacaaacatatacatgattgctgatcatattgttaatctgtcatctgtaagctgcagcatgattgctgctttacattcttatattccaaatttccaatgctataaacttatctaatctattgccaactgtttatacagacctgctatatcgctttgcttattatctatattcatcaaagcatctatttgatcataatgttaaaagcgcgggcaagtttctagtgcttatcatttgccctccggtcaccccgttgtcgcgcgaagccgacgctatttcattccccgacaggaccggggctccgctgccgcctcttcgcccctatatggcggtcccgaggcctcaaatccgtgccctacgtcggggcacgctgcttctcttccttgtcccgctcatctactctgtgtccaggctgcaaccctgggctccagaaaagggtgtgtgcctgccacccccaaccgcgccgaagcggcctgaccatctcgtgctcggccccgccgccggacaggaccgccccgaccgcctacagtgccgaggacttagagctctgaacaagattggcatatcaagtgaagagaactattctggagaacatgtttcttttgctactgtattcacaacctacaattctgtctcagctggagatgacaatgttccatctgattctgtaactgttggaaacagttcttatagcaaaatagaaagatccatggccattctgaacactttcatcagtttcataaagtaaatcaagggactgctacactattgccagttgaaggaaactattctcgaggaaatttgatgcttcagagaataaagacatacattgcatttctggagcaaaagcttgtggaatttgataggatggagaggttgaatcattttgttttaactgattccgatatagcagtggttggtgatcttggacatatattcaaaaaatatcctcattttcatctggctgttacttttcgtaataacaaagggcaaccgttgaattctgggtttgttgcggtaaggggaaccagggatggcatcactaagtaagttgacagctattgaatagatcgtattatacacaaccagcaaacttcaaaataaactctgttttttcagcgctgtggaattcttgaaacaagtccttggaacttacagtttaagatatatgaaggcttctcgtatgcttggtgaccaattagcacttgcatgggttgtcaagtctcatctaccatcggctttcggaaaattttctaagaatgaagcatttactggtgaagttaatggaacatctgttctcttcttgccttgtgctgtttataattggaccccgcctgagggtgctggacagtttcatggtgtacccttggatgttaaggttgttcatttcaaaggttccagaaagcgattgatgcttgaggcatggaatttctacagctcaacctctaagctgtctgatatgctatgcctaatcttgagaagtggccggacgaaatatgacttctgaacttttgggttaaaactgacacatgttgatactgttcaaagctgttgtatgttcaagtatagtacaaaaaaatgctgaccatgaggctgtcattgcaagaattcagatcagcataaaaaattgctagtagcattcagtatgtaacaaaaacatgtgagaacccatacgagaaccacgcagggtgaccatcgccttgtgttcttttggtttatccctacctgttaaatatgtaatgtggttccccaccaatgtgcgctatgtaggcaatttcgccgtcagatgtcgtcagcagtattaaatagagctggcgctgtttcaatgtgtcaccggcaaaatttgcagatgtttttttttgctgtcattcatcgcattttcacccattgttgagcaccgttttgag

SEQ ID NO: 41114 - DNA, 1947 bp, Zea Mays
cttcccccactcgtcttcgccagaaacccgctggcgctttggtctctgtcgtccaagttcccatctccggccaccaatagttccgacccgtaagcaccaacgccccatttgccactaccctaccgcgcaccggcaaagcgcagcgccaggccgcagcttgcaggggcaggcggcggcgggcagggcaaccgccactgcagccgggatccggcggccagcggcaaccggcggggggcaggcggtcgggacctggtgtcggtctacagccagacagcagcagcagcagcgtgacacctgctatatcgctttgcttattatctatattcatcaaagcatctatttgatcataatgttaaaagcgcgggcaagtttctagtgcttatcatttgccctccggtcaccccgttgtcgcgcgaagccgacgctatttcattccccgacaggaccggggctccgctgccgcctcttcgcccctatatggcggtcccgaggcctcaaatccgtgccctacgtcggggcacgctgcttctcttccttgtcccgctcatctactctgtgtccaggctgcaaccctgggctccagaaaagggtgtgtgcctgccacccccaaccgcgccgaagcggcctgaccatctcgtgctcggccccgccgccggacaggaccgccccgaccgcctacagtgccgaggacttagagctctgaacaagattggcatatcaagtgaagagaactattctggagaacatgtttcttttgctactgtattcacaacctacaattctgtctcagctggagatgacaatgttccatctgattctgtaactgttggaaacagttcttatagcaaaatagaaagatccatggccattctgaacactttcatcagtttcataaagtaaatcaagggactgctacactattgccagttgaaggaaactattctcgaggaaatttgatgcttcagagaataaagacatacattgcatttctggagcaaaagcttgtggaatttgataggatggagaggttgaatcattttgttttaactgattccgatatagcagtggttggtgatcttggacatatattcaaaaaatatcctcattttcatctggctgttacttttcgtaataacaaagggcaaccgttgaattctgggtttgttgcggtaaggggaaccagggatggcatcactaatttaagatatatgaaggcttctcgtatgcttggtgaccaattagcacttgcatgggttgtcaagtctcatctaccatcggctttcggaaaattttctaagaatgaagcatttactggtgaagttaatggaacatctgttctcttcttgccttgtgctgtttataattggaccccgcctgagggtgctggacagtttcatggtgtacccttggatgttaaggttgttcatttcaaaggttccagaaagcgattgatgcttgaggcatggaatttctacagctcaacctctaagctgtctgatatgctatgcctaatcttgagaagtggccggacgaaatatgacttctgaacttttgggttaaaactgacacatgttgatactgttcaaagctgttgtatgttcaagtatagtacaaaaaaatgctgaccatgaggctgtcattgcaagaattcagatcagcataaaaaattgctagtagcattcagtatgtaacaaaaacatgtgagaacccatacgagaaccacgcagggtgaccatcgccttgtgttcttttggtttatccctacctgttaaatatgtaatgtggttccccaccaatgtgcgctatgtaggcaatttcgccgtcagatgtcgtcagcagtattaaatagagctggcgctgtttcaatgtgtcaccggcaaaatttgcagatgtttttttttgctgtcattcatcgcattttcacccattgttgagcaccgttttgag

SEQ ID NO: 41115 - DNA, 2192 bp, Zea Mays
cttcccccactcgtcttcgccagaaacccgctggcgctttggtctctgtcgtccaagttcccatctccggccaccaatagttccgacccgtaagcaccaacgccccatttgccactaccctaccgcgcaccggcaaagcgcagcgccaggccgcagcttgcaggggcaggcggcggcgggcagggcaaccgccactgcagccgggatccggcggccagcggcaaccggcggggggcaggcggtcgggacctggtgtcggtctacagccagacagcagcagcagcagcgtgaccctcaaaatcctagaccactaccgtatggtccactgctcctttgctggtgtcgtccactgctcctctgcaacgtcgtttgatctcctgtgcagtctgcacacgcgtgttgaaggagttgattcctggacagcacacgatagcacaatcctctactggttcattcctggactaccggtggtaatctgacctgctatatcgctttgcttattatctatattcatcaaagcatctatttgatcataatgttaaaagcgcgggcaagtttctagtgcttatcatttgccctccggtcaccccgttgtcgcgcgaagccgacgctatttcattccccgacaggaccggggctccgctgccgcctcttcgcccctatatggcggtcccgaggcctcaaatccgtgccctacgtcggggcacgctgcttctcttccttgtcccgctcatctactctgtgtccaggctgcaaccctgggctccagaaaagggtgtgtgcctgccacccccaaccgcgccgaagcggcctgaccatctcgtgctcggccccgccgccggacaggaccgccccgaccgcctacagtgccgaggacttagagctctgaacaagattggcatatcaagtgaagagaactattctggagaacatgtttcttttgctactgtattcacaacctacaattctgtctcagctggagatgacaatgttccatctgattctgtaactgttggaaacagttcttatagcaaaatagaaagatccatggccattctgaacactttcatcagtttcataaaggtatcaatgccaagaagcgacttgatcatattgactgatcctggttcaaaaatttcagtaaatcaagggactgctacactattgccagttgaaggaaactattctcgaggaaatttgatgcttcagagaataaagacatacattgcatttctggagcaaaagcttgtggaatttgataggatggagaggttgaatcattttgttttaactgattccgatatagcagtggttggtgatcttggacatatattcaaaaaatatcctcattttcatctggctgttacttttcgtaataacaaagggcaaccgttgaattctgggtttgttgcggtaaggggaaccagggatggcatcactaagtttaagatatatgaaggcttctcgtatgcttggtgaccaattagcacttgcatgggttgtcaagtctcatctaccatcggctttcggaaaattttctaagaatgaagcatttactggtgaagttaatggaacatctgttctcttcttgccttgtgctgtttataattggaccccgcctgagggtgctggacagtttcatggtgtacccttggatgttaaggttgttcatttcaaaggttccagaaagcgattgatgcttgaggcatggaatttctacagctcaacctctaagctgtctgatatgctatgcctaatcttgagaagtggccggacgaaatatgacttctgaacttttgggttaaaactgacacatgttgatactgttcaaagctgttgtatgttcaagtatagtacaaaaaaatgctgaccatgaggctgtcattgcaagaattcagatcagcataaaaaattgctagtagcattcagtatgtaacaaaaacatgtgagaacccatacgagaaccacgcagggtgaccatcgccttgtgttcttttggtttatccctacctgttaaatatgtaatgtggttccccaccaatgtgcgctatgtaggcaatttcgccgtcagatgtcgtcagcagtattaaatagagctggcgctgtttcaatgtgtcaccggcaaaatttgcagatgtttttttttgctgtcattcatcgcattttcacccattgttgagcaccgttttgag

SEQ ID NO: 41116 - DNA, 3496 bp, Zea Mays
cttcccccactcgtcttcgccagaaacccgctggcgctttggtctctgtcgtccaagttcccatctccggccaccaatagttccgacccgtaagcaccaacgccccatttgccactaccctaccgcgcaccggcaaagcgcagcgccaggccgcagcttgcaggggcaggcggcggcgggcagggcaaccgccactgcagccgggatccggcggccagcggcaaccggcggggggcaggcggtcgggacctggtgtcggtctacagccagacagcagcagcagcagcgtgaccctcaaaatcctagaccactaccgtatggtccactgctcctttgctggtgtcgtccactgctcctctgcaacgtcgtttgatctcctgtgcagtctgcacacgcgtgttgaaggagttgattcctggacagcacacgatagcacaatcctctactggttcattcctggactaccggtggtaatctggtaatcctactgcctaccaacatacctccaaagggccctgttgctcgcctgttgaaggatttgatgttttgagcatatgcattacatatttgtagagtaaattagagggggaatgactgaacttatgttggttgtttggtatttgactttatgttattgtctgaaattatgatatattgaaattttcctatgttgtttaaaagtacgcttaaactttgtttaaaacgtttaaaagtcaaaactccacccatgagcgtttgagcgtttcaacgttttcgtcattttaataaccttcctcttagtaactgccattgttgcaaatcaattgacaaaagtgcaacttctgacaaaaaacaggtacacttttctccaaatgaatacaagtatacaacataatatcattcttctctgtcaacaaaaaatgtcatcatttacatgctgaatacttatttatgtataaggacgtcattagtttcctattatcgtcacttctttaatttgcaaacaacaaactcttactttaacttcatttatttttgtattgtgattgtttactgagtactcctattttgcctacttctaaatacctgtacctatgcatacataaatatactcggctactaccaatgcattatagctacattcacataccttacatgctacccctcagctgtaaactttggcgtaatcagctgtgaacttttaacacactatcttttgtaaactttggtgtaatcagctgtatagcgcgttttgctgacaaagtccctctgaactctcttttgatgcatgatgcatatatgttttatgcagaatcaaactaggtactcaaaaaggcatatctctagatttctaattgccatcttttacagtctttaggaccgatagtttgatgcttcaacaaatgtgtatatatgactaatacattgtcaggtacttttggtttgcgacccattgtaatataatatctaatatggccatcgtcctacgtttgtatattccgacttttcaatgctacaaacatatgcatacttgctgatcatgttgttaatctatcatgtataagaatgtataaccctccatacttggtgctttacattctaaccatgttgctacaaacatatacatgattgctgatcatattgttaatctgtcatctgtaagctgcagcatgattgctgctttacattcttatattccaaatttccaatgctataaacttatctaatctattgccaactgtttatacagacctgctatatcgctttgcttattatctatattcatcaaagcatctatttgatcataatgttaaaagcgcgggcaagtttctagtgcttatcatttgccctccggtcaccccgttgtcgcgcgaagccgacgctatttcattccccgacaggaccggggctccgctgccgcctcttcgcccctatatggcggtcccgaggcctcaaatccgtgccctacgtcggggcacgctgcttctcttccttgtcccgctcatctactctgtgtccaggctgcaaccctgggctccagaaaagggtgtgtgcctgccacccccaaccgcgccgaagcggcctgaccatctcgtgctcggccccgccgccggacaggaccgccccgaccgcctacagtgccgaggacttagagctctgaacaagattggcatatcaagtgaagagaactattctggagaacatgtttcttttgctactgtattcacaacctacaattctgtctcagctggagatgacaatgttccatctgattctgtaactgttggaaacagttcttatagcaaaatagaaagatccatggccattctgaacactttcatcagtttcataaagtaaatcaagggactgctacactattgccagttgaaggaaactattctcgaggaaatttgatgcttcagagaataaagacatacattgcatttctggagcaaaagcttgtggaatttgataggatggagaggttgaatcattttgttttaactgattccgatatagcagtggttggtgatcttggacatatattcaaaaaatatcctcattttcatctggctgttacttttcgtaataacaaagggcaaccgttgaattctgggtttgttgcggtaaggggaaccagggatggcatcactaagtaagttgacagctattgaatagatcgtattatacacaaccagcaaacttcaaaataaactctgttttttcagcgctgtggaattcttgaaacaagtccttggaacttacagtttaagatatatgaaggcttctcgtatgcttggtgaccaattagcacttgcatgggttgtcaagtctcatctaccatcggctttcggaaaattttctaagaatgaagcatttactggtgaagttaatggaacatctgttctcttcttgccttgtgctgtttataattggaccccgcctgagggtgctggacagtttcatggtgtacccttggatgttaaggttgttcatttcaaaggttccagaaagcgattgatgcttgaggcatggaatttctacagctcaacctctaagctgtctgatatgctatgcctaatcttgagaagtggccggacgaaatatgacttctgaacttttgggttaaaactgacacatgttgatactgttcaaagctgttgtatgttcaagtatagtacaaaaaaatgctgaccatgaggctgtcattgcaagaattcagatcagcataaaaaattgctagtagcattcagtatgtaacaaaaacatgtgagaacccatacgagaaccacgcagggtgaccatcgccttgtgttcttttggtttatccctacctgttaaatatgtaatgtggttccccaccaatgtgcgctatgtaggcaatttcgccgtcagatgtcgtcagcagtattaaatagagctggcgctgtttcaatgtgtcaccggcaaaatttgcagatgtttttttttgctgtcattcatcgcattttcacccattgttgagcaccgttttgag

SEQ ID NO: 41117 - DNA, 2216 bp, Zea Mays
cttcccccactcgtcttcgccagaaacccgctggcgctttggtctctgtcgtccaagttcccatctccggccaccaatagttccgacccgtaagcaccaacgccccatttgccactaccctaccgcgcaccggcaaagcgcagcgccaggccgcagcttgcaggggcaggcggcggcgggcagggcaaccgccactgcagccgggatccggcggccagcggcaaccggcggggggcaggcggtcgggacctggtgtcggtctacagccagacagcagcagcagcagcgtgacaccactaccgtatggtccactgctcctttgctggtgtcgtccactgctcctctgcaacgtcgtttgatctcctgtgcagtctgcacacgcgtgttgaaggagttgattcctggacagcacacgatagcacaatcctctactggttcattcctggactaccggtggtaatctgacctgctatatcgctttgcttattatctatattcatcaaagcatctatttgatcataatgttaaaagcgcgggcaagtttctagtgcttatcatttgccctccggtcaccccgttgtcgcgcgaagccgacgctatttcattccccgacaggaccggggctccgctgccgcctcttcgcccctatatggcggtcccgaggcctcaaatccgtgccctacgtcggggcacgctgcttctcttccttgtcccgctcatctactctgtgtccaggctgcaaccctgggctccagaaaagggtgtgtgcctgccacccccaaccgcgccgaagcggcctgaccatctcgtgctcggccccgccgccggacaggaccgccccgaccgcctacagtgccgaggacttagagctctgaacaagattggcatatcaagtgaagagaactattctggagaacatgtttcttttgctactgtattcacaacctacaattctgtctcagctggagatgacaatgttccatctgattctgtaactgttggaaacagttcttatagcaaaatagaaagatccatggccattctgaacactttcatcagtttcataaaggtatcaatgccaagaagcgacttgatcatattgactgatcctggttcaaaaatttcagtaaatcaagggactgctacactattgccagttgaaggaaactattctcgaggaaatttgatgcttcagagaataaagacatacattgcatttctggagcaaaagcttgtggaatttgataggatggagaggttgaatcattttgttttaactgattccgatatagcagtggttggtgatcttggacatatattcaaaaaatatcctcattttcatctggctgttacttttcgtaataacaaagggcaaccgttgaattctgggtttgttgcggtaaggggaaccagggatggcatcactaacgctgtggaattcttgaaacaagtccttggaacttacagtttaagatatatgaaggcttctcgtatgcttggtgaccaattagcacttgcatgggttgtcaagtctcatctaccatcggctttcggaaaattttctaagaatgaagcatttactggtgaagttaatggaacatctgttctcttcttgccttgtgctgtttataattggaccccgcctgagggtgctggacagtttcatggtgtacccttggatgttaaggttgttcatttcaaaggttccagaaagcgattgatgcttgaggcatggaatttctacagctcaacctctaagctgtctgatatgctatgcctaatcttgagaagtggccggacgaaatatgacttctgaacttttgggttaaaactgacacatgttgatactgttcaaagctgttgtatgttcaagtatagtacaaaaaaatgctgaccatgaggctgtcattgcaagaattcagatcagcataaaaaattgctagtagcattcagtatgtaacaaaaacatgtgagaacccatacgagaaccacgcagggtgaccatcgccttgtgttcttttggtttatccctacctgttaaatatgtaatgtggttccccaccaatgtgcgctatgtaggcaatttcgccgtcagatgtcgtcagcagtattaaatagagctggcgctgtttcaatgtgtcaccggcaaaatttgcagatgtttttttttgctgtcattcatcgcattttcacccattgttgagcaccgttttgag

SEQ ID NO: 41118 - DNA, 3564 bp, Zea Mays
cttcccccactcgtcttcgccagaaacccgctggcgctttggtctctgtcgtccaagttcccatctccggccaccaatagttccgacccgtaagcaccaacgccccatttgccactaccctaccgcgcaccggcaaagcgcagcgccaggccgcagcttgcaggggcaggcggcggcgggcagggcaaccgccactgcagccgggatccggcggccagcggcaaccggcggggggcaggcggtcgggacctggtgtcggtctacagccagacagcagcagcagcagcgtgaccctcaaaatcctagaccactaccgtatggtccactgctcctttgctggtgtcgtccactgctcctctgcaacgtcgtttgatctcctgtgcagtctgcacacgcgtgttgaaggagttgattcctggacagcacacgatagcacaatcctctactggttcattcctggactaccggtggtaatctggtaatcctactgcctaccaacatacctccaaagggccctgttgctcgcctgttgaaggatttgatgttttgagcatatgcattacatatttgtagagtaaattagagggggaatgactgaacttatgttggttgtttggtatttgactttatgttattgtctgaaattatgatatattgaaattttcctatgttgtttaaaagtacgcttaaactttgtttaaaacgtttaaaagtcaaaactccacccatgagcgtttgagcgtttcaacgttttcgtcattttaataaccttcctcttagtaactgccattgttgcaaatcaattgacaaaagtgcaacttctgacaaaaaacaggtacacttttctccaaatgaatacaagtatacaacataatatcattcttctctgtcaacaaaaaatgtcatcatttacatgctgaatacttatttatgtataaggacgtcattagtttcctattatcgtcacttctttaatttgcaaacaacaaactcttactttaacttcatttatttttgtattgtgattgtttactgagtactcctattttgcctacttctaaatacctgtacctatgcatacataaatatactcggctactaccaatgcattatagctacattcacataccttacatgctacccctcagctgtaaactttggcgtaatcagctgtgaacttttaacacactatcttttgtaaactttggtgtaatcagctgtatagcgcgttttgctgacaaagtccctctgaactctcttttgatgcatgatgcatatatgttttatgcagaatcaaactaggtactcaaaaaggcatatctctagatttctaattgccatcttttacagtctttaggaccgatagtttgatgcttcaacaaatgtgtatatatgactaatacattgtcaggtacttttggtttgcgacccattgtaatataatatctaatatggccatcgtcctacgtttgtatattccgacttttcaatgctacaaacatatgcatacttgctgatcatgttgttaatctatcatgtataagaatgtataaccctccatacttggtgctttacattctaaccatgttgctacaaacatatacatgattgctgatcatattgttaatctgtcatctgtaagctgcagcatgattgctgctttacattcttatattccaaatttccaatgctataaacttatctaatctattgccaactgtttatacagacctgctatatcgctttgcttattatctatattcatcaaagcatctatttgatcataatgttaaaagcgcgggcaagtttctagtgcttatcatttgccctccggtcaccccgttgtcgcgcgaagccgacgctatttcattccccgacaggaccggggctccgctgccgcctcttcgcccctatatggcggtcccgaggcctcaaatccgtgccctacgtcggggcacgctgcttctcttccttgtcccgctcatctactctgtgtccaggctgcaaccctgggctccagaaaagggtgtgtgcctgccacccccaaccgcgccgaagcggcctgaccatctcgtgctcggccccgccgccggacaggaccgccccgaccgcctacagtgccgaggacttagagctctgaacaagattggcatatcaagtgaagagaactattctggagaacatgtttcttttgctactgtattcacaacctacaattctgtctcagctggagatgacaatgttccatctgattctgtaactgttggaaacagttcttatagcaaaatagaaagatccatggccattctgaacactttcatcagtttcataaagaaccctgcaggtatcaatgccaagaagcgacttgatcatattgactgatcctggttcaaaaatttcagtaaatcaagggactgctacactattgccagttgaaggaaactattctcgaggaaatttgatgcttcagagaataaagacatacattgcatttctggagcaaaagcttgtggaatttgataggatggagaggttgaatcattttgttttaactgattccgatatagcagtggttggtgatcttggacatatattcaaaaaatatcctcattttcatctggctgttacttttcgtaataacaaagggcaaccgttgaattctgggtttgttgcggtaaggggaaccagggatggcatcactaagtaagttgacagctattgaatagatcgtattatacacaaccagcaaacttcaaaataaactctgttttttcagcgctgtggaattcttgaaacaagtccttggaacttacagtttaagatatatgaaggcttctcgtatgcttggtgaccaattagcacttgcatgggttgtcaagtctcatctaccatcggctttcggaaaattttctaagaatgaagcatttactggtgaagttaatggaacatctgttctcttcttgccttgtgctgtttataattggaccccgcctgagggtgctggacagtttcatggtgtacccttggatgttaaggttgttcatttcaaaggttccagaaagcgattgatgcttgaggcatggaatttctacagctcaacctctaagctgtctgatatgctatgcctaatcttgagaagtggccggacgaaatatgacttctgaacttttgggttaaaactgacacatgttgatactgttcaaagctgttgtatgttcaagtatagtacaaaaaaatgctgaccatgaggctgtcattgcaagaattcagatcagcataaaaaattgctagtagcattcagtatgtaacaaaaacatgtgagaacccatacgagaaccacgcagggtgaccatcgccttgtgttcttttggtttatccctacctgttaaatatgtaatgtggttccccaccaatgtgcgctatgtaggcaatttcgccgtcagatgtcgtcagcagtattaaatagagctggcgctgtttcaatgtgtcaccggcaaaatttgcagatgtttttttttgctgtcattcatcgcattttcacccattgttgagcaccgttttgag

SEQ ID NO: 41119 - DNA, 2044 bp, Zea Mays
cttcccccactcgtcttcgccagaaacccgctggcgctttggtctctgtcgtccaagttcccatctccggccaccaatagttccgacccgtaagcaccaacgccccatttgccactaccctaccgcgcaccggcaaagcgcagcgccaggccgcagcttgcaggggcaggcggcggcgggcagggcaaccgccactgcagccgggatccggcggccagcggcaaccggcggggggcaggcggtcgggacctggtgtcggtctacagccagacagcagcagcagcagcgtgacacctgctatatcgctttgcttattatctatattcatcaaagcatctatttgatcataatgttaaaagcgcgggcaagtttctagtgcttatcatttgccctccggtcaccccgttgtcgcgcgaagccgacgctatttcattccccgacaggaccggggctccgctgccgcctcttcgcccctatatggcggtcccgaggcctcaaatccgtgccctacgtcggggcacgctgcttctcttccttgtcccgctcatctactctgtgtccaggctgcaaccctgggctccagaaaagggtgtgtgcctgccacccccaaccgcgccgaagcggcctgaccatctcgtgctcggccccgccgccggacaggaccgccccgaccgcctacagtgccgaggacttagagctctgaacaagattggcatatcaagtgaagagaactattctggagaacatgtttcttttgctactgtattcacaacctacaattctgtctcagctggagatgacaatgttccatctgattctgtaactgttggaaacagttcttatagcaaaatagaaagatccatggccattctgaacactttcatcagtttcataaaggtatcaatgccaagaagcgacttgatcatattgactgatcctggttcaaaaatttcagtaaatcaagggactgctacactattgccagttgaaggaaactattctcgaggaaatttgatgcttcagagaataaagacatacattgcatttctggagcaaaagcttgtggaatttgataggatggagaggttgaatcattttgttttaactgattccgatatagcagtggttggtgatcttggacatatattcaaaaaatatcctcattttcatctggctgttacttttcgtaataacaaagggcaaccgttgaattctgggtttgttgcggtaaggggaaccagggatggcatcactaacgctgtggaattcttgaaacaagtccttggaacttacagtttaagatatatgaaggcttctcgtatgcttggtgaccaattagcacttgcatgggttgtcaagtctcatctaccatcggctttcggaaaattttctaagaatgaagcatttactggtgaagttaatggaacatctgttctcttcttgccttgtgctgtttataattggaccccgcctgagggtgctggacagtttcatggtgtacccttggatgttaaggttgttcatttcaaaggttccagaaagcgattgatgcttgaggcatggaatttctacagctcaacctctaagctgtctgatatgctatgcctaatcttgagaagtggccggacgaaatatgacttctgaacttttgggttaaaactgacacatgttgatactgttcaaagctgttgtatgttcaagtatagtacaaaaaaatgctgaccatgaggctgtcattgcaagaattcagatcagcataaaaaattgctagtagcattcagtatgtaacaaaaacatgtgagaacccatacgagaaccacgcagggtgaccatcgccttgtgttcttttggtttatccctacctgttaaatatgtaatgtggttccccaccaatgtgcgctatgtaggcaatttcgccgtcagatgtcgtcagcagtattaaatagagctggcgctgtttcaatgtgtcaccggcaaaatttgcagatgtttttttttgctgtcattcatcgcattttcacccattgttgagcaccgttttgag

SEQ ID NO: 41120 - DNA, 1776 bp, Zea Mays
cttcccccactcgtcttcgccagaaacccgctggcgctttggtctctgtcgtccaagttcccatctccggccaccaatagttccgacccgtaagcaccaacgccccatttgccactaccctaccgcgcaccggcaaagcgcagcgccaggccgcagcttgcaggggcaggcggcggcgggcagggcaaccgccactgcagccgggatccggcggccagcggcaaccggcggggggcaggcggtcgggacctggtgtcggtctacagccagacagcagcagcagcagcgtgaccctcaaaatcctagaccactaccgtatggtccactgctcctttgctggtgtcgtccactgctcctctgcaacgtcgtttgatctcctgtgcagtctgcacacgcgtgttgaaggagttgattcctggacagcacacgatagcacaatcctctactggttcattcctggactaccggtggtaatctggacttagagctctgaacaagattggcatatcaagtgaagagaactattctggagaacatgtttcttttgctactgtattcacaacctacaattctgtctcagctggagatgacaatgttccatctgattctgtaactgttggaaacagttcttatagcaaaatagaaagatccatggccattctgaacactttcatcagtttcataaagtaaatcaagggactgctacactattgccagttgaaggaaactattctcgaggaaatttgatgcttcagagaataaagacatacattgcatttctggagcaaaagcttgtggaatttgataggatggagaggttgaatcattttgttttaactgattccgatatagcagtggttggtgatcttggacatatattcaaaaaatatcctcattttcatctggctgttacttttcgtaataacaaagggcaaccgttgaattctgggtttgttgcggtaaggggaaccagggatggcatcactaacgctgtggaattcttgaaacaagtccttggaacttacagtttaagatatatgaaggcttctcgtatgcttggtgaccaattagcacttgcatgggttgtcaagtctcatctaccatcggctttcggaaaattttctaagaatgaagcatttactggtgaagttaatggaacatctgttctcttcttgccttgtgctgtttataattggaccccgcctgagggtgctggacagtttcatggtgtacccttggatgttaaggttgttcatttcaaaggttccagaaagcgattgatgcttgaggcatggaatttctacagctcaacctctaagctgtctgatatgctatgcctaatcttgagaagtggccggacgaaatatgacttctgaacttttgggttaaaactgacacatgttgatactgttcaaagctgttgtatgttcaagtatagtacaaaaaaatgctgaccatgaggctgtcattgcaagaattcagatcagcataaaaaattgctagtagcattcagtatgtaacaaaaacatgtgagaacccatacgagaaccacgcagggtgaccatcgccttgtgttcttttggtttatccctacctgttaaatatgtaatgtggttccccaccaatgtgcgctatgtaggcaatttcgccgtcagatgtcgtcagcagtattaaatagagctggcgctgtttcaatgtgtcaccggcaaaatttgcagatgtttttttttgctgtcattcatcgcattttcacccattgttgagcaccgttttgag

SEQ ID NO: 41121 - DNA, 1400 bp, Zea Mays
cttagttcgagacatttcgggctgtctaggacttagagctctgaacaagattggcatatcaagtgaagagaactattctggagaacatgtttcttttgctactgtattcacaacctacaattctgtctcagctggagatgacaatgttccatctgattctgtaactgttggaaacagttcttatagcaaaatagaaagatccatggccattctgaacactttcatcagtttcataaagtaaatcaagggactgctacactattgccagttgaaggaaactattctcgaggaaatttgatgcttcagagaataaagacatacattgcatttctggagcaaaagcttgtggaatttgataggatggagaggttgaatcattttgttttaactgattccgatatagcagtggttggtgatcttggacatatattcaaaaaatatcctcattttcatctggctgttacttttcgtaataacaaagggcaaccgttgaattctgggtttgttgcggtaaggggaaccagggatggcatcactaagtaagttgacagctattgaatagatcgtattatacacaaccagcaaacttcaaaataaactctgttttttcagcgctgtggaattcttgaaacaagtccttggaacttacagtttaagatatatgaaggcttctcgtatgcttggtgaccaattagcacttgcatgggttgtcaagtctcatctaccatcggctttcggaaaattttctaagaatgaagcatttactggtgaagttaatggaacatctgttctcttcttgccttgtgctgtttataattggaccccgcctgagggtgctggacagtttcatggtgtacccttggatgttaaggttgttcatttcaaaggttccagaaagcgattgatgcttgaggcatggaatttctacagctcaacctctaagctgtctgatatgctatgcctaatcttgagaagtggccggacgaaatatgacttctgaacttttgggttaaaactgacacatgttgatactgttcaaagctgttgtatgttcaagtatagtacaaaaaaatgctgaccatgaggctgtcattgcaagaattcagatcagcataaaaaattgctagtagcattcagtatgtaacaaaaacatgtgagaacccatacgagaaccacgcagggtgaccatcgccttgtgttcttttggtttatccctacctgttaaatatgtaatgtggttccccaccaatgtgcgctatgtaggcaatttcgccgtcagatgtcgtcagcagtattaaatagagctggcgctgtttcaatgtgtcaccggcaaaatttgcagatgtttttttttgctgtcattcatcgcattttcacccattgttgagcaccgttttgag

SEQ ID NO: 41122 - DNA, 1244 bp, Zea Mays
gacaaataagggacccacgtggaggtatcaatgccaagaagcgacttgatcatattgactgatcctggttcaaaaatttcagtaaatcaagggactgctacactattgccagttgaaggaaactattctcgaggaaatttgatgcttcagagaataaagacatacattgcatttctggagcaaaagcttgtggaatttgataggatggagaggttgaatcattttgttttaactgattccgatatagcagtggttggtgatcttggacatatattcaaaaaatatcctcattttcatctggctgttacttttcgtaataacaaagggcaaccgttgaattctgggtttgttgcggtaaggggaaccagggatggcatcactaagtaagttgacagctattgaatagatcgtattatacacaaccagcaaacttcaaaataaactctgttttttcagcgctgtggaattcttgaaacaagtccttggaacttacagtttaagatatatgaaggcttctcgtatgcttggtgaccaattagcacttgcatgggttgtcaagtctcatctaccatcggctttcggaaaattttctaagaatgaagcatttactggtgaagttaatggaacatctgttctcttcttgccttgtgctgtttataattggaccccgcctgagggtgctggacagtttcatggtgtacccttggatgttaaggttgttcatttcaaaggttccagaaagcgattgatgcttgaggcatggaatttctacagctcaacctctaagctgtctgatatgctatgcctaatcttgagaagtggccggacgaaatatgacttctgaacttttgggttaaaactgacacatgttgatactgttcaaagctgttgtatgttcaagtatagtacaaaaaaatgctgaccatgaggctgtcattgcaagaattcagatcagcataaaaaattgctagtagcattcagtatgtaacaaaaacatgtgagaacccatacgagaaccacgcagggtgaccatcgccttgtgttcttttggtttatccctacctgttaaatatgtaatgtggttccccaccaatgtgcgctatgtaggcaatttcgccgtcagatgtcgtcagcagtattaaatagagctggcgctgtttcaatgtgtcaccggcaaaatttgcagatgtttttttttgctgtcattcatcgcattttcacccattgttgagcaccgttttgag

SEQ ID NO: 41123 - DNA, 568 bp, Zea Mays
caggcttcttacacatgaatgcatggtgctaacatagatgttgttcatttcaaaggttccagaaagcgattgatgcttgaggcatggaatttctacagctcaacctctaagctgtctgatatgctatgcctaatcttgagaagtggccggacgaaatatgacttctgaacttttgggttaaaactgacacatgttgatactgttcaaagctgttgtatgttcaagtatagtacaaaaaaatgctgaccatgaggctgtcattgcaagaattcagatcagcataaaaaattgctagtagcattcagtatgtaacaaaaacatgtgagaacccatacgagaaccacgcagggtgaccatcgccttgtgttcttttggtttatccctacctgttaaatatgtaatgtggttccccaccaatgtgcgctatgtaggcaatttcgccgtcagatgtcgtcagcagtattaaatagagctggcgctgtttcaatgtgtcaccggcaaaatttgcagatgtttttttttgctgtcattcatcgcattttcacccattgttgagcaccgttttgag

SEQ ID NO: 41124 - DNA, 771 bp, Zea Mays
gccctagggcgtggaccgtccggccgtcaggcagggaacccgagctcctgcaccaggtcgcggaccgtccggcccttcgcggacaggaggaagaggaagaagaagcggcagcgagcgaggatgccgtgcctgaacgtgtcgaccaacgtgaacctggagggggtggacacctccgccatcctcgccgaagcctccaagtccgtcgccaacatcatcggcaagcccgaggcctacgtgatggttgttctcaagggttcggtgcctatggcatttggaggtacccaggagccagcagcttacggtgagctggtttccatcggaggcctgaaccctgatgtgaacaagaagcttagtgctggcatcgcttctatcctggagtcaaagctgtctgttcccaagtcacgcttctacctcaagttctatgactcgaagcgctcggacttcggttggaacggctccaccttctagacttgaggtctgcagctgaaataaaagaaattcgtggaatcatggtacctaatgcccatggctattgcctattaaggacaatgtcataagatgtgtcttaatcggtgctgaactgagaaacagtaactgttgtcgtggaactggaagtggggtgctggcgtgtcagagtgcttgcttcctacctagcatagcatgcctgtgctatcttgttattggtattggcttgatatcagtctatattatcatttattatggttggaaccaacaaaaaaaaactgattttagtgctggtttttttttttg

SEQ ID NO: 41125 - DNA, 524 bp, Zea Mays
gccctagggcgtggaccgtccggccgtcaggcagggaacccgagctcctgcaccaggtcgcggaccgtccggcccttcgcggacaggaggaagaggaagaagaagcggcagcgagcgaggatgccgtgcctgaacgtgtcgaccaacgtgaacctggagggggtggacacctccgccatcctcgccgaagcctccaagtccgtcgccaacatcatcggcaagcccgaggcctacgtgatggttgttctcaagggttcggtgcctatggcatttggaggtacccaggagccagcagcttacggtgagctggtttccatcggaggcctgaaccctgatgtgaacaagaagcttagtgctggcgtgtcagagtgcttgcttcctacctagcatagcatgcctgtgctatcttgttattggtattggcttgatatcagtctatattatcatttattatggttggtccttcgggtttggtaactgaaccaacaaaaaaaaactgattttagtgctggtttttttttttg

SEQ ID NO: 41126 - DNA, 504 bp, Zea Mays
gccctagggcgtggaccgtccggccgtcaggcagggaacccgagctcctgcaccaggtcgcggaccgtccggcccttcgcggacaggaggaagaggaagaagaagcggcagcgagcgaggatgccgtgcctgaacgtgtcgaccaacgtgaacctggagggggtggacacctccgccatcctcgccgaagcctccaagtccgtcgccaacatcatcggcaagcccgaggcctacgtgatggttgttctcaagggttcggtgcctatggcatttggaggtacccaggagccagcagcttacggtgagctggtttccatcggaggcctgaaccctgatgtgaacaagaagcttagtgctggcgtgtcagagtgcttgcttcctacctagcatagcatgcctgtgctatcttgttattggtattggcttgatatcagtctatattatcatttattatggttggaaccaacaaaaaaaaactgattttagtgctggtttttttttttg

SEQ ID NO: 41127 - DNA, 791 bp, Zea Mays
gccctagggcgtggaccgtccggccgtcaggcagggaacccgagctcctgcaccaggtcgcggaccgtccggcccttcgcggacaggaggaagaggaagaagaagcggcagcgagcgaggatgccgtgcctgaacgtgtcgaccaacgtgaacctggagggggtggacacctccgccatcctcgccgaagcctccaagtccgtcgccaacatcatcggcaagcccgaggcctacgtgatggttgttctcaagggttcggtgcctatggcatttggaggtacccaggagccagcagcttacggtgagctggtttccatcggaggcctgaaccctgatgtgaacaagaagcttagtgctggcatcgcttctatcctggagtcaaagctgtctgttcccaagtcacgcttctacctcaagttctatgactcgaagcgctcggacttcggttggaacggctccaccttctagacttgaggtctgcagctgaaataaaagaaattcgtggaatcatggtacctaatgcccatggctattgcctattaaggacaatgtcataagatgtgtcttaatcggtgctgaactgagaaacagtaactgttgtcgtggaactggaagtggggtgctggcgtgtcagagtgcttgcttcctacctagcatagcatgcctgtgctatcttgttattggtattggcttgatatcagtctatattatcatttattatggttggtccttcgggtttggtaactgaaccaacaaaaaaaaactgattttagtgctggtttttttttttg

SEQ ID NO: 41128 - DNA, 1412 bp, Zea Mays
ctcgggcctcccgacccctccgtcgaagccgcagccatggcgaccaccaccaccaccactccacttatcgtctccttctcgcgcagctgcagctgcccctatccacaccgccacttccccggcaagcccaagctgcccgcacccacctcctgctccctctccctccgcctcctcgctgccccccttgccgtcctgccgcggcgcccgcgtgacgtgtcggcggcgtacggcgacggcgacatggacgacgacttcggcgacttcgaccccgacgacgcggacggcgtcggcgaggacgacgacgtcgacaacgagcaggactacgacgtcgactacgaccgcctcctagctcccgtcgtcaagccgccgtcgccgccgggcgcgtcggcgtcgcccggggaggagggcgacatcgccatggtcgccgccgacagcttcgtctccacgcgggattcagcgtccgacaccgtcgtcgactacgccgtggatgaggacgagtttcacaagattaggctgctccactgcgacttccttatccgcaaggtgcccgaccccgacgacgacgtcttcgacttcagagagtgcgacatttcatcgaacacgtgctggcgatgctacccagattaacaacatcacatgtacatgtcttctgactcaattgtgtggcgctcatcttgctgagcacggcatttctgcgcaacagatgtatgtcacgccaccggacaccgacatctactccattccgagggttcttgccccgatgccgcagaagtacgcgaggtgcacgaagaaaaactttggccgttaccacgtgagcgagccaccagttgagcatttgcgcgatccactgtacaagacagagagggagatcatgaaggttttcttgaccaagcactacagaaacaggcgcgctgatgacccagatttttttcttgattttgaggagatctatgttattgactcgagaacaaggtcaatcacaagagctaaagttatggttagtgttcctgaaggaaagaaaagagaccggcggaacgacctgctactgatccgtgacgggggtgagtctttcagaatcatcgacaagactaaaagggacgacgcaagcactatcatacaaagagaggagtgggccaagtcgagacaagacgtggagaagcatttcaggaagctcagagactttgactactcgaattggttctaggaaaggttttcaccgcatctactgttgattatcctggagctagcagctggtttgatccactgagagatgaccatttcgaaattagataggttcggtgtaacgtagaacatatgccatctagggagcatggtaagctcaaaagtcaaaatattgtgattctgctgaatgtactactctttttttaaaaaaaaaatccttcacgaaatga

SEQ ID NO: 41129 - DNA, 1792 bp, Zea Mays
aaaaaacggactgggggggaagagaaggtgcagggtggtgtgctgctatttcttcttcagcaactgctacgcgcggtggttgctgatgactgagacaaccagcggaattagaatgcagccggtgtgtggacattgactgaactgacctcttctacattttttcaattcatatggaatgattgtacatcggtcgactgaagattatgatagtacaacaactaatcatcatgccaaaaaatatgctgtacggatcgagcaggcgttgtgtctctgggttctttcacttctagtctagtgcaagcttaggtacaaattgtcgatcgctggctgttcatggacaagggctgtagaaacatagaggccaattgtcttaattggttgaccccaaacaaagtactcgatcacattcacatactagctacctgtttctctgttgaggctggtccagaagaatgcgaaacccaaactacgaaacggaaatgttgcagcaatgtatatataaacattaaaatatctcgggattcccatgaagttaagcataatagatttgaaaaaaagattaagtatctggaaaggtaaatttcatttttcgtgtggacgtctagtgctccttaattcgggagaaagctaggggactcgtagttttggtctggtcttatgaatattaaggaataattcttgagattgggaagcaggtttcgagtaagtgacatccgtgtaactaggttctgggtcgacagatggattctgaatacaccgcttaaggaccacttcctaaaccttttaaacatcgtgcgtaagaagaatggtttagtcaaaaatttactagtaaatgttcctttgcgataatctagagaaaagatttatagggggtcgcaatgtacttacttttaatggacaccctcttaaatctcaataggttgttttagaagctaaaactccctctcaaaattaaaattttctcgtgatacttagggaggaacgttaatttcactaaagacaacttagctaagcgtagatgtagatatagtatgaaatgcagttttttttatcaagttgagaataatatccaacacctttctttgattgttatcttgctacaaataattggagaatcgttaatagaccttctagtattaatcatctaactagaaatcggtatgctaacaagggaaccacaaatagaaaagactcataatgttttgggccatttggctttatggtaatgatgtggtcttttctagtaaacgaataccattatccatgcatgttcttttctagggaacattttgaagattattgcagaaagaagatcattgtgaggtccttgcggtgtgtcgactactagagccttagagggggtgaccatgaagatgtccgcaagatatggatactatactagaggaatattgagtggttctttctaaggattcctcttttttttattttatggtggatgtttagttaattctcgatctgtaatagccgtatgtaggagtgtgcataaggatggaacatttttcttccataataataaaatatataaacttggctggaaggacagtacaaccattttcctgtcataaggacccctataattagactaggatacaatgatttggatatatgattgcatggatatgttatataaaatggatgaagggaaggatcgtcatgaatggaccagcggtaggtaggttgaggcttgagagggactttgcaacctgaagaaaagacttgtgttagtgtgttaggggaaaaaccactatcctcccactcacccgatatgtgg

SEQ ID NO: 41130 - DNA, 1958 bp, Zea Mays
gtgacacacgcttcttctccaatcttcctgtccctgcaagccttcccttccacaattccatccccctttcccttctggaactctcccgctgctccgcattccgtcgcttcacttcccgtagcagtcctcaccgccgccttcttctccaaatcccctgcagcccaagccctccactcccgttccccgcacgcgggcgagaccggatgaggcgctctaccagcgacgcgacgccgacggtggcggcggcgctgacgagcccgaagcccggcgccaccaagcggcagcgggaggcggcgccgctcggcgacgtcaccaatatcctccccgagaccccggccccgagtaagcccagaagaaatgcacgccgccggcccttctccgcgccctccgacgcctccactgcctcctccacctgctcctcctccgcctcgttcaccccggcgctcaagacgtcctcctccgcgtcggccacccccgcgcccaagccgccgccgtccttcactgcctccgtcacgcccgcgcccaagccgtccttcgccgccggtgagggcatctgcatctcacatctgcgctcgatctaagtctggataaaatactcatggctcatcagctcactcgactcgtgcttagctcggctcgactcgttttaattttgtcacgagctaagctagtatgtcagctcggttagcgaatgagctagtatttattagcgaaataaagcctgcaattgtattaaatgaattaatatacaatgaactatgtcaatatggtgttgaattgatgtgatatatgaaattgtgagcattactactcttttctagtgttaaattgatatgaaattaactaacaattgattatattgttgtatatatatgtgtatattgtttttttattgtggctcgcgagctaaacgagccagctcgagctcggccgagccgaaccgagcttgctcgatatccagccctagctcgatcctccgtcgcagctggtggcttcttcggtcaccattgtgttgggatttctaaccctactcttggtttgcagtcaccgacgaggaggggagcgcgttcaaatctccgaccatttgcacggtctatgcgaggcgcaggactaccgaggccgaggctgagggacggagcaaccccaccatcaccaacaggggcaaacaacccatcggtgctgcggcgagttgccctcctcttggaaaatctacgaggaacattaggaaaaaggatgctcgacccatctcgtcgtcagctacctgcggtgaagctaaaaagaagctgcggccgcttgcgaggacacccaagttgccagaggaatttgtgaagaagcaaaaggcatacttcgcagatgtggatgcctttgaactggcggaggaggaggtatcagaatccgagctggagtgaaacctgagagctgaaggtcctccccagaactacgtacgtgtccttcctccatgtacaggagtagttacttctacggcgatgggcggccagggcccagggtcatgttatcgatgtataggcatagctaggtcctcttgtaacacgcggctgatcactggagaacacctcagtataggcaaggcaactaacgcccgtaggaaattagcaaggacgagggagatcgacttccaagcgtatgagagcacagtggatggtgctgggtagaatgtggtgtgcgcttttgatcttttttgcagcgtagtacaacacggctacaggcatgtggaatggatggtggtgatatccggatctagacatcaagtagtggtgctccttgtgccttcagagccagcatctgtgtgtgtgctttttttaatggcggccgatggatgttgcgtatggctgcattggtacttttgaagtcaatgatctccatccagttctccaaatctccgattttttttctacggatgagtatttaactagcgcatgatgtggattggaattttc

SEQ ID NO: 41131 - DNA, 1470 bp, Zea Mays
gccaagcaggtctcagcgaggttttctgctataaataaggcatcgtccaggcaaacaattaatagggcaaagcaaatcaaggacgctctgcacgtactattcatcttccattgttgctttgctttgctttgcttaccggcaaccatggccagcactcgtgcagcagcaactctccttttgctcctcgcgctcgccggcacctcgtcggcgcagctgtccacgggcttctactcctactcgtgccccggcgtgtacggcgccgtcaagtcggtgatgcagtccgccatcgccagggagaagcgcatgggggcctccatcctccgcctcttcttccacgactgcttcgtccagggctgcgacgcgtcgctgctgctggacgacacgcccagcttccagggcgagaagatggccaaccctaacaacggctccgtcaggggattcgaggtcatcgacgccgtcaagtccgccgtcgaaaagctgtgccccggcgtcgtctcctgcgccgacatcctcgccatcgccgccagggacagcgtcgtcatcctgggtggtccgacctgggacgtgaaggtcgggcggcgggactccacgacggcgagcttcagcggcgccaacaacaacatcccgccgccgacgtcgggcctcgccaacctcacgtcgctcttcgccgcgcagggactttctcagaaggacatggtcgcgctctctggtgctcacaccatcgggcaggcacgctgcaccaacttcagagcccacatctacaacgacaccgacatcgacgctgccttcgcgagaacgaggcagtcaggctgcccaagcacctcaggcgccggcggcgacaacaacctggcgccattggacctccagacccctaccgtcttcgagaacaactactacaggaacctcctcgccaagaaggggctcctgcactccgaccaggagctcttcaatggcggagccaccgacgcgctggtccagtcctacgtcgggagccagagcgcgttcttcgcggatttcgtggcgggcatgatcaagatgggcgacaacaacctggcgccattggaccttcaaaccccgaccgtcttcgagaacaactactacaagaaccttgtctgcaagaaggggctcctgcactccgaccaggagctcttcaatggcggagccaccgacgcgctggtccagtcctacgccagtggccagagcgagttcttctcggactttgtgacgggcatggtgaagatgggtgacatcactccgttaactggctccggtgggcagattaggaagaactgcagaagggtcaattaattaataaccaactaataagaaggtcggccggcggtgcacactatctaacagggggcttgctttcagtcgttaattaagtttgtaatctttctacttcgtccacaaaattgtgagatcacatcatgcatgttgtaccagccaaccaaggtgttgagacgatgt

SEQ ID NO: 41132 - DNA, 1263 bp, Zea Mays
gccaagcaggtctcagcgaggttttctgctataaataaggcatcgtccaggcaaacaattaatagggcaaagcaaatcaaggacgctctgcacgtactattcatcttccattgttgctttgctttgctttgcttaccggcaaccatggccagcactcgtgcagcagcaactctccttttgctcctcgcgctcgccggcacctcgtcggcgcagctgtccacgggcttctactcctactcgtgccccggcgtgtacggcgccgtcaagtcggtgatgcagtccgccatcgccagggagaagcgcatgggggcctccatcctccgcctcttcttccacgactgcttcgtccagggctgcgacgcgtcgctgctgctggacgacacgcccagcttccagggcgagaagatggccaaccctaacaacggctccgtcaggggattcgaggtcatcgacgccgtcaagtccgccgtcgaaaagctgtgccccggcgtcgtctcctgcgccgacatcctcgccatcgccgccagggacagcgtcgtcatcctgggtggtccgacctgggacgtgaaggtcgggcggcgggactccacgacggcgagcttcagcggcgccaacaacaacatcccgccgccgacgtcgggcctcgccaacctcacgtcgctcttcgccgcgcagggactttctcagaaggacatggtcgcgctctctggtgctcacaccatcgggcaggcacgctgcaccaacttcagagcccacatctacaacgacaccgacatcgacgctgccttcgcgagaacgaggcagtcaggctgcccaagcacctcaggcgccggcgacaacaacctggcgccattggaccttcaaaccccgaccgtcttcgagaacaactactacaagaaccttgtctgcaagaaggggctcctgcactccgaccaggagctcttcaatggcggagccaccgacgcgctggtccagtcctacgccagtggccagagcgagttcttctcggactttgtgacgggcatggtgaagatgggtgacatcactccgttaactggctccggtgggcagattaggaagaactgcagaagggtcaattaattaataaccaactaataagaaggtcggccggcggtgcacactatctaacagggggcttgctttcagtcgttaattaagtttgtaatctttctacttcgtccacaaaattgtgagatcacatcatgcatgttgtaccagccaaccaaggtgttgagacgatgt

SEQ ID NO: 41133 - DNA, 3164 bp, Zea Mays
aaaaaatggcatggccattgtggtgtggctttacctggttttctcacggtcacggcttgcttcgtctcccttccgtcgccgaccgagaaggagtgggaagaaatggattggaaaagctagggttttcgccatggccatcgcccacctccagctccccgttgtcgaatccattctccccacgctctcctcctagctgcggcatctcacatcgccgaaaaaaggggcccgcccgcttctactccgctccccaattggagggtttccctccccttcccccaaatcgaatcgcagcattacccgccgagcaagcaacccacacccactcacccgcctttcaaggttcctactgcgctggcgatccagctgggggcgagcgcagcggtggcggccggataatccaatgtgtatgctctgcgccgtgcagcgctggtcgcggcgcgtcgccaccatgctcccgtggctcgtcgtcccgctcattgccatctgggctgctacccagctactcctcccggccgcctaccgcttggaggtcacctccccgcgcctcgcctgtgtctccgtcctcctcctcaccctcttctggtatgagatcctcctcccgcggctctccctctggcgcgctcgtcgctccgcgcgcctccgggaggagcgccgcgcccacgccctcgagctccacaagctccgcaagattgccacccgacgctgccgcaactgcagcaacccctacagggagcagaaccccggcggcggcaagttcatgtgctcctactgcggccacgtctccaagcgccccgtgctcgaccttaattcgaccgggaaggcctcctccaggtggccctgcgctcaagattgtggagactggctcgacctgcgctgctctgccagccccagtacctccttctgggggttctcatggcacctactgttgtcgttttttacaacaacagtgaggtggctcttgaggaagacattcagatttacatcgtcaggtgacggtgagggcttgggcccagatggtaagaggttggcaaaggcaggggataatggaggaaaagctgaggagagcagggtcgagaaggcgaggaggaaggcagaggagaagaggctggcaaggctggagagggaaatgctggaggaggaagaaaggaagcagcgggaagagatgacaaagctggtggaggaacgcaggagactgagggatgagaaagctgcggcagaggagcggtccaaaagcgctacccctgttggggagaaggatgctaggaaggaggcagagaggcggcgccaggagaggaggaagaaagaggacaaggggccaagcaagagtaattcagattgtgaggacattgatagacggttgggccgagaaggcgacatgaagcgggccttcgatagaaagattgagtctgacagacgtgagggttacaagcctcattactttgaagctaacaatcgtagtaataagacagtggagagcagggcaaagtactttggccgtatgacgggtggtttcttatcttcgtcaagagggtttggtggtggttccttctttggcagaagtatccaggcccctgcccctcaagttaacaaggttagtagacccatagttcctgcaactgaccagggcaatgcagccaaaagggatgtccaacatgcatccacacaagctgcagccaaatctacttcagctggggaaaccagaaattcatggactaattttaatcgaccggtcagcccaaatgtgcagccagcccctaccagctttaaaaagtcatggcatcagctgtttagtcgttcagcatcagtctccccttgtcctgatgctacaacttcagctcgtgatacgaatcagaagccagagccaaatggagcgcaactaagcaatgcttatacattcctctttcagtaccctcctcttgacagcaagccaagttcgagccagtccatgcaatttccaggttttccaccgcttaatggagcacctcccaataagccactacctcattttcctgctggacatatgccattctatgatgatgcagaatctgtggtatttgaagatccagaacagtttgaggacccatgctatgatcccgatgcaatcgcattgcttgggccagtttcagagtctttagataatttccctccagacttggattgtggattcatctcgagtgatgttgtcaaggaatcacatgggaggccttcaccaattgagtctcctctctctaggtctcgtatggttgaagaaaatcctatcaagcccctgcacttgttagttgcaaaaaggcctggtggtcctattcagcctgaggctagcagtgagcaacgcacatggcaaatgtggagcacaccattggttcatgaaagtttaggtctccaaggtcatcaaagtcagtggcttcaacagacaaatcaattaaactatagtgccaatgttttcaatggcagaacaaacgcccccctgggtactggtttgaatgacagtgatccttggctgcagaaagcacctttcaagcaattgccacctgatactccaagcctgttccttccacatgaaataccagggaaattacacaacgacttggtttttgggtctccaaacaaatcagcacgtgaacacccctttggatcacctggtccttcttggcccaaggaggaactgtcgttgagtggagcccaggaaggtggtggccatttttcattgctgtcgggcgcacatgttggcggcagcggagacttattttgctccacaagtcctgatgtgcagtccttggtgtggtctttcaacgaaaaggagacagcatagcagggacggactttgttgtggaaggaaatggaggatgtctgactgagccaaaacctccttgcctcctctgagtgtcacagggcggggttaatcggcgaggagataagtagtctccctccatgtcccttggcgcaaagaagatttgggggggggggggggggggcattttgtttagtatcgactcctctcacctgacctgttaccacgcgccatcttactttcacctgatgggtcgttgtatgaactctgggattcaatgaaaaatggggctgatttgtttcaaggtggctgttgggctgtagtaagtattccttggttgctggatgtagatgctaaggttttcagttagtttctc

SEQ ID NO: 41134 - DNA, 1177 bp, Zea Mays
tttgttgagtttctggaacattgagcgagtactctgctactgttggccacacatgttgttctgctattgaatttttgcacggatggaatgagaattgggtcgccaaggacgagcaattctggcacatggctatgttggttgtctcagttgtcttttacaatgccacattctctttctcgggtccatctgaacatgactgtggactcaacctattttacattgtcttcacatcgattcttgttttttcatttgcaatcatttccctgcacccgaaggtaccgtctcatagtctgttttcttccttttattgattttgcctatgcttttattacttgattcaatcagaaactatttcttgataagctatactggatgtgctcgcggttttgggctgtattatatttgcaattttatatgattctttgggttggtacgatcgtttagatttcatcttggtcatcacatgaccatgctttccaacaaccactactatacatttctgttaaatgtatccatctttttgttctaaataatgctttgtattattcttctattttagaggtgttacatgaatatgccaattttcaaacttgaggctgcgacacaggaatgtatagtagataactgaatcacgactctcgaagctttttctcattggagcctactgttccctccgctatgactgaaggccccaccatacaatcagataaagcattagcgggcttgccacagtggccttggccgtagcagcagcacgccacgagcagcgacgccagagaagagggagttccaaatggcgattacaacgaagatcagacgacaaaagacatgagcgagtattagtgtccaataaactaggtgctggaaatccacatgcagcacacctatcaatttatgtttcagggcttattggctgctccgccgaggtcatgcaatggccctagtgggagctcgacgagatggacgacacactcacctacagaggggagctagggtgtgttgtgcatgcctgcgagctgtagagaagagggggcagtctggatctgaaccctcagcaaggtattacatccacccgctcccccacgccaacgtcctccagattttgcagctcctactagagaatggcattagagtaaatgaactaacaaggacagaggttgctctcgtcgtcccataa

SEQ ID NO: 41135 - DNA, 927 bp, Zea Mays
tttgttgagtttctggaacattgagcgagtactctgctactgttggccacacatgttgttctgctattgaatttttgcacggatggaatgagaattgggtcgccaaggacgagcaattctggcacatggctatgttggttgtctcagttgtcttttacaatgccacattctctttctcgggtccatctgaacatgactgtggactcaacctattttacattgtcttcacatcgattcttgttttttcatttgcaatcatttccctgcacccgaagaggtgttacatgaatatgccaattttcaaacttgaggctgcgacacaggaatgtatagtagataactgaatcacgactctcgaagctttttctcattggagcctactgttccctccgctatgactgaaggccccaccatacaatcagataaagcattagcgggcttgccacagtggccttggccgtagcagcagcacgccacgagcagcgacgccagagaagagggagttccaaatggcgattacaacgaagatcagacgacaaaagacatgagcgagggcttattggctgctccgccgaggtcatgcaatggccctagtgggagctcgacgagatggacgacacactcacctacagaggggagctagggtgtgttgtgcatgcctgcgagctgtagagaagagggggcagtctggatctgaaccctcagcaaggtattacatccacccgctcccccacgccaacgtcctccagattttgcagctcctactagagaatggcattagagtaaatgaactaacaaggacagaggttgctctcgtcgtcccataagtggtgcagaaaatggcacccaattactgccctcgaggtgttgttagacttaatgggtcactacgcgaacagtcagtgtagttctatgcatgcatctaca

SEQ ID NO: 41136 - DNA, 1016 bp, Zea Mays
tttgttgagtttctggaacattgagcgagtactctgctactgttggccacacatgttgttctgctattgaatttttgcacggatggaatgagaattgggtcgccaaggacgagcaattctggcacatggctatgttggttgtctcagttgtcttttacaatgccacattctctttctcgggtccatctgaacatgactgtggactcaacctattttacattgtcttcacatcgattcttgttttttcatttgcaatcatttccctgcacccgaaggaatgtatagtagataactgaatcacgactctcgaagctttttctcattggagcctactgttccctccgctatgactgaaggccccaccatacaatcagataaagcattagcgggcttgccacagtggccttggccgtagcagcagcacgccacgagcagcgacgccagagaagagggagttccaaatggcgattacaacgaagatcagacgacaaaagacatgagcgagtattagtgtccaataaactaggtgctggaaatccacatgcagcacacctatcaatttatgtttcagccttgcctccacatcaagaaattggaatgctttcactttcacctaccatgactgatgtatatttgttactgggagctagggcttattggctgctccgccgaggtcatgcaatggccctagtgggagctcgacgagatggacgacacactcacctacagaggggagctagggtgtgttgtgcatgcctgcgagctgtagagaagagggggcagtctggatctgaaccctcagcaaggtattacatccacccgctcccccacgccaacgtcctccagattttgcagctcctactagagaatggcattagagtaaatgaactaacaaggacagaggttgctctcgtcgtcccataagtgaagctcgagtcgtccactggtggcttatcttctctgcctggtgagagctggcactaccgtttggtgtcgtgaccttgctgatgcttgtt

SEQ ID NO: 41137 - DNA, 713 bp, Zea Mays
ctgctattgaatttttgcacggatggaatgagaattgggtcgccaaggacgagcaattctgaggtgttacatgaatatgccaattttcaaacttgaggctgcgacacaggaatgtatagtagataactgaatcacgactctcgaagctttttctcattggagcctactgttccctccgctatgactgaaggccccaccatacaatcagataaagcattagcgggcttgccacagtggccttggccgtagcagcagcacgccacgagcagcgacgccagagaagagggagttccaaatggcgattacaacgaagatcagacgacaaaagacatgagcgagggcttattggctgctccgccgaggtcatgcaatggccctagtgggagctcgacgagatggacgacacactcacctacagaggggagctagggtgtgttgtgcatgcctgcgagctgtagagaagagggggcagtctggatctgaaccctcagcaaggtattacatccacccgctcccccacgccaacgtcctccagattttgcagctcctactagagaatggcattagagtaaatgaactaacaaggacagaggttgctctcgtcgtcccataagtggtgcagaaaatggcacccaattactgccctcgaggtgttgttagacttaatgggtcactacgcgaacagtcagtgtagttctatgcatgcatctaca

SEQ ID NO: 41138 - DNA, 827 bp, Zea Mays
ctagatttggcccagcttgatacctgcaggatgccaatgctattataatctattgttggatgccataaatttaccattcatgtcttctgttttgtgcaacgataagattgattttaatgtatacggacaagatatttagatacaatcacacaattaaacttttagctctatctgtgggtcaagcttgcagctgtatgaagtttttttctgttgtattatgtctccatgactccatagagtgtcttttttcatgtttaataattacttaggttttattttaagaattcccacatcacacatttttattttgttttccctgttcctttttctcttcctttccattcaattaatgggatgtttgataccttacgattgcaccaacctgttcaattgtacttcagatatcatcttctttgattgtaatcttttgcatactcttgttgatggtgctaccatattcttgaaaccttccacattgtccatctgagcattcttctatctctggatttgtcccttaacaatcacttgctttgaggttccatttggatacacatgactagatccagtttaagattattgtatatcttttgttctagctatttctgttgtttttctttctatccatacattatcaatttgatgatcctgacgatgcccctgaggtgcatacgcatgatctcgcaacaggtgcagaaaatggcacccaattactgccctcgaggtgttgttagacttaatgggtcactacgcgaacagtcagtgtagttctatgcatgcatctacaataacagaaatgtgtcaagagagttgagaatgatgatactggt

SEQ ID NO: 41139 - DNA, 7691 bp, Zea Mays
gccagtcaagtcaaaccagcggccgcagcattaagctccatttgtgtctttcaaaatgaggcagactttgctggttgttccattacagtctacaacaacaacaaccaagtcattctcgtgaccaaaaattgcttcacctgctcccgtatgcatgatactcgggagattttccgggcagaagaggaaatcctgacaagtagtgcgttccttgctcacaggccctcgttgtgtcatgtaactgcaaatggctcgccaaactagcgttacagaagctgacctggagttcatgctaattgatgaaaatgcaaagccgaagcccctgccttattcacttctcgaaaagatcacaaatggtttctccggggcacatattattgggtatggtggatctgcagatgtttatgagggattcatcgggaatcacaaaatcgctgtgaagaggttgcgcataccatatcagcacgagaaggaattcagtcaagagattgaatgcctgatgaaggtgaagcacataaatgtcgttaggtttataggatattgttccgacacgcaagggcaggcggaaaagtatgaagataatcatgtcatggcagacagccaagaacggttaatttgttttgaatttctaccagcatgtcttgataaatacatcaaagatccatcatgttcacttgaatggagacagcgctatcaaataatcaacggagtttgtcagggcttacatcaacttcatgagcatgaaattcttcacttggatctgaatccgagaaatatacttctagacgatgacatggtcccaaagatttctgattttggcatctccaagtgcttgaaaaaaaaccaaggccacttttatactgaaactataagtggaacaccgatatatatgtcaccggaacggggcaaacatggtccaatcacaacgaagtctgatttgtttagtcttggtgtcacagttatcgagataatgacagggaacaaggagaacattgatcaagccactgttgaagatgtatttgctagctgcatcaaaattttcaatgataaatcattgacagctgcacaagtgcggcagataatggtatgtgctgagatagggattaagtgccgcaacagtgaaccagacaagagaccatcaaatacaaaggaaataatcgataagcttgaagaggaagcaaggacagaggaatctcaagagtctggcaagctacttaaggtcctaccaaccctactcctgtttgatttgcatcccgggaaattgatcccatgctcactgcagctaacaaacgacacggatgaacacatggcatataagcttagtataacagagagtgtggactggtcaaagtacttcacgaccaagctgccgctatatggcattgtgcaggcgcgatccacttacactgtcattctgacagtgttgttggagtgtgatgctccggtcattaacagatcttgttatatgaccctgcagagctgtacactggcatatgagtacatctggaagttcaataacacacttgagtttgaggattttcttgaggttaagaaaacagagaatgcggtgaaggaagtgaaactgaaagcatttttgtgtgaggaaggacgatcaatttctaagcaaacgaggccgcgcgtcaagctcttgtccatagtgaaaccacaaacacctctgttgtcattggatgcacacccgaccaagccctgggtcataactggtcatgcctttggacatgttcgcatttggaaccatgagacacagaagctactgtattcgtttaaactatctctgggaccagtttattctgtcaaatttattgcacggaagcaatggttcgtctccagctctgcagaaggcctcatacatgtctacagtatggaaacaaaaatgcagaaggtcaagagttacagagctcatgacggcgtcagcatatcgctggccgtgcatccaaccctaccatatgtgctgtcatggccttgttcgggcccccacgagaagaagctatggaactgggaaaagggatgggactgcacacaaacatttgagagggagtacgttgcaaggaattttgtatgtcaagttgcttttgacccaaaggagaccaacagatttgctagcgcttcgaactatagggttaaggtttggagcgttgatcttcccaaatgtaactataatctgcctggtttttttaacgaagtgaacttcctggaattcttcacacgtgatgatcaacagtatttgattattactgtctctcatgataagactgcaaaaatatgggacatgcggaacaagaaatatgtttatgatagtatggaacaaaatttgatgtctcccgtgtcttctgtcttctcacatcccaatctgccgatactacttacacgttcaattgatggcacttctcatttctggagtcccaaagatttcaggtttgaggcagtccttgactgtcgttatggaggacatgtatggggcattgcatgtttgatgggatcaaaaagaaggtttgtaattggacaagaaactgcattaacaatcctggatgttggtgaccaagaatgccaggacatgagacaagaaggcacaagttctgaggtgataaccccagggtcaagcgagcttttgcttgacgtccacccgctgacactccactttcccttccatgcccacaagttgatcccgtgcacgctgcacctaacaaataaaacagatgaacatgtggcttttaatcttagtatagaagacggaatggagtcttggcagcagatctttgtaaggatgcccctaagtggaattgtgccaccaaaatccacttacactcttgttgtcacaatgagggagctgacgtatctaccaacacaaaactttaatttgaccctgcagtctaatatatgcgaagataggtacatctattcatttatgagcctatcagaatctgatcagttttttgaggatttaaaggagataaggaatgtggcgccgcctcaggtgaaactgaaagcagttttttctctgcaaggacagacaacgtttgagaacggatcgtcaactggagaaaacttagtccaacctttaattaacatatggactttgttcaaccctgccaaggatttttctagtatgctgatctctctagatgctgatccaacagagtcatgggttataacaggtcaccgccacggtgatgttgctttatggaagcacggcatgcagaaaatgatgtctttgattaacatatcgggagaagcaagccttcctcggaatagcttgaacacccaacatgatgtttattccgttaaattcattgcaaggaagcggtggtttgtagccgggacatgtgatggtttcatccatgtgtataagtatgaaacaagaataatggactgcataaagagattcagagcatactcatctgggatcatagactggggtatttgctcgtccagagcgcttatcgttcatccaacccagccatatttgctctctacctgtgaagaaatgaagctttgggactgggacgatgattggaagtgcatacaaaaatttggtagggaacacactgattccatacttcaagtggcatttagcccaaatgacagttttgccagtgtttcaagtgatcacacaataaagctttggtgcctgaaatctcccacatcagagtgtactctgcacggccattcggacaaagtgaattgcttggatttcgtcacacatgatggtcagcaatatttgattagtggatctcaagactgtactgccaaggcatgggccttgaaggaaaaggaatgcgtccagacaatggatgttttcatgtcgccagttgtttctgtcatttcccttccggacactccatatataactacaggttcagcagatggcactattcatttgtggagttctgctaatttcaggcttgagagaatacttagccttggtttatgtggccctgtttgggatctacgtttgattgggccaacgaggatcgtgattcaaccgaacaactatgaaatatcagtcatcatggatattgacacaggttctgaggctagctcgtcagctccctcaaatgagctgatccaggttgaccccaaagagttgcgcttcccggttgcccaagaggtgtcaagcacactagagatccgtaacgttacagatcaccatgtggcattctgtatgtggtcattgaaccatacagcaaattacattccagtgccgaacatagaagttctatcaccacagtcaatgcggcaagttgttataacaagaattgcacgacgagagcctgtgccagcagaccccgtcgacgacatagtctatgtgaagggcactaccgtggttcagggtacaacgagcgcagatgtcacttatgacatgttcgatggaacaaggacaggccaaattctgcaaccggccatggagctgaatgttgttctcgtagctgactccgagatcatacacaaagcaaggttaccatgggccttagatgtgcatccaacaatgccatggataatgatggctcaaggagattaccaaattcgtatatggaactataagacacggatagagaaacctattgctatcaaggggagagaagttacttcggctaaatttataatgcacaagcaatggattctggcgggctgttctagtggacttgtctatgtgtaccgttatgaaccagaaaagaaaaaatcagtagagaaaatccgagttctacaaggacactcaaatgctatcaattccttggctgttcattcaactaagccatgcgtgctgtcagcatccaaagatggcaaaattttgatctgggactatgaaaatgagtgggagttaatgaaaacatttgatgtcaaaagtcctgtgcagcatgttgcgtttagcccaaaggactccaatatgttcgccagtgcccaggacaaaacagtaaagatatgggattggcattctggtaactgcaagtctacattgtctgggcattcagatttggtgttatgtctggattacttcagtcagggtgatcagctatacttgatcactggttcacgagacaaaactgccaagatatgggattgcaagacgaggagttgtgttcggacattggaagggcatacagatgttgttaatgttgcatgttgccatccagatcttctaatactaattacaggttcattgaacgggtcagttcgtctgtgggatttgaatcgctcaactacgttccgatatgagctcatatttgaccttggagaagtatatgctatagcaagtttgaagggtacaaggattgtgattggacacgaaataggattagcactggtagacatagacctagagggcaagaaggatggatatgtgaagagcaatgtcgcaattatggattcaaaaaatgacacagatcaaaatatgaaagagttaagcccaacagcttcctcaagtgaggtgcaaaaggtgtcaagcattatagcattggagactctatacaaaatgaagtcatcagaatcgtctatagatgtccatccaacagagacatggatggtcattacatccgacaaatatgttcatatatgggactaccatacaagggaagtgaaacagatgatggatactaagggagcgaaagtcagattggctaaatttatagcccgcaagcaatgggttattgcgggtgctactagtggattcatcttcgtctatgattatgactcaaaaaaggaaataatacacgttttgtgtaaccacacagaacccatcaagtctttggctattcacggaactgagccccttgtgctgtcagcatccgtggatggcaaaattttgctgtgggactatgcaaatgactggcatttgattaaaacatttgatgcgagaagtcaacgtttggtgcaagtcgcgtttaatccaaaggacaccaatatgtttgctagtgctcagggcaaaacagtaaagatttgggatcgccagcatgatgaatgccaatacaaattagatgggcattcacatcagatcgagtgttttgattactttagtggtggtgattttgataagctatatatagtcaccggctctcaagataaaactgccaagatctgggactgcgagaatgcgggctgtgtccagacactggaaggacatgcaggtcccgttagagctgtctgttaccatcagaatctctcgttattaattacagggtgctctgacggatcaattcatctatggaactccactaccttcaggcttgagcataaactgaactttgctgacttcggattactgagttctgtagcttgtttgaaaggatcgaaaaggattgcaatcagaagcagggaaggattagcacttgtagacatagacatagaggacaagaaggatagcgatgtggagagcatcacgactactgcttccatgaacgacacaggtccaattacagaagagaacggagtggcagcagaccatatctctgatgaccacctggcgcagggcgtagtatatgtacatacagagattataggcaaagtcaattcagcatgcaccatagacgtccatccgacaaagccatggatggtcatcactcaagctaacaagtttgttcatgtttgggactaccatacaaaggtagtggaatggacgattcagattaagggagcgaaagttagttcagctaaatttatagccagccaggattggattgtggcgggtactacccgtggattcctccacgtgtacgattgcgaatcgaggaaggaaatacgccgtctttgtgaacacccgaaatctatcacgtcattggctgttgacgatgatgcccttgagctggtgctgtcagcgtccatcgatggcaagattttgatctggagctactggcactactatcacgcacgtagacgtagtacctggcatttggaaaaaacatttgacgcgggaagccagtgtctgaagcaagtcgcgtttattgctccaagtgtccatcgcagcagcagcactatcatcgctactgctcgagacggaacagtaaagatttgggatcccgatcgttctgacggatgccgtgagttcacattggctgcggattcaggtcagattgttgaatgtttcgattggtttagtcgtggtactgatatatacttggtcaccggttctcgagacaacactgccaagatctgggacatagaggatgggagttgtgtccgaacactggaaggacacgcagatcatgttaccgttgtctgttaccatccggatctttcaatgctcattacaggttcaagggacggctcgattcgtctgtggaactccactaccttcaggtttgagcatgagctgaactttgacctcgggtctctgagttctttagcttgtatcaagggatcaacaaggattgcaatcggatatgaaagaggtctagtactggcagacatttgcactcaggaacatagagcatgatctataaagcggcataataccttgagagcgacagaataaaatctaaacattgataaagcggcaaaaatccctggcaaacatttgctgatgcgatgggattgcatccaaacatttttcttggtaagctaatagactgcaataagtttttccatggacttgggaggtgtcgatctgcggatatgcttttgtatggtttaaacatatcatcggatagaaatttatactactatattaaaaatttaatatggac

SEQ ID NO: 41140 - DNA, 7651 bp, Zea Mays
ccatttgtgtctttcaaaatgaggcagactttgctggttgttccattacagtctacaacaacaacaaccaagtcattctcgtgaccaaaaattgcttcacctgctcccgtatgcatgatactcgggagattttccgggcagaagaggaaatcctgacaagtagtgcgttccttgctcacaggccctcgttgtgtcatgtaactgcaaatggctcgccaaactagcgttacagaagctgacctggagttcatgctaattgatgaaaatgcaaagccgaagcccctgccttattcacttctcgaaaagatcacaaatggtttctccggggcacatattattgggtatggtggatctgcagatgtttatgagggattcatcgggaatcacaaaatcgctgtgaagaggttgcgcataccatatcagcacgagaaggaattcagtcaagagattgaatgcctgatgaaggtgaagcacataaatgtcgttaggtttataggatattgttccgacacgcaagggcaggcggaaaagtatgaagataatcatgtcatggcagacagccaagaacggttaatttgttttgaatttctaccagcatgtcttgataaatacatcaaagatccatcatgttcacttgaatggagacagcgctatcaaataatcaacggagtttgtcagggcttacatcaacttcatgagcatgaaattcttcacttggatctgaatccgagaaatatacttctagacgatgacatggtcccaaagatttctgattttggcatctccaagtgcttgaaaaaaaaccaaggccacttttatactgaaactataagtggaacaccgatatatatgtcaccggaacggggcaaacatggtccaatcacaacgaagtctgatttgtttagtcttggtgtcacagttatcgagataatgacagggaacaaggagaacattgatcaagccactgttgaagatgtatttgctagctgcatcaaaattttcaatgataaatcattgacagctgcacaagtgcggcagataatggtatgtgctgagatagggattaagtgccgcaacagtgaaccagacaagagaccatcaaatacaaaggaaataatcgataagcttgaagaggaagcaaggacagaggaatctcaagagtctggcaagctacttaaggtcctaccaaccctactcctgtttgatttgcatcccgggaaattgatcccatgctcactgcagctaacaaacgacacggatgaacacatggcatataagcttagtataacagagagtgtggactggtcaaagtacttcacgaccaagctgccgctatatggcattgtgcaggcgcgatccacttacactgtcattctgacagtgttgttggagtgtgatgctccggtcattaacagatcttgttatatgaccctgcagagctgtacactggcatatgagtacatctggaagttcaataacacacttgagtttgaggattttcttgaggttaagaaaacagagaatgcggtgaaggaagtgaaactgaaagcatttttgtgtgaggaaggacgatcaatttctaagcaaacgaggccgcgcgtcaagctcttgtccatagtgaaaccacaaacacctctgttgtcattggatgcacacccgaccaagccctgggtcataactggtcatgcctttggacatgttcgcatttggaaccatgagacacagaagctactgtattcgtttaaactatctctgggaccagtttattctgtcaaatttattgcacggaagcaatggttcgtctccagctctgcagaaggcctcatacatgtctacagtatggaaacaaaaatgcagaaggtcaagagttacagagctcatgacggcgtcagcatatcgctggccgtgcatccaaccctaccatatgtgctgtcatggccttgttcgggcccccacgagaagaagctatggaactgggaaaagggatgggactgcacacaaacatttgagagggagtacgttgcaaggaattttgtatgtcaagttgcttttgacccaaaggagaccaacagatttgctagcgcttcgaactatagggttaaggtttggagcgttgatcttcccaaatgtaactataatctgcctggtttttttaacgaagtgaacttcctggaattcttcacacgtgatgatcaacagtatttgattattactgtctctcatgataagactgcaaaaatatgggacatgcggaacaagaaatatgtttatgatagtatggaacaaaatttgatgtctcccgtgtcttctgtcttctcacatcccaatctgccgatactacttacacgttcaattgatggcacttctcatttctggagtcccaaagatttcaggtttgaggcagtccttgactgtcgttatggaggacatgtatggggcattgcatgtttgatgggatcaaaaagaaggtttgtaattggacaagaaactgcattaacaatcctggatgttggtgaccaagaatgccaggacatgagacaagaaggcacaagttctgaggtgataaccccagggtcaagcgagcttttgcttgacgtccacccgctgacactccactttcccttccatgcccacaagttgatcccgtgcacgctgcacctaacaaataaaacagatgaacatgtggcttttaatcttagtatagaagacggaatggagtcttggcagcagatctttgtaaggatgcccctaagtggaattgtgccaccaaaatccacttacactcttgttgtcacaatgagggagctgacgtatctaccaacacaaaactttaatttgaccctgcagtctaatatatgcgaagataggtacatctattcatttatgagcctatcagaatctgatcagttttttgaggatttaaaggagataaggaatgtggcgccgcctcaggtgaaactgaaagcagttttttctctgcaaggacagacaacgtttgagaacggatcgtcaactggagaaaacttagtccaacctttaattaacatatggactttgttcaaccctgccaaggatttttctagtatgctgatctctctagatgctgatccaacagagtcatgggttataacaggtcaccgccacggtgatgttgctttatggaagcacggcatgcagaaaatgatgtctttgattaacatatcgggagaagcaagccttcctcggaatagcttgaacacccaacatgatgtttattccgttaaattcattgcaaggaagcggtggtttgtagccgggacatgtgatggtttcatccatgtgtataagtatgaaacaagaataatggactgcataaagagattcagagcatactcatctgggatcatagactggggtatttgctcgtccagagcgcttatcgttcatccaacccagccatatttgctctctacctgtgaagaaatgaagctttgggactgggacgatgattggaagtgcatacaaaaatttggtagggaacacactgattccatacttcaagtggcatttagcccaaatgacagttttgccagtgtttcaagtgatcacacaataaagctttggtgcctgaaatctcccacatcagagtgtactctgcacggccattcggacaaagtgaattgcttggatttcgtcacacatgatggtcagcaatatttgattagtggatctcaagactgtactgccaaggcatgggccttgaaggaaaaggaatgcgtccagacaatggatgttttcatgtcgccagttgtttctgtcatttcccttccggacactccatatataactacaggttcagcagatggcactattcatttgtggagttctgctaatttcaggcttgagagaatacttagccttggtttatgtggccctgtttgggatctacgtttgattgggccaacgaggctagctcgtcagctccctcaaatgagctgatccaggttgaccccaaagagttgcgcttcccggttgcccaagaggtgtcaagcacactagagatccgtaacgttacagatcaccatgtggcattctgtatgtggtcattgaaccatacagcaaattacattccagtgccgaacatagaagttctatcaccacagtcaatgcggcaagttgttataacaagaattgcacgacgagagcctgtgccagcagaccccgtcgacgacatagtctatgtgaagggcactaccgtggttcagggtacaacgagcgcagatgtcacttatgacatgttcgatggaacaaggacaggccaaattctgcaaccggccatggagctgaatgttgttctcgtagctgactccgagagatcatacacaaagcaaggttaccatgggccttagatgtgcatccaacaatgccatggataatgatggctcaaggagattaccaaattcgtatatggaactataagacacgggtgaaagtatgcatttgtattcgaggactaatcaattaatgtgtgctcatatcctgcagatagagaaacctattgctatcaaggggagagaagttacttcggctaaatttataatgcacaagcaatggattctggcgggctgttctagtggacttgtctatgtgtaccgttatgaaccagaaaagaaaaaatcagtagagaaaatccgagttctacaaggacactcaaatgctatcaattccttggctgttcattcaactaagccatgcgtgctgtcagcatccaaagatggcaaaattttgatctgggactatgaaaatgagtgggagttaatgaaaacatttgatgtcaaaagtcctgtgcagcatgttgcgtttagcccaaaggactccaatatgttcgccagtgcccaggacaaaacagtaaagatatgggattggcattctggtaactgcaagtctacattgtctgggcattcagatttggtgttatgtctggattacttcagtcagggtgatcagctatacttgatcactggttcacgagacaaaactgccaagatatgggattgcaagacgaggagttgtgttcggacattggaagggcatacagatgttgttaatgttgcatgttgccatccagatcttctaatactaattacaggttcattgaacgggtcagttcgtctgtgggatttgaatcgctcaactacgttccgatatgagctcatatttgaccttggagaagtatatgctatagcaagtttgaagggtacaaggattgtgattggacacgaaataggattagcactggtagacatagacctagagggcaagaaggatggatatgtgaagagcaatgtcgcaattatggattcaaaaaatgacacagatcaaaatatgaaagagttaagcccaacagcttcctcaagtgaggtgcaaaaggtgtcaagcattatagcattggagactctatacaaaatgaagtcatcagaatcgtctatagatgtccatccaacagagacatggatggtcattacatccgacaaatatgttcatatatgggactaccatacaagggaagtgaaacagatgatggatactaagggagcgaaagtcagattggctaaatttatagcccgcaagcaatgggttattgcgggtgctactagtggattcatcttcgtctatgattatgactcaaaaaaggaaataatacacgttttgtgtaaccacacagaacccatcaagtctttggctattcacggaactgagccccttgtgctgtcagcatccgtggatggcaaaattttgctgtgggactatgcaaatgactggcatttgattaaaacatttgatgcgagaagtcaacgtttggtgcaagtcgcgtttaatccaaaggacaccaatatgtttgctagtgctcagggcaaaacagtaaagatttgggatcgccagcatgatgaatgccaatacaaattagatgggcattcacatcagatcgagtgttttgattactttagtggtggtgattttgataagctatatatagtcaccggctctcaagataaaactgccaagatctgggactgcgagaatgcgggctgtgtccagacactggaaggacatgcaggtcccgttagagctgtctgttaccatcagaatctctcgttattaattacagggtgctctgacggatcaattcatctatggaactccactaccttcaggcttgagcataaactgaactttgctgacttcggattactgagttctgtagcttgtttgaaaggatcgaaaaggattgcaatcagaagcagggaaggattagcacttgtagacatagacatagaggacaagaaggatagcgatgtggagagcatcacgactactgcttccatgaacgacacaggtccaattacagaagagaacggagtggcagcagaccatatctctgatgaccacctggcgcagggcgtagtatatgtacatacagagattataggcaaagtcaattcagcatgcaccatagacgtccatccgacaaagccatggatggtcatcactcaagctaacaagtttgttcatgtttgggactaccatacaaaggtagtggaatggacgattcagattaagggagcgaaagttagttcagctaaatttatagccagccaggattggattgtggcgggtactacccgtggattcctccacgtgtacgattgcgaatcgaggaaggaaatacgccgtctttgtgaacacccgaaatctatcacgtcattggctgttgacgatgatgcccttgagctggtgctgtcagcgtccatcgatggcaagattttgatctggagctactggcactactatcacgcacgtagacgtagtacctggcatttggaaaaaacatttgacgcgggaagccagtgtctgaagcaagtcgcgtttattgctccaagtgtccatcgcagcagcagcactatcatcgctactgctcgagacggaacagtaaagatttgggatcccgatcgttctgacggatgccgtgagttcacattggctgcggattcaggtcagattgttgaatgtttcgattggtttagtcgtggtactgatatatacttggtcaccggttctcgagacaacactgccaagatctgggacatagaggatgggagttgtgtccgaacactggaaggacacgcagatcatgttaccgttgtctgttaccatccggatctttcaatgctcattacaggttcaagggacggctcgattcgtctgtggaactccactaccttcaggtttgagcatgagctgaactttgacctcgggtctctgagttctttagcttgtatcaagggatcaacaaggattgcaatcggatatgaaagaggtctagtactggcagacatttgcactcaggaacatagagcatgatctataaagcggcataataccttgagagcgacagaataaaatctaaacattgataaagcggcaaaaatccctggcaaacatttgctgatgcgatgggattgcatccaaacatttttcttggtaagctaatagactgcaataagtttttccatggacttgggaggtgtcgatctgcggatatgcttttgtatggtttaaacatatcatcggatagaaatttatactactatattaaaaatttaatatggac

SEQ ID NO: 41141 - DNA, 7873 bp, Zea Mays
ggcagactttgctggttgttccattacagtctacaacaacaacaaccaagtcattctcgtgaccaaaaattgcttcacctgctcccgtatgcatgatactcgggagattttccgggcagaagaggaaatcctgacaagtagtgcgttccttgctcacagctcactggtcacgcttgcttcctcctccgcgcgctccccatcgaccgcgcttgctcgtcctccgcctgccctggccctggccacgcaaccctagccatggcgagccctggtcctggccatagccgcgtggccgccgaatcggcgaggtcgcgctcgcccggtgaggctgcgggagctccaggccgcctgcgcccgcactggcctcgtcctcgtgttcgtgttttttttcccacgcaaattcgtcatatgaggaggaaaggatgaaagggggcaaattaatccatttcaaccaagttgtccttcaggccctcgttgtgtcatgtaactgcaaatggctcgccaaactagcgttacagaagctgacctggagttcatgctaattgatgaaaatgcaaagccgaagcccctgccttattcacttctcgaaaagatcacaaatggtttctccggggcacatattattgggtatggtggatctgcagatgtttatgagggattcatcgggaatcacaaaatcgctgtgaagaggttgcgcataccatatcagcacgagaaggaattcagtcaagagattgaatgcctgatgaaggtgaagcacataaatgtcgttaggtttataggatattgttccgacacgcaagggcaggcggaaaagtatgaagataatcatgtcatggcagacagccaagaacggttaatttgttttgaatttctaccagcatgtcttgataaatacatcaaagatccatcatgttcacttgaatggagacagcgctatcaaataatcaacggagtttgtcagggcttacatcaacttcatgagcatgaaattcttcacttggatctgaatccgagaaatatacttctagacgatgacatggtcccaaagatttctgattttggcatctccaagtgcttgaaaaaaaaccaaggccacttttatactgaaactataagtggaacaccgatatatatgtcaccggaacggggcaaacatggtccaatcacaacgaagtctgatttgtttagtcttggtgtcacagttatcgagataatgacagggaacaaggagaacattgatcaagccactgttgaagatgtatttgctagctgcatcaaaattttcaatgataaatcattgacagctgcacaagtgcggcagataatggtatgtgctgagatagggattaagtgccgcaacagtgaaccagacaagagaccatcaaatacaaaggaaataatcgataagcttgaagaggaagcaaggacagaggaatctcaagagtctggcaagctacttaaggtcctaccaaccctactcctgtttgatttgcatcccgggaaattgatcccatgctcactgcagctaacaaacgacacggatgaacacatggcatataagcttagtataacagagagtgtggactggtcaaagtacttcacgaccaagctgccgctatatggcattgtgcaggcgcgatccacttacactgtcattctgacagtgttgttggagtgtgatgctccggtcattaacagatcttgttatatgaccctgcagagctgtacactggcatatgagtacatctggaagttcaataacacacttgagtttgaggattttcttgaggttaagaaaacagagaatgcggtgaaggaagtgaaactgaaagcatttttgtgtgaggaaggacgatcaatttctaagcaaacgaggccgcgcgtcaagctcttgtccatagtgaaaccacaaacacctctgttgtcattggatgcacacccgaccaagccctgggtcataactggtcatgcctttggacatgttcgcatttggaaccatgagacacagaagctactgtattcgtttaaactatctctgggaccagtttattctgtcaaatttattgcacggaagcaatggttcgtctccagctctgcagaaggcctcatacatgtctacagtatggaaacaaaaatgcagaaggtcaagagttacagagctcatgacggcgtcagcatatcgctggccgtgcatccaaccctaccatatgtgctgtcatggccttgttcgggcccccacgagaagaagctatggaactgggaaaagggatgggactgcacacaaacatttgagagggagtacgttgcaaggaattttgtatgtcaagttgcttttgacccaaaggagaccaacagatttgctagcgcttcgaactatagggttaaggtttggagcgttgatcttcccaaatgtaactataatctgcctggtttttttaacgaagtgaacttcctggaattcttcacacgtgatgatcaacagtatttgattattactgtctctcatgataagactgcaaaaatatgggacatgcggaacaagaaatatgtttatgatagtatggaacaaaatttgatgtctcccgtgtcttctgtcttctcacatcccaatctgccgatactacttacacgttcaattgatggcacttctcatttctggagtcccaaagatttcaggtttgaggcagtccttgactgtcgttatggaggacatgtatggggcattgcatgtttgatgggatcaaaaagaaggtttgtaattggacaagaaactgcattaacaatcctggatgttggtgaccaagaatgccaggacatgagacaagaaggcacaagttctgaggtgataaccccagggtcaagcgagcttttgcttgacgtccacccgctgacactccactttcccttccatgcccacaagttgatcccgtgcacgctgcacctaacaaataaaacagatgaacatgtggcttttaatcttagtatagaagacggaatggagtcttggcagcagatctttgtaaggatgcccctaagtggaattgtgccaccaaaatccacttacactcttgttgtcacaatgagggagctgacgtatctaccaacacaaaactttaatttgaccctgcagtctaatatatgcgaagataggtacatctattcatttatgagcctatcagaatctgatcagttttttgaggatttaaaggagataaggaatgtggcgccgcctcaggtgaaactgaaagcagttttttctctgcaaggacagacaacgtttgagaacggatcgtcaactggagaaaacttagtccaacctttaattaacatatggactttgttcaaccctgccaaggatttttctagtatgctgatctctctagatgctgatccaacagagtcatgggttataacaggtcaccgccacggtgatgttgctttatggaagcacggcatgcagaaaatgatgtctttgattaacatatcgggagaagcaagccttcctcggaatagcttgaacacccaacatgatgtttattccgttaaattcattgcaaggaagcggtggtttgtagccgggacatgtgatggtttcatccatgtgtataagtatgaaacaagaataatggactgcataaagagattcagagcatactcatctgggatcatagactggggtatttgctcgtccagagcgcttatcgttcatccaacccagccatatttgctctctacctgtgaagaaatgaagctttgggactgggacgatgattggaagtgcatacaaaaatttggtagggaacacactgattccatacttcaagtggcatttagcccaaatgacagttttgccagtgtttcaagtgatcacacaataaagctttggtgcctgaaatctcccacatcagagtgtactctgcacggccattcggacaaagtgaattgcttggatttcgtcacacatgatggtcagcaatatttgattagtggatctcaagactgtactgccaaggcatgggccttgaaggaaaaggaatgcgtccagacaatggatgttttcatgtcgccagttgtttctgtcatttcccttccggacactccatatataactacaggttcagcagatggcactattcatttgtggagttctgctaatttcaggcttgagagaatacttagccttggtttatgtggccctgtttgggatctacgtttgattgggccaacgaggctagctcgtcagctccctcaaatgagctgatccaggttgaccccaaagagttgcgcttcccggttgcccaagaggtgtcaagcacactagagatccgtaacgttacagatcaccatgtggcattctgtatgtggtcattgaaccatacagcaaattacattccagtgccgaacatagaagttctatcaccacagtcaatgcggcaagttgttataacaagaattgcacgacgagagcctgtgccagcagaccccgtcgacgacatagtctatgtgaagggcactaccgtggttcagggtacaacgagcgcagatgtcacttatgacatgttcgatggaacaaggacaggccaaattctgcaaccggccatggagctgaatgttgttctcgtagctgactccgagatcatacacaaagcaaggttaccatgggccttagatgtgcatccaacaatgccatggataatgatggctcaaggagattaccaaattcgtatatggaactataagacacggatagagaaacctattgctatcaaggggagagaagttacttcggctaaatttataatgcacaagcaatggattctggcgggctgttctagtggacttgtctatgtgtaccgttatgaaccagaaaagaaaaaatcagtagagaaaatccgagttctacaaggacactcaaatgctatcaattccttggctgttcattcaactaagccatgcgtgctgtcagcatccaaagatggcaaaattttgatctgggactatgaaaatgagtgggagttaatgaaaacatttgatgtcaaaagtcctgtgcagcatgttgcgtttagcccaaaggactccaatatgttcgccagtgcccaggacaaaacagtaaagatatgggattggcattctggtaactgcaagtctacattgtctgggcattcagatttggtgttatgtctggattacttcagtcagggtgatcagctatacttgatcactggttcacgagacaaaactgccaagatatgggattgcaagacgaggagttgtgttcggacattggaagggcatacagatgttgttaatgttgcatgttgccatccagatcttctaatactaattacaggttcattgaacgggtcagttcgtctgtgggatttgaatcgctcaactacgttccgatatgagctcatatttgaccttggagaagtatatgctatagcaagtttgaagggtacaaggattgtgattggacacgaaataggattagcactggtagacatagacctagagggcaagaaggatggatatgtgaagagcaatgtcgcaattatggattcaaaaaatgacacagatcaaaatatgaaagagttaagcccaacagcttcctcaagtgaggtgcaaaaggtgtcaagcattatagcattggagactctatacaaaatgaagtcatcagaatcgtctatagatgtccatccaacagagacatggatggtcattacatccgacaaatatgttcatatatgggactaccatacaagggaagtgaaacagatgatggatactaagggagcgaaagtcagattggctaaatttatagcccgcaagcaatgggttattgcgggtgctactagtggattcatcttcgtctatgattatgactcaaaaaaggaaataatacacgttttgtgtaaccacacagaacccatcaagtctttggctattcacggaactgagccccttgtgctgtcagcatccgtggatggcaaaattttgctgtgggactatgcaaatgactggcatttgattaaaacatttgatgcgagaagtcaacgtttggtgcaagtcgcgtttaatccaaaggacaccaatatgtttgctagtgctcagggcaaaacagtaaagatttgggatcgccagcatgatgaatgccaatacaaattagatgggcattcacatcagatcgagtgttttgattactttagtggtggtgattttgataagctatatatagtcaccggctctcaagataaaactgccaagatctgggactgcgagaatgcgggctgtgtccagacactggaaggacatgcaggtcccgttagagctgtctgttaccatcagaatctctcgttattaattacagggtgctctgacggatcaattcatctatggaactccactaccttcaggcttgagcataaactgaactttgctgacttcggattactgagttctgtagcttgtttgaaaggatcgaaaaggattgcaatcagaagcagggaaggattagcacttgtagacatagacatagaggacaagaaggatagcgatgtggagagcatcacgactactgcttccatgaacgacacaggtccaattacagaagagaacggagtggcagcagaccatatctctgatgaccacctggcgcagggcgtagtatatgtacatacagagattataggcaaagtcaattcagcatgcaccatagacgtccatccgacaaagccatggatggtcatcactcaagctaacaagtttgttcatgtttgggactaccatacaaaggtagtggaatggacgattcagattaagggagcgaaagttagttcagctaaatttatagccagccaggattggattgtggcgggtactacccgtggattcctccacgtgtacgattgcgaatcgaggaaggaaatacgccgtctttgtgaacacccgaaatctatcacgtcattggctgttgacgatgatgcccttgagctggtgctgtcagcgtccatcgatggcaagattttgatctggagctactggcactactatcacgcacgtagacgtagtacctggcatttggaaaaaacatttgacgcgggaagccagtgtctgaagcaagtcgcgtttattgctccaagtgtccatcgcagcagcagcactatcatcgctactgctcgagacggaacagtaaagatttgggatcccgatcgttctgacggatgccgtgagttcacattggctgcggattcaggtcagattgttgaatgtttcgattggtttagtcgtggtactgatatatacttggtcaccggttctcgagacaacactgccaagatctgggacatagaggatgggagttgtgtccgaacactggaaggacacgcagatcatgttaccgttgtctgttaccatccggatctttcaatgctcattacaggttcaagggacggctcgattcgtctgtggaactccactaccttcaggtttgagcatgagctgaactttgacctcgggtctctgagttctttagcttgtatcaagggatcaacaaggattgcaatcggatatgaaagaggtctagtactggcagacatttgcactcaggaacatagagcatgatctataaagcggcataataccttgagagcgacagaataaaatctaaacattgataaagcggcaaaaatccctggcaaacatttgctgatgcgatgggattgcatccaaacatttttcttggtaagctaatagactgcaataagtttttccatggacttgggaggtgtcgatctgcggatatgcttttgtatggtttaaacatatcatcggatagaaatttatactactatattaaaaatttaatatggac

SEQ ID NO: 41142 - DNA, 7719 bp, Zea Mays
ctttgctggttgttccattacagtctacaacaacaacaaccaagtcattctcgtgaccaaaaattgcttcacctgctcccgtatgcatgatactcgggagattttccgggcagaagaggaaatcctgacaagtagtgcgttccttgctcacaggccctcgttgtgtcatgtaactgcaaatggctcgccaaactagcgttacagaagctgacctggagttcatgctaattgatgaaaatgcaaagccgaagcccctgccttattcacttctcgaaaagatcacaaatggtttctccggggcacatattattgggtatggtggatctgcagatgtttatgagggattcatcgggaatcacaaaatcgctgtgaagaggttgcgcataccatatcagcacgagaaggaattcagtcaagagattgaatgcctgatgaaggtgaagcacataaatgtcgttaggtttataggatattgttccgacacgcaagggcaggcggaaaagtatgaagataatcatgtcatggcagacagccaagaacggttaatttgttttgaatttctaccagcatgtcttgataaatacatcaaagatccatcatgttcacttgaatggagacagcgctatcaaataatcaacggagtttgtcagggcttacatcaacttcatgagcatgaaattcttcacttggatctgaatccgagaaatatacttctagacgatgacatggtcccaaagatttctgattttggcatctccaagtgcttgaaaaaaaaccaaggccacttttatactgaaactataagtggaacaccgatatatatgtcaccggaacggggcaaacatggtccaatcacaacgaagtctgatttgtttagtcttggtgtcacagttatcgagataatgacagggaacaaggagaacattgatcaagccactgttgaagatgtatttgctagctgcatcaaaattttcaatgataaatcattgacagctgcacaagtgcggcagataatggtatgtgctgagatagggattaagtgccgcaacagtgaaccagacaagagaccatcaaatacaaaggaaataatcgataagcttgaagaggaagcaaggacagaggaatctcaagagtctggcaagctacttaaggtcctaccaaccctactcctgtttgatttgcatcccgggaaattgatcccatgctcactgcagctaacaaacgacacggatgaacacatggcatataagcttagtataacagagagtgtggactggtcaaagtacttcacgaccaagctgccgctatatggcattgtgcaggcgcgatccacttacactgtcattctgacagtgttgttggagtgtgatgctccgagctgtacactggcatatgagtacatctggaagttcaataacacacttgagtttgaggattttcttgaggttaagaaaacagagaatgcggtgaaggaagtgaaactgaaagcatttttgtgtgaggaaggacgatcaatttctaagcaaacgaggccgcgcgtcaagctcttgtccatagtgaaaccacaaacacctctgttgtcattggatgcacacccgaccaagccctgggtcataactggtcatgcctttggacatgttcgcatttggaaccatgagacacagaagctactgtattcgtttaaactatctctgggaccagtttattctgtcaaatttattgcacggaagcaatggttcgtctccagctctgcagaaggcctcatacatgtctacagtatggaaacaaaaatgcagaaggtcaagagttacagagctcatgacggcgtcagcatatcgctggccgtgcatccaaccctaccatatgtgctgtcatggccttgttcgggcccccacgagaagaagctatggaactgggaaaagggatgggactgcacacaaacatttgagagggagtacgttgcaaggaattttgtatgtcaagttgcttttgacccaaaggagaccaacagatttgctagcgcttcgaactatagggttaaggtttggagcgttgatcttcccaaatgtaactataatctgcctggtttttttaacgaagtgaacttcctggaattcttcacacgtgatgatcaacagtatttgattattactgtctctcatgataagactgcaaaaatatgggacatgcggaacaagaaatatgtttatgatagtatggaacaaaatttgatgtctcccgtgtcttctgtcttctcacatcccaatctgccgatactacttacacgttcaattgatggcacttctcatttctggagtcccaaagatttcagataaatagaagattgaagcgaaataggccgtaaacgtactgcattttggcttgttatgtggaaaccaaaaggtttgaggcagtccttgactgtcgttatggaggacatgtatggggcattgcatgtttgatgggatcaaaaagaaggtttgtaattggacaagaaactgcattaacaatcctggatgttggtgaccaagaatgccaggacatgagacaagaaggcacaagttctgaggtgataaccccagggtcaagcgagcttttgcttgacgtccacccgctgacactccactttcccttccatgcccacaagttgatcccgtgcacgctgcacctaacaaataaaacagatgaacatgtggcttttaatcttagtatagaagacggaatggagtcttggcagcagatctttgtaaggatgcccctaagtggaattgtgccaccaaaatccacttacactcttgttgtcacaatgagggagctgacgtatctaccaacacaaaactttaatttgaccctgcagtctaatatatgcgaagataggtacatctattcatttatgagcctatcagaatctgatcagttttttgaggatttaaaggagataaggaatgtggcgccgcctcaggtgaaactgaaagcagttttttctctgcaaggacagacaacgtttgagaacggatcgtcaactggagaaaacttagtccaacctttaattaacatatggactttgttcaaccctgccaaggatttttctagtatgctgatctctctagatgctgatccaacagagtcatgggttataacaggtcaccgccacggtgatgttgctttatggaagcacggcatgcagaaaatgatgtctttgattaacatatcgggagaagcaagccttcctcggaatagcttgaacacccaacatgatgtttattccgttaaattcattgcaaggaagcggtggtttgtagccgggacatgtgatggtttcatccatgtgtataagtatgaaacaagaataatggactgcataaagagattcagagcatactcatctgggatcatagactggggtatttgctcgtccagagcgcttatcgttcatccaacccagccatatttgctctctacctgtgaagaaatgaagctttgggactgggacgatgattggaagtgcatacaaaaatttggtagggaacacactgattccatacttcaagtggcatttagcccaaatgacagttttgccagtgtttcaagtgatcacacaataaaggtggtttttaatggggaacctccttccttagcaaggctgcagagaagcttcttggatgaattagtgtgttgggttatggttggtgccaaaatctttggtgcctgaaatctcccacatcagagtgtactctgcacggccattcggacaaagtgaattgcttggatttcgtcacacatgatggtcagcaatatttgattagtggatctcaagactgtactgccaaggcatgggccttgaaggaaaaggaatgcgtccagacaatggatgttttcatgtcgccagttgtttctgtcatttcccttccggacactccatatataactacaggttcagcagatggcactattcatttgtggagttctgctaatttcaggcttgagagaatacttagccttggtttatgtggccctgtttgggatctacgtttgattgggccaacgaggatcgtgattcaaccgaacaactatgaaatatcagtcatcatggatattgacacaggttctgaggctagctcgtcagctccctcaaatgagctgatccaggttgaccccaaagagttgcgcttcccggttgcccaagaggtgtcaagcacactagagatccgtaacgttacagatcaccatgtggcattctgtatgtggtcattgaaccatacagcaaattacattccagtgccgaacatagaagttctatcaccacagtcaatgcggcaagttgttataacaagaattgcacgacgagagcctgtgccagcagaccccgtcgacgacatagtctatgtgaagggcactaccgtggttcagggtacaacgagcgcagatgtcacttatgacatgttcgatggaacaaggacaggccaaattctgcaaccggccatggagctgaatgttgttctcgtagctgactccgagatcatacacaaagcaaggttaccatgggccttagatgtgcatccaacaatgccatggataatgatggctcaaggagattaccaaattcgtatatggaactataagacacggatagagaaacctattgctatcaaggggagagaagttacttcggctaaatttataatgcacaagcaatggattctggcgggctgttctagtggacttgtctatgtgtaccgttatgaaccagaaaagaaaaaatcagtagagaaaatccgagttctacaaggacactcaaatgctatcaattccttggctgttcattcaactaagccatgcgtgctgtcagcatccaaagatggcaaaattttgatctgggactatgaaaatgagtgggagttaatgaaaacatttgatgtcaaaagtcctgtgcagcatgttgcgtttagcccaaaggactccaatatgttcgccagtgcccaggacaaaacagtaaagatatgggattggcattctggtaactgcaagtctacattgtctgggcattcagatttggtgttatgtctggattacttcagtcagggtgatcagctatacttgatcactggttcacgagacaaaactgccaagatatgggattgcaagacgaggagttgtgttcggacattggaagggcatacagatgttgttaatgttgcatgttgccatccagatcttctaatactaattacaggttcattgaacgggtcagttcgtctgtgggatttgaatcgctcaactacgttccgatatgagctcatatttgaccttggagaagtatatgctatagcaagtttgaagggtacaaggattgtgattggacacgaaataggattagcactggtagacatagacctagagggcaagaaggatggatatgtgaagagcaatgtcgcaattatggattcaaaaaatgacacagatcaaaatatgaaagagttaagcccaacagcttcctcaagtgaggtgcaaaaggtgtcaagcattatagcattggagactctatacaaaatgaagtcatcagaatcgtctatagatgtccatccaacagagacatggatggtcattacatccgacaaatatgttcatatatgggactaccatacaaggtcagattggctaaatttatagcccgcaagcaatgggttattgcgggtgctactagtggattcatcttcgtctatgattatgactcaaaaaaggaaataatacacgttttgtgtaaccacacagaacccatcaagtctttggctattcacggaactgagccccttgtgctgtcagcatccgtggatggcaaaattttgctgtgggactatgcaaatgactggcatttgattaaaacatttgatgcgagaagtcaacgtttggtgcaagtcgcgtttaatccaaaggacaccaatatgtttgctagtgctcagggcaaaacagtaaagatttgggatcgccagcatgatgaatgccaatacaaattagatgggcattcacatcagatcgagtgttttgattactttagtggtggtgattttgataagctatatatagtcaccggctctcaagataaaactgccaagatctgggactgcgagaatgcgggctgtgtccagacactggaaggacatgcaggtcccgttagagctgtctgttaccatcagaatctctcgttattaattacagggtgctctgacggatcaattcatctatggaactccactaccttcaggcttgagcataaactgaactttgctgacttcggattactgagttctgtagcttgtttgaaaggatcgaaaaggattgcaatcagaagcagggaaggattagcacttgtagacatagacatagaggacaagaaggatagcgatgtggagagcatcacgactactgcttccatgaacgacacaggtccaattacagaagagaacggagtggcagcagaccatatctctgatgaccacctggcgcagggcgtagtatatgtacatacagagattataggcaaagtcaattcagcatgcaccatagacgtccatccgacaaagccatggatggtcatcactcaagctaacaagtttgttcatgtttgggactaccatacaaaggtagtggaatggacgattcagattaagggagcgaaagttagttcagctaaatttatagccagccaggattggattgtggcgggtactacccgtggattcctccacgtgtacgattgcgaatcgaggaaggaaatacgccgtctttgtgaacacccgaaatctatcacgtcattggctgttgacgatgatgcccttgagctggtgctgtcagcgtccatcgatggcaagattttgatctggagctactggcactactatcacgcacgtagacgtagtacctggcatttggaaaaaacatttgacgcgggaagccagtgtctgaagcaagtcgcgtttattgctccaagtgtccatcgcagcagcagcactatcatcgctactgctcgagacggaacagtaaagatttgggatcccgatcgttctgacggatgccgtgagttcacattggctgcggattcaggtcagattgttgaatgtttcgattggtttagtcgtggtactgatatatacttggtcaccggttctcgagacaacactgccaagatctgggacatagaggatgggagttgtgtccgaacactggaaggacacgcagatcatgttaccgttgtctgttaccatccggatctttcaatgctcattacaggttcaagggacggctcgattcgtctgtggaactccactaccttcaggtttgagcatgagctgaactttgacctcgggtctctgagttctttagcttgtatcaagggatcaacaaggattgcaatcggatatgaaagaggtctagtactggcagacatttgcactcaggaacatagagcatgatctataaagcggcataataccttgagagcgacagaataaaatctaaacattgataaagcggcaaaaatccctggcaaacatttgctgatgcgatgggattgcatccaaacatttttcttggtaagctaatagactgcaataagtttttccatggacttgggaggtgtcgatctgcggatatgcttttgtatggtttaaacatatcatcggatagaaatttatactactatattaaaaatttaatatggac

SEQ ID NO: 41143 - DNA, 3117 bp, Zea Mays
ctggttgttccattacagtctacaacaacaacaaccaagtcattctcgtgaccaaaaattgcttcacctgctcccgtatgcatgatactcgggagattttccgggcagaagaggaaatcctgacaagtagtgcgttccttgctcacaggccctcgttgtgtcatgtaactgcaaatggctcgccaaactagcgttacagaagctgacctggagttcatgctaattgatgaaaatgcaaagccgaagcccctgccttattcacttctcgaaaagatcacaaatggtttctccggggcacatattattgggtatggtggatctgcagatgtttatgagggattcatcgggaatcacaaaatcgctgtgaagaggttgcgcataccatatcagcacgagaaggaattcagtcaagagattgaatgcctgatgaaggtgaagcacataaatgtcgttaggtttataggatattgttccgacacgcaagggcaggcggaaaagtatgaagataatcatgtcatggcagacagccaagaacggttaatttgttttgaatttctaccagcatgtcttgataaatacatcaaagatccatcatgttcacttgaatggagacagcgctatcaaataatcaacggagtttgtcagggcttacatcaacttcatgagcatgaaattcttcacttggatctgaatccgagaaatatacttctagacgatgacatggtcccaaagatttctgattttggcatctccaagtgcttgaaaaaaaaccaaggccacttttatactgaaactataagtggaacaccgatatatatgtcaccggaacggggcaaacatggtccaatcacaacgaagtctgatttgtttagtcttggtgtcacagttatcgagataatgacagggaacaaggagaacattgatcaagccactgttgaagatgtatttgctagctgcatcaaaattttcaatgataaatcattgacagctgcacaagtgcggcagataatggtatgtgctgagatagggattaagtgccgcaacagtgaaccagacaagagaccatcaaatacaaaggaaataatcgataagcttgaagaggaagcaaggacagaggaatctcaagagtctggcaagctacttaaggtcctaccaaccctactcctgtttgatttgcatcccgggaaattgatcccatgctcactgcagctaacaaacgacacggatgaacacatggcatataagcttagtataacagagagtgtggactggtcaaagtacttcacgaccaagctgccgctatatggcattgtgcaggcgcgatccacttacactgtcattctgacagtgttgttggagtgtgatgctccggtcattaacagatcttgttatatgaccctgcagagctgtacactggcatatgagtacatctggaagttcaataacacacttgagtttgaggattttcttgaggttaagaaaacagagaatgcggtgaaggaagtgaaactgaaagcatttttgtgtgaggaaggacgatcaatttctaagcaaacgaggccgcgcgtcaagctcttgtccatagtgaaaccacaaacacctctgttgtcattggatgcacacccgaccaagccctgggtcataactggtcatgcctttggacatgttcgcatttggaaccatgagacacagaagctactgtattcgtttaaactatctctgggaccagtttattctgtcaaatttattgcacggaagcaatggttcgtctccagctctgcagaaggcctcatacatgtctacagtatggaaacaaaaatgcagaaggtcaagagttacagagctcatgacggcgtcagcatatcgctggccgtgcatccaaccctaccatatgtgctgtcatggccttgttcgggcccccacgagaagaagctatggaactgggaaaagggatgggactgcacacaaacatttgagagggagtacgttgcaaggaattttgtatgtcaagttgcttttgacccaaaggagaccaacagatttgctagcgcttcgaactatagggttaaggtttggagcgttgatcttcccaaatgtaactataatctgcctggtttttttaacgaagtgaacttcctggaattcttcacacgtgatgatcaacagtatttgattattactgtctctcatgataagactgcaaaaatatgggacatgcggaacaagaaatatgtttatgatagtatggaacaaaatttgatgtctcccgtgtcttctgtcttctcacatcccaatctgccgatactacttacacgttcaattgatggcacttctcatttctggagtcccaaagatttcaggtttgaggcagtccttgactgtcgttatggaggacatgtatggggcattgcatgtttgatgggatcaaaaagaaggtttgtaattggacaagaaactgcattaacaatcctggatgttggtgaccaagaatgccaggacatgagacaagaaggcacaagttctgaggtgataaccccagggtcaagcgagcttttgcttgacgtccacccgctgacactccactttcccttccatgcccacaagttgatcccgtgcacgctgcacctaacaaataaaacagatgaacatgtggcttttaatcttagtatagaagacggaatggagtcttggcagcagatctttgtaaggatgcccctaagtggaattgtgccaccaaaatccacttacactcttgttgtcacaatgagggagctgacgtatctaccaacacaaaactttaatttgaccctgcagtctaatatatgcgaagataggtacatctattcatttatgagcctatcagaatctgatcagttttttgaggatttaaaggagataaggaatgtggcgccgcctcaggtgaaactgaaagcagttttttctctgcaaggacagacaacgtttgagaacggatcgtcaactggagaaaacttagtccaacctttaattaacatatggactttgttcaaccctgccaaggatttttctagtatgctgatctctctagatgctgatccaacagagtcatggtcaccgccacggtgatgttgctttatg

SEQ ID NO: 41144 - DNA, 7520 bp, Zea Mays
ctggttgttccattacagtctacaacaacaacaaccaagtcattctcgtgaccaaaaattgcttcacctgctcccgtatgcatgatactcgggagattttccgggcagaagaggaaatcctgacaagtagtgcgttccttgctcacaggccctcgttgtgtcatgtaactgcaaatggctcgccaaactagcgttacagaagctgacctggagttcatgctaattgatgaaaatgcaaagccgaagcccctgccttattcacttctcgaaaagatcacaaatggtttctccggggcacatattattgggtatggtggatctgcagatgtttatgagggattcatcgggaatcacaaaatcgctgtgaagaggttgcgcataccatatcagcacgagaaggaattcagtcaagagattgaatgcctgatgaaggtgaagcacataaatgtcgttaggtttataggatattgttccgacacgcaagggcaggcggaaaagtatgaagataatcatgtcatggcagacagccaagaacggttaatttgttttgaatttctaccagcatgtcttgataaatacatcaaagatccatcatgttcacttgaatggagacagcgctatcaaataatcaacggagtttgtcagggcttacatcaacttcatgagcatgaaattcttcacttggatctgaatccgagaaatatacttctagacgatgacatggtcccaaagatttctgattttggcatctccaagtgcttgaaaaaaaaccaaggccacttttatactgaaactataagtggaacaccgatatatatgtcaccggaacggggcaaacatggtccaatcacaacgaagtctgatttgtttagtcttggtgtcacagttatcgagataatgacagggaacaaggagaacattgatcaagccactgttgaagatgtatttgctagctgcatcaaaattttcaatgataaatcattgacagctgcacaagtgcggcagataatggtatgtgctgagatagggattaagtgccgcaacagtgaaccagacaagagaccatcaaatacaaaggaaataatcgataagcttgaagaggaagcaaggacagaggaatctcaagagtctggcaagctacttaaggtcctaccaaccctactcctgtttgatttgcatcccgggaaattgatcccatgctcactgcagctaacaaacgacacggatgaacacatggcatataagcttagtataacagagagtgtggactggtcaaagtacttcacgaccaagctgccgctatatggcattgtgcaggcgcgatccacttacactgtcattctgacagtgttgttggagtgtgatgctccggtcattaacagatcttgttatatgaccctgcagagctgtacactggcatatgagtacatctggaagttcaataacacacttgagtttgaggattttcttgaggttaagaaaacagagaatgcggtgaaggaagtgaaactgaaagcatttttgtgtgaggaaggacgatcaatttctaagcaaacgaggccgcgcgtcaagctcttgtccatagtgaaaccacaaacacctctgttgtcattggatgcacacccgaccaagccctgggtcataactggtcatgcctttggacatgttcgcatttggaaccatgagacacagaagctactgtattcgtttaaactatctctgggaccagtttattctgtcaaatttattgcacggaagcaatggttcgtctccagctctgcagaaggcctcatacatgtctacagtatggaaacaaaaatgcagaaggtcaagagttacagagctcatgacggcgtcagcatatcgctggccgtgcatccaaccctaccatatgtgctgtcatggccttgttcgggcccccacgagaagaagctatggaactgggaaaagggatgggactgcacacaaacatttgagagggagtacgttgcaaggaattttgtatgtcaagttgcttttgacccaaaggagaccaacagatttgctagcgcttcgaactatagggttaaggtttggagcgttgatcttcccaaatgtaactataatctgcctggtttttttaacgaagtgaacttcctggaattcttcacacgtgatgatcaacagtatttgattattactgtctctcatgataagactgcaaaaatatgggacatgcggaacaagaaatatgtttatgatagtatggaacaaaatttgatgtctcccgtgtcttctgtcttctcacatcccaatctgccgatactacttacacgttcaattgatggcacttctcatttctggagtcccaaagatttcaggtttgaggcagtccttgactgtcgttatggaggacatgtatggggcattgcatgtttgatgggatcaaaaagaaggtttgtaattggacaagaaactgcattaacaatcctggatgttggtgaccaagaatgccaggacatgagacaagaaggcacaagttctgaggtgataaccccagggtcaagcgagcttttgcttgacgtccacccgctgacactccactttcccttccatgcccacaagttgatcccgtgcacgctgcacctaacaaataaaacagatgaacatgtggcttttaatcttagtatagaagacggaatggagtcttggcagcagatctttgtaaggatgcccctaagtggaattgtgccaccaaaatccacttacactcttgttgtcacaatgagggagctgacgtatctaccaacacaaaactttaatttgaccctgcagtctaatatatgcgaagataggtacatctattcatttatgagcctatcagaatctgatcagttttttgaggatttaaaggagataaggaatgtggcgccgcctcaggtgaaactgaaagcagttttttctctgcaaggacagacaacgtttgagaacggatcgtcaactggagaaaacttagtccaacctttaattaacatatggactttgttcaaccctgccaaggatttttctagtatgctgatctctctagatgctgatccaacagagtcatgggttataacaggtcaccgccacggtgatgttgctttatggaagcacggcatgcagaaaatgatgtctttgattaacatatcgggagaagcaagccttcctcggaatagcttgaacacccaacatgatgtttattccgttaaattcattgcaaggaagcggtggtttgtagccgggacatgtgatggtttcatccatgtgtataagtatgaaacaagaataatggactgcataaagagattcagagcatactcatctgggatcatagactggggtatttgctcgtccagagcgcttatcgttcatccaacccagccatatttgctctctacctgtgaagaaatgaagctttgggactgggacgatgattggaagtgcatacaaaaatttggtagggaacacactgattccatacttcaagtggcatttagcccaaatgacagttttgccagtgtttcaagtgatcacacaataaagctttggtgcctgaaatctcccacatcagagtgtactctgcacggccattcggacaaagtgaattgcttggatttcgtcacacatgatggtcagcaatatttgattagtggatctcaagactgtactgccaaggcatgggccttgaaggaaaaggaatgcgtccagacaatggatgttttcatgtcgccagttgtttctgtcatttcccttccggacactccatatataactacaggttcagcagatggcactattcatttgtggagttctgctaatttcaggcttgagagaatacttagccttggtttatgtggccctgtttgggatctacgtttgattgggccaacgaggctagctcgtcagctccctcaaatgagctgatccaggttgaccccaaagagttgcgcttcccggttgcccaagaggtgtcaagcacactagagatccgtaacgttacagatcaccatgtggcattctgtatgtggtcattgaaccatacagcaaattacattccagtgccgaacatagaagttctatcaccacagtcaatgcggcaagttgttataacaagaattgcacgacgagagcctgtgccagcagaccccgtcgacgacatagtctatgtgaagggcactaccgtggttcagggtacaacgagcgcagatgtcacttatgacatgttcgatggaacaaggacaggccaaattctgcaaccggccatggagctgaatgttgttctcgtagctgactccgagatcatacacaaagcaaggttaccatgggccttagatgtgcatccaacaatgccatggataatgatggctcaaggagattaccaaattcgtatatggaactataagacacggatagagaaacctattgctatcaaggggagagaagttacttcggctaaatttataatgcacaagcaatggattctggcgggctgttctagtggacttgtctatgtgtaccgttatgaaccagaaaagaaaaaatcagtagagaaaatccgagttctacaaggacactcaaatgctatcaattccttggctgttcattcaactaagccatgcgtgctgtcagcatccaaagatggcaaaattttgatctgggactatgaaaatgagtgggagttaatgaaaacatttgatgtcaaaagtcctgtgcagcatgttgcgtttagcccaaaggactccaatatgttcgccagtgcccaggacaaaacagtaaagatatgggattggcattctggtaactgcaagtctacattgtctgggcattcagatttggtgttatgtctggattacttcagtcagggtgatcagctatacttgatcactggttcacgagacaaaactgccaagatatgggattgcaagacgaggagttgtgttcggacattggaagggcatacagatgttgttaatgttgcatgttgccatccagatcttctaatactaattacaggttcattgaacgggtcagttcgtctgtgggatttgaatcgctcaactacgttccgatatgagctcatatttgaccttggagaagtatatgctatagcaagtttgaagggtacaaggattgtgattggacacgaaataggattagcactggtagacatagacctagagggcaagaaggatggatatgtgaagagcaatgtcgcaattatggattcaaaaaatgacacagatcaaaatatgaaagagttaagcccaacagcttcctcaagtgaggtgcaaaaggtgtcaagcattatagcattggagactctatacaaaatgaagtcatcagaatcgtctatagatgtccatccaacagagacatggatggtcattacatccgacaaatatgttcatatatgggactaccatacaaggtcagattggctaaatttatagcccgcaagcaatgggttattgcgggtgctactagtggattcatcttcgtctatgattatgactcaaaaaaggaaataatacacgttttgtgtaaccacacagaacccatcaagtctttggctattcacggaactgagccccttgtgctgtcagcatccgtggatggcaaaattttgctgtgggactatgcaaatgactggcatttgattaaaacatttgatgcgagaagtcaacgtttggtgcaagtcgcgtttaatccaaaggacaccaatatgtttgctagtgctcagggcaaaacagtaaagatttgggatcgccagcatgatgaatgccaatacaaattagatgggcattcacatcagatcgagtgttttgattactttagtggtggtgattttgataagctatatatagtcaccggctctcaagataaaactgccaagatctgggactgcgagaatgcgggctgtgtccagacactggaaggacatgcaggtcccgttagagctgtctgttaccatcagaatctctcgttattaattacagggtgctctgacggatcaattcatctatggaactccactaccttcaggcttgagcataaactgaactttgctgacttcggattactgagttctgtagcttgtttgaaaggatcgaaaaggattgcaatcagaagcagggaaggattagcacttgtagacatagacatagaggacaagaaggatagcgatgtggagagcatcacgactactgcttccatgaacgacacaggtccaattacagaagagaacggagtggcagcagaccatatctctgatgaccacctggcgcagggcgtagtatatgtacatacagagattataggcaaagtcaattcagcatgcaccatagacgtccatccgacaaagccatggatggtcatcactcaagctaacaagtttgttcatgtttgggactaccatacaaaggtagtggaatggacgattcagattaagggagcgaaagttagttcagctaaatttatagccagccaggattggattgtggcgggtactacccgtggattcctccacgtgtacgattgcgaatcgaggaaggaaatacgccgtctttgtgaacacccgaaatctatcacgtcattggctgttgacgatgatgcccttgagctggtgctgtcagcgtccatcgatggcaagattttgatctggagctactggcactactatcacgcacgtagacgtagtacctggcatttggaaaaaacatttgacgcgggaagccagtgtctgaagcaagtcgcgtttattgctccaagtgtccatcgcagcagcagcactatcatcgctactgctcgagacggaacagtaaagatttgggatcccgatcgttctgacggatgccgtgagttcacattggctgcggattcaggtcagattgttgaatgtttcgattggtttagtcgtggtactgatatatacttggtcaccggttctcgagacaacactgccaagatctgggacatagaggatgggagttgtgtccgaacactggaaggacacgcagatcatgttaccgttgtctgttaccatccggatctttcaatgctcattacaggttcaagggacggctcgattcgtctgtggaactccactaccttcaggtttgagcatgagctgaactttgacctcgggtctctgagttctttagcttgtatcaagggatcaacaaggattgcaatcggatatgaaagaggtctagtactggcagacatttgcactcaggaacatagagcatgatctataaagcggcataataccttgagagcgacagaataaaatctaaacattgataaagcggcaaaaatccctggcaaacatttgctgatgcgatgggattgcatccaaacatttttcttggtaagctaatagactgcaataagtttttccatggacttgggaggtgtcgatctgcggatatgcttttgtatggtttaaacatatcatcggatagaaatttatactactatattaaaaatttaatatggac

SEQ ID NO: 41145 - DNA, 10494 bp, Zea Mays
ctggttgttccattacagtctacaacaacaacaaccaagtcattctcgtgaccaaaaattgcttcacctgctcccgtatgcatgatactcgggagattttccgggcagaagaggaaatcctgacaagtagtgcgttccttgctcacaggccctcgttgtgtcatgtaactgcaaatggctcgccaaactagcgttacagaagctgacctggagttcatgctaattgatgaaaatgcaaagccgaagcccctgccttattcacttctcgaaaagatcacaaatggtttctccggggcacatattattgggtatggtggatctgcagatgtttatgagggattcatcgggaatcacaaaatcgctgtgaagaggttgcgcataccatatcagcacgagaaggaattcagtcaagagattgaatgcctgatgaaggtgaagcacataaatgtcgttaggtttataggatattgttccgacacgcaagggcaggcggaaaagtatgaagataatcatgtcatggcagacagccaagaacggttaatttgttttgaatttctaccagcatgtcttgataaatacatcaaagatccatcatgttcacttgaatggagacagcgctatcaaataatcaacggagtttgtcagggcttacatcaacttcatgagcatgaaattcttcacttggatctgaatccgagaaatatacttctagacgatgacatggtcccaaagatttctgattttggcatctccaagtgcttgaaaaaaaaccaaggccacttttatactgaaactataagtggaacaccgatatatatgtcaccggaacggggcaaacatggtccaatcacaacgaagtctgatttgtttagtcttggtgtcacagttatcgagataatgacagggaacaaggagaacattgatcaagccactgttgaagatgtatttgctagctgcatcaaaattttcaatgataaatcattgacagctgcacaagtgcggcagataatggtatgtgctgagatagggattaagtgccgcaacagtgaaccagacaagagaccatcaaatacaaaggaaataatcgataagcttgaagaggaagcaaggacagaggaatctcaagagtctggcaagctacttaaggtcctaccaaccctactcctgtttgatttgcatcccgggaaattgatcccatgctcactgcagctaacaaacgacacggatgaacacatggcatataagcttagtataacagagagtgtggactggtcaaagtacttcacgaccaagctgccgctatatggcattgtgcaggcgcgatccacttacactgtcattctgacagtgttgttggagtgtgatgctccggtcattaacagatcttgttatatgaccctgcagagctgtacactggcatatgagtacatctggaagttcaataacacacttgagtttgaggattttcttgaggttaagaaaacagagaatgcggtgaaggaagtgaaactgaaagcatttttgtgtgaggaaggacgatcaatttctaagcaaacgaggccgcgcgtcaagctcttgtccatagtgaaaccacaaacacctctgttgtcattggatgcacacccgaccaagccctgggtcataactggtcatgcctttggacatgttcgcatttggaaccatgagacacagaagctactgtattcgtttaaactatctctgggaccagtttattctgtcaaatttattgcacggaagcaatggttcgtctccagctctgcagaaggcctcatacatgtctacagtatggaaacaaaaatgcagaaggtcaagagttacagagctcatgacggcgtcagcatatcgctggccgtgcatccaaccctaccatatgtgctgtcatggccttgttcgggcccccacgagaagaagctatggaactgggaaaagggatgggactgcacacaaacatttgagagggagtacgttgcaaggaattttgtatgtcaagttgcttttgacccaaaggagaccaacagatttgctagcgcttcgaactatagggttaaggtttggagcgttgatcttcccaaatgtaactataatctgcctggtttttttaacgaagtgaacttcctggaattcttcacacgtgatgatcaacagtatttgattattactgtctctcatgataagactgcaaaaatatgggacatgcggaacaagaaatatgtttatgatagtatggaacaaaatttgatgtctcccgtgtcttctgtcttctcacatcccaatctgccgatactacttacacgttcaattgatggcacttctcatttctggagtcccaaagatttcaggtttgaggcagtccttgactgtcgttatggaggacatgtatggggcattgcatgtttgatgggatcaaaaagaaggtttgtaattggacaagaaactgcattaacaatcctggatgttggtgaccaagaatgccaggacatgagacaagaaggcacaagttctgaggtgataaccccagggtcaagcgagcttttgcttgacgtccacccgctgacactccactttcccttccatgcccacaagttgatcccgtgcacgctgcacctaacaaataaaacagatgaacatgtggcttttaatcttagtatagaagacggaatggagtcttggcagcagatctttgtaaggatgcccctaagtggaattgtgccaccaaaatccacttacactcttgttgtcacaatgagggagctgacgtatctaccaacacaaaactttaatttgaccctgcagtctaatatatgcgaagataggtacatctattcatttatgagcctatcagaatctgatcagttttttgaggatttaaaggagataaggaatgtggcgccgcctcaggtgaaactgaaagcagttttttctctgcaaggacagacaacgtttgagaacggatcgtcaactggagaaaacttagtccaacctttaattaacatatggactttgttcaaccctgccaaggatttttctagtatgctgatctctctagatgctgatccaacagagtcatgggttataacaggtcaccgccacggtgatgttgctttatggaagcacggcatgcagaaaatgatgtctttgattaacatatcgggagaagcaagccttcctcggaatagcttgaacacccaacatgatgtttattccgttaaattcattgcaaggaagcggtggtttgtagccgggacatgtgatggtttcatccatgtgtataagtatgaaacaagaataatggactgcataaagagattcagagcatactcatctgggatcatagactggggtatttgctcgtccagagcgcttatcgttcatccaacccagccatatttgctctctacctgtgaagaaatgaagctttgggactgggacgatgattggaagtgcatacaaaaatttggtagggaacacactgattccatacttcaagtggcatttagcccaaatgacagttttgccagtgtttcaagtgatcacacaataaaggtttgagcctctctcccttgttttgattcttatattgaattaacacaacattcaaaatataccaagatggttttcatcgtaacaaggtggtttttaatggggaacctccttccttagcaaggctgcagagaagcttcttggatgaattagtgtgttgggttatggttggtgccaaaatgtagtccccccccccccctctgtttatgcttctatttagcaggtttcgctgctttgtaagcctttttactctttataagatgcacagttctcctgcaagttcgataaagaaaatataccaagataagtgtaattaatttcctttgaaacaatgactgtgcgatagtgtgattaataagctatgctttgatgtacatcagctttggtgcctgaaatctcccacatcagagtgtactctgcacggccattcggacaaagtgaattgcttggatttcgtcacacatgatggtcagcaatatttgattagtggatctcaagactgtactgccaaggcatgggccttgaaggaaaaggaatgcgtccagacaatggatgttttcatgtcgccagttgtttctgtcatttcccttccggacactccatatataactacaggttcagcagatggcactattcatttgtggagttctgctaatttcaggcttgagagaatacttagccttggtttatgtggccctgtttgggatctacgtttgattgggccaacgaggatcgtgattcaaccgaacaactatgaaatatcagtcatcatggatattgacacaggttctgaggctagctcgtcagctccctcaaatgagctgatccaggttgaccccaaagagttgcgcttcccggttgcccaagaggtgtcaagcacactagagatccgtaacgttacagatcaccatgtggcattctgtatgtggtcattgaaccatacagcaaattacattccagtgccgaacatagaagttctatcaccacagtcaatgcggcaagttgttataacaagaattgcacgacgagagcctgtgccagcagaccccgtcgacgacatagtctatgtgaagggcactaccgtggttcagggtacaacgagcgcagatgtcacttatgacatgttcgatggaacaaggacaggccaaattctgcaaccggccatggagctgaatgttgttctcgtagctgactccgagatcatacacaaagcaaggttaccatgggccttagatgtgcatccaacaatgccatggataatgatggctcaaggagattaccaaattcgtatatggaactataagacacggatagagaaacctattgctatcaaggggagagaagttacttcggctaaatttataatgcacaagcaatggattctggcgggctgttctagtggacttgtctatgtgtaccgttatgaaccagaaaagaaaaaatcagtagagaaaatccgagttctacaaggacactcaaatgctatcaattccttggctgttcattcaactaagccatgcgtgctgtcagcatccaaagatggcaaaattttgatctgggactatgaaaatgagtgggagttaatgaaaacatttgatgtcaaaagtcctgtgcagcatgttgcgtttagcccaaaggactccaatatgttcgccagtgcccaggacaaaacagtaaagatatgggattggcattctggtaactgcaagtctacattgtctgggcattcagatttggtgttatgtctggattacttcagtcagggtgatcagctatacttgatcactggttcacgagacaaaactgccaagatatgggattgcaagacgaggagttgtgttcggacattggaagggcatacagatgttgttaatgttgcatgttgccatccagatcttctaatactaattacaggttcattgaacgggtcagttcgtctgtgggatttgaatcgctcaactacgttccgatatgagctcatatttgaccttggagaagtatatgctatagcaagtttgaagggtacaaggattgtgattggacacgaaataggattagcactggtagacatagacctagagggcaagaaggatggatatgtgaagagcaatgtcgcaattatggattcaaaaaatgacacagatcaaaatatgaaagagttaagcccaacagcttcctcaagtgaggtgcaaaaggtgtcaagcattatagcattggagactctatacaaaatgaagtcatcagaatcgtctatagatgtccatccaacagagacatggatggtcattacatccgacaaatatgttcatatatgggactaccatacaagggaagtgaaacagatgatggatactaagggagcgaaagtcagattggctaaatttatagcccgcaagcaatgggttattgcgggtgctactagtggattcatcttcgtctatgattatgactcaaaaaaggaaataatacacgttttgtgtaaccacacagaacccatcaagtctttggctattcacggaactgagccccttgtgctgtcagcatccgtggatggcaaaattttgctgtgggactatgcaaatgactggcatttgattaaaacatttgatgcgagaagtcaacgtttggtgcaagtcgcgtttaatccaaaggacaccaatatgtttgctagtgctcagggcaaaacagtaaagatttgggatcgccagcatgatgaatgccaatacaaattagatgggcattcacatcagatcgagtgttttgattactttagtggtggtgattttgataagctatatatagtcaccggctctcaagataaaactgccaagatctgggactgcgagaatgcgggctgtgtccagacactggaaggacatgcaggtcccgttagagctgtctgttaccatcagaatctctcgttattaattacagggtgctctgacggatcaattcatctatggaactccactaccttcaggcttgagcataaactgaactttgctgacttcggattactgagttctgtagcttgtttgaaaggatcgaaaaggattgcaatcagaagcagggaaggattagcacttgtagacatagacatagaggacaagaaggatagcgatgtggagagcatcacgactactgcttccatgaacgacacaggtccaattacagaagagaacggagtggcagcagaccatatctctgatgaccacctggcgcagggcgtagtatatgtacatacagagattataggcaaagtcaattcagcatgcaccatagacgtccatccgacaaagccatggatggtcatcactcaagctaacaagtttgttcatgtttgggactaccatacaaaggtagtggaatggacgattcagattaagggagcgaaagttagttcagctaaatttatagccagccaggattggattgtggcgggtactacccgtggattcctccacgtgtacgattgcgaatcgaggaaggaaatacgccgtctttgtgaacacccgaaatctatcacgtcattggctgttgacgatgatgcccttgagctggtgctgtcagcgtccatcgatggcaagattttgatctggagctactggcactactatcacgcacgtagacgtagtacctggcatttggaaaaaacatttgacgcgggaagccagtgtctgaagcaagtcgcgtttattgctccaagtgtccatcgcagcagcagcactatcatcgctactgctcgagacggaacagtaaagatttgggatcccgatcgttctgacggatgccgtgagttcacattggctgcggattcaggtcagattgttgaatgtttcgattggtttagtcgtggtactgatatatacttggtcaccggttctcgagacaacactgccaagatctgggacatagaggatgggagttgtgtccgaacactggaaggacacgcagatcatgttaccgttgtctgttaccatccggatctttcaatgctcattacaggttcaagggacggctcgattcgtctgtggaactccactaccttcaggtttgagcatgagctgaactttgacctcgggtctctgagttctttagcttgtatcaagggatcaacaaggattgcaatcggatatgaaagaggtctagtactggcagacatttgcactcaggaacatagagcatgatctataaagcggcataataccttgagagcgacagaataaaatctaaacattgataaagcggcaaaaatccctggcaaacatttgctgatgcgatgggattgcatccaaacatttttcttgcgagcgagccaacacctgtcggcacaagaatggatgggaatgctgagacgatccaattctcatggggcaagcgtcgagggaaaggtggtgctaagatggatacacagttctttgggtccttcacattggacaatgtgaagtattcactgtttgactgtgtctatctatttaagcatggtgatcctgaaccgtacattggaaaaatagtgaagatctgggagaaagataatgataaaaaagtaaaaattctttggtttttccaccctgatgaggttcagaactatttaagtggccctgtgatgggaaaggagatttttcttgcctgtggtgaaggtgctgggcttgcagatatcaacccgctggaagctgtcgctggaaaatgcactgttatatgtacttcaaaggataagaggaatcgtcaaccatcccctcaggaactacaaattgctgattatatcttctatagggtctttgatgttaaaagtctaacactttctgatcagttaccagataaaattgctgcatttacagttgatcttcttctgaatccaaaagatgagctagtcatacctgcaaatgttctggtgaatccaaatgtggatgagggtatggttgccacagttcctacacccccttcagcagttaaattggaggatcgaagtcaggctgctgcacttccccttacgcagacaggccaggtggatgaaaatctgcctgccacagttccccttccccaatcagaggtcaaggaggaacagaaaccagtcattgccattcccatttcccagactgtggtcaagaaagaggataagaaatcactttctgacattcccctttcccattcagcagtcaaggaggatgagacaccagttgcttcaattggccctccacagtctgcagttatggagaacattcccaaacatacacagttacaggatgctcatgctggggagaggccaccaaaaaagttgaaattatcccaagaaactacagagcaggacatagatccaacgaatactgaacaaagacctttggagctacagccaaagaatattgacagaagcaaatggtttaacattgaatggaatgacagactaaagatggctgatgataaggggacacttgtctatattcaaaatctcgatattcggtttggacctgctgacatagagttcgtaaagcattacagctaaattgtactgcgaagcccattaaccaccccacatatgatgatccaaacaatggcaaagcatatgctatattcagaactaaagatgctgctgatgctgccatttcaaaaatcaattctggtttggttgttggtggaaggcccctgtactgcagcaaagggttacttgaggttccaaaaccttcagcgaatcttgttgggcacctctcctcatatgttaagattggtcaaaagcagcgcgacgagcagaagaaggctgtagcaacctcgcattgttcccagcccaacacgatcgagtacgacttggccttggactggatgcttcttcgggaaaagcaagaccagagcttcagagtacttcacaagaagcacagagaagccaggaaagggttcgcaagcctggtcggcaaaggatccaaggcagagtagcaggccggttgcccggttccaacctttcagagcttggcgcggtatgactgccgactggcaggaagagagggtcgtgcgcgcagaggttctctttttgcagtagccatcgagtagttcgttgggtcaattcgtgttaatttctgttaggaaaggaaaaatgtgttaataagtgttaggatagaaaatgcacgtcagctttgacaggtcagagcagcctaggtaggcatcaatatgttgctgcgactgcgatgttttaatttgacttggaacctcttatgttgggcgacaagtttgccctatgggggagagagacactgtttcgtctctgttaccatctcatctgatttcactttcagtcaatctcgtccatatcgttctacagattaggttggatcaaacaattgacaccaggcacaattttcttttacataagtataagataagggctgatttggtgatcaaggatcacggaagattgttagggattgaggaggaaattagtttatttccctatcaatcctcccgtgatcctttgtcactaaaatcaaccctaagagctagattggaggagctaaaatctcatctttattcaattttaaataagaagaggattttagccctgcaatccccataagggactcagattcttttaccactgatcatggaccacatacacaactgagcaacacagagccccgtttgccatctcctttattggcaccgaaataaaagacggcaattattgctaaacaagaccatgtcatggtacaacctaacacagacaccaaatgttcaaggactttgcgtgctagacacaagattgttacgaatatgcacatctaattctggtgtattatataagctagaccaagcctccgtctcctctcatcaagtctgcatgcatcctcacatctcaatatggtgcgcgtggctctggacatctccttggctgtccagaggcatgtactgggccatgatggcgcggatctccgagtccatgtacctctg

SEQ ID NO: 41146 - DNA, 2356 bp, Zea Mays
gttccattacagtctacaacaacaacaaccaagtcattctcgtgaccaaaaattgcttcacctgctcccgtatgcatgatactcgggagattttccgggcagaagaggaaatcctgacaagtagtgcgttccttgctcacaggccctcgttgtgtcatgtaactgcaaatggctcgccaaactagcgttacagaagctgacctggagttcatgctaattgatgaaaatgcaaagccgaagcccctgccttattcacttctcgaaaagatcacaaatggtttctccggggcacatattattgggtatggtggatctgcagatgtttatgagggattcatcgggaatcacaaaatcgctgtgaagaggttgcgcataccatatcagcacgagaaggaattcagtcaagagattgaatgcctgatgaaggtgaagcacataaatgtcgttaggtttataggatattgttccgacacgcaagggcaggcggaaaagtatgaagataatcatgtcatggcagacagccaagaacggttaatttgttttgaatttctaccagcatgtcttgataaatacatcaaagatccatcatgttcacttgaatggagacagcgctatcaaataatcaacggagtttgtcagggcttacatcaacttcatgagcatgaaattcttcacttggatctgaatccgagaaatatacttctagacgatgacatggtcccaaagatttctgattttggcatctccaagtgcttgaaaaaaaaccaaggccacttttatactgaaactataagtggaacaccgatatatatgtcaccggaacggggcaaacatggtccaatcacaacgaagtctgatttgtttagtcttggtgtcacagttatcgagataatgacagggaacaaggagaacattgatcaagccactgttgaagatgtatttgctagctgcatcaaaattttcaatgataaatcattgacagctgcacaagtgcggcagataatggtatgtgctgagatagggattaagtgccgcaacagtgaaccagacaagagaccatcaaatacaaaggaaataatcgataagcttgaagaggaagcaaggacagaggaatctcaagagtctggcaagctacttaaggtcctaccaaccctactcctgtttgatttgcatcccgggaaattgatcccatgctcactgcagctaacaaacgacacggatgaacacatggcatataagcttagtataacagagagtgtggactggtcaaagtacttcacgaccaagctgccgctatatggcattgtgcaggcgcgatccacttacactgtcattctgacagtgttgttggagtgtgatgctccggtcattaacagatcttgttatatgaccctgcagagctgtacactggcatatgagtacatctggaagttcaataacacacttgagtttgaggattttcttgaggttaagaaaacagagaatgcggtgaaggaagtgaaactgaaagcatttttgtgtgaggaaggacgatcaatttctaagcaaacgaggccgcgcgtcaagctcttgtccatagtgaaaccacaaacacctctgttgtcattggatgcacacccgaccaagccctgggtcataactggtcatgcctttggacatgttcgcatttggaaccatgagacacagtttattctgtcaaatttattgcacggaagcaatggttcgtctccagctctgcagaaggcctcatacatgtctacagtatggaaacaaaaatgcagaaggtcaagagttacagagctcatgacggcgtcagcatatcgctggccgtgcatccaaccctaccatatgtgctgtcatggccttgttcgggcccccacgagaagaagctatggaactgggaaaagggatgggactgcacacaaacatttgagagggagtacgttgcaaggaattttgtatgtcaagttgcttttgacccaaaggagaccaacagatttgctagcgcttcgaactatagggttaaggtttggagcgttgatcttcccaaatgtaactataatctgcctggtttttttaacgaagtgaacttcctggaattcttcacacgtgatgatcaacagtatttgattattactgtctctcatgataagactgcaaaaatatgggacatgcggaacaagaaatatgtttatgatagtatggaacaaaatttgatgtctcccgtgtcttctgtcttctcacatcccaatctgccgatactacttacacgttcaattgatggcacttctcatttctggagtcccaaagatttcagataaatagaagattgaagcgaaataggccgtaaacgtac

SEQ ID NO: 41147 - DNA, 2282 bp, Zea Mays
gttccattacagtctacaacaacaacaaccaagtcattctcgtgaccaaaaattgcttcacctgctcccgtatgcatgatactcgggagattttccgggcagaagaggaaatcctgacaagtagtgcgttccttgctcacaggccctcgttgtgtcatgtaactgcaaatggctcgccaaactagcgttacagaagctgacctggagttcatgctaattgatgaaaatgcaaagccgaagcccctgccttattcacttctcgaaaagatcacaaatggtttctccggggcacatattattgggtatggtggatctgcagatgtttatgagggattcatcgggaatcacaaaatcgctgtgaagaggttgcgcataccatatcagcacgagaaggaattcagtcaagagattgaatgcctgatgaaggtgaagcacataaatgtcgttaggtttataggatattgttccgacacgcaagggcaggcggaaaagtatgaagataatcatgtcatggcagacagccaagaacggttaatttgttttgaatttctaccagcatgtcttgataaatacatcaaagatccatcatgttcacttgaatggagacagcgctatcaaataatcaacggagtttgtcagggcttacatcaacttcatgagcatgaaattcttcacttggatctgaatccgagaaatatacttctagacgatgacatggtcccaaagatttctgattttggcatctccaagtgcttgaaaaaaaaccaaggccacttttatactgaaactataagtggaacaccgatatatatgtcaccggaacggggcaaacatggtccaatcacaacgaagtctgatttgtttagtcttggtgtcacagttatcgagataatgacagggaacaaggagaacattgatcaagccactgttgaagatgtatttgctagctgcatcaaaattttcaatgataaatcattgacagctgcacaagtgcggcagataatggtatgtgctgagatagggattaagtgccgcaacagtgaaccagacaagagaccatcaaatacaaaggaaataatcgataagcttgaagaggaagcaaggacagaggaatctcaagagtctggcaagctacttaaggtcctaccaaccctactcctgtttgatttgcatcccgggaaattgatcccatgctcactgcagctaacaaacgacacggatgaacacatggcatataagcttagtataacagagagtgtggactggtcaaagtacttcacgaccaagctgccgctatatggcattgtgcaggcgcgatccacttacactgtcattctgacagtgttgttggagtgtgatgctccgagctgtacactggcatatgagtacatctggaagttcaataacacacttgagtttgaggattttcttgagcaaacgaggccgcgcgtcaagctcttgtccatagtgaaaccacaaacacctctgttgtcattggatgcacacccgaccaagccctgggtcataactggtcatgcctttggacatgttcgcatttggaaccatgagacacagaagctactgtattcgtttaaactatctctgggaccagtttattctgtcaaatttattgcacggaagcaatggttcgtctccagctctgcagaaggcctcatacatgtctacagtatggaaacaaaaatgcagaaggtcaagagttacagagctcatgacggcgtcagcatatcgctggccgtgcatccaaccctaccatatgtgctgtcatggccttgttcgggcccccacgagaagaagctatggaactgggaaaagggatgggactgcacacaaacatttgagagggagtacgttgcaaggaattttgtatgtcaagttgcttttgacccaaaggagaccaacagatttgctagcgcttcgaactatagggttaaggtttggagcgttgatcttcccaaatgtaactataatctgcctggtttttttaacgaagtgaacttcctggaattcttcacacgtgatgatcaacagtatttgattattactgtctctcatgataagactgcaaaaatatgggacatgcggaacaagaaatatgtttatgatagtatggaacaaaatttgatgtctcccgtgtcttctgtcttctcacatcccaatctgccgatactacttacacgttcaattgatggcacttctcatttctggagtcccaaagatttcagataaatagaagattgaagcgaaataggccgtaaacgtac

SEQ ID NO: 41148 - DNA, 2375 bp, Zea Mays
gttccattacagtctacaacaacaacaaccaagtcattctcgtgaccaaaaattgcttcacctgctcccgtatgcatgatactcgggagattttccgggcagaagaggaaatcctgacaagtagtgcgttccttgctcacaggccctcgttgtgtcatgtaactgcaaatggctcgccaaactagcgttacagaagctgacctggagttcatgctaattgatgaaaatgcaaagccgaagcccctgccttattcacttctcgaaaagatcacaaatggtttctccggggcacatattattgggtatggtggatctgcagatgtttatgagggattcatcgggaatcacaaaatcgctgtgaagaggttgcgcataccatatcagcacgagaaggaattcagtcaagagattgaatgcctgatgaaggtgaagcacataaatgtcgttaggtttataggatattgttccgacacgcaagggcaggcggaaaagtatgaagataatcatgtcatggcagacagccaagaacggttaatttgttttgaatttctaccagcatgtcttgataaatacatcaaagatccatcatgttcacttgaatggagacagcgctatcaaataatcaacggagtttgtcagggcttacatcaacttcatgagcatgaaattcttcacttggatctgaatccgagaaatatacttctagacgatgacatggtcccaaagatttctgattttggcatctccaagtgcttgaaaaaaaaccaaggccacttttatactgaaactataagtggaacaccgatatatatgtcaccggaacggggcaaacatggtccaatcacaacgaagtctgatttgtttagtcttggtgtcacagttatcgagataatgacagggaacaaggagaacattgatcaagccactgttgaagatgtatttgctagctgcatcaaaattttcaatgataaatcattgacagctgcacaagtgcggcagataatggtatgtgctgagatagggattaagtgccgcaacagtgaaccagacaagagaccatcaaatacaaaggaaataatcgataagcttgaagaggaagcaaggacagaggaatctcaagagtctggcaagctacttaaggtcctaccaaccctactcctgtttgatttgcatcccgggaaattgatcccatgctcactgcagctaacaaacgacacggatgaacacatggcatataagcttagtataacagagagtgtggactggtcaaagtacttcacgaccaagctgccgctatatggcattgtgcaggcgcgatccacttacactgtcattctgacagtgttgttggagtgtgatgctccggtcattaacagatcttgttatatgaccctgcagagctgtacactggcatatgagtacatctggaagttcaataacacacttgagtttgaggattttcttgaggttaagaaaacagagaatgcggtgaaggaagtgaaactgaaagcatttttgtgtgaggaaggacgatcaatttctaagcaaacgaggccgcgcgtcaagctcttgtccatagtgaaaccacaaacacctctgttgtcattggatgcacacccgaccaagccctgggtcataactggtcatgcctttggacatgttcgcatttggaaccatgagacacagaagctactgtattcgtttaaactatctctgggaccagtttattctgtcaaatttattgcacggaagcaatggttcgtctccagctctgcagaaggcctcatacatgtctacagtatggaaacaaaaatgcagaaggtcaagagttacagagctcatgacggcgtcagcatatcgctggccgtgcatccaaccctaccatatgtgctgtcatggccttgttcgggcccccacgagaagaagctatggaactgggaaaagggatgggactgcacacaaacatttgagagggagtacgttgcaaggaattttgtatgtcaagttgcttttgacccaaaggagaccaacagatttgctagcgcttcgaactatagggttaaggtttggagcgttgatcttcccaaatgtaactataatctgcctggtttttttaacgaagtgaacttcctggaattcttcacacgtgatgatcaacagtatttgattattactgtctctcatgataagactgcaaaaatatgggacatgcggaacaagaaatatgtttatgatagtatggaacaaaatttgatgtctcccgtgtcttctgtcttctcacatcccaatctgccgatactacttacacgttcaattgatggcacttctcatttctggagtcccaaagatttcagggctaaaaagaggagtgtcca

SEQ ID NO: 41149 - DNA, 3249 bp, Zea Mays
gttccattacagtctacaacaacaacaaccaagtcattctcgtgaccaaaaattgcttcacctgctcccgtatgcatgatactcgggagattttccgggcagaagaggaaatcctgacaagtagtgcgttccttgctcacaggccctcgttgtgtcatgtaactgcaaatggctcgccaaactagcgttacagaagctgacctggagttcatgctaattgatgaaaatgcaaagccgaagcccctgccttattcacttctcgaaaagatcacaaatggtttctccggggcacatattattgggtatggtggatctgcagatgtttatgagggattcatcgggaatcacaaaatcgctgtgaagaggttgcgcataccatatcagcacgagaaggaattcagtcaagagattgaatgcctgatgaaggtgaagcacataaatgtcgttaggtttataggatattgttccgacacgcaagggcaggcggaaaagtatgaagataatcatgtcatggcagacagccaagaacggttaatttgttttgaatttctaccagcatgtcttgataaatacatcaaagatccatcatgttcacttgaatggagacagcgctatcaaataatcaacggagtttgtcagggcttacatcaacttcatgagcatgaaattcttcacttggatctgaatccgagaaatatacttctagacgatgacatggtcccaaagatttctgattttggcatctccaagtgcttgaaaaaaaaccaaggccacttttatactgaaactataagtggaacaccgatatatatgtcaccggaacggggcaaacatggtccaatcacaacgaagtctgatttgtttagtcttggtgtcacagttatcgagataatgacagggaacaaggagaacattgatcaagccactgttgaagatgtatttgctagctgcatcaaaattttcaatgataaatcattgacagctgcacaagtgcggcagataatggtatgtgctgagatagggattaagtgccgcaacagtgaaccagacaagagaccatcaaatacaaaggaaataatcgataagcttgaagaggaagcaaggacagaggaatctcaagagtctggcaagctacttaaggtcctaccaaccctactcctgtttgatttgcatcccgggaaattgatcccatgctcactgcagctaacaaacgacacggatgaacacatggcatataagcttagtataacagagagtgtggactggtcaaagtacttcacgaccaagctgccgctatatggcattgtgcaggcgcgatccacttacactgtcattctgacagtgttgttggagtgtgatgctccggtcattaacagatcttgttatatgaccctgcagagctgtacactggcatatgagtacatctggaagttcaataacacacttgagtttgaggattttcttgaggttaagaaaacagagaatgcggtgaaggaagtgaaactgaaagcatttttgtgtgaggaaggacgatcaatttctaagcaaacgaggccgcgcgtcaagctcttgtccatagtgaaaccacaaacacctctgttgtcattggatgcacacccgaccaagccctgggtcataactggtcatgcctttggacatgttcgcatttggaaccatgagacacagaagctactgtattcgtttaaactatctctgggaccagtttattctgtcaaatttattgcacggaagcaatggttcgtctccagctctgcagaaggcctcatacatgtctacagtatggaaacaaaaatgcagaaggtcaagagttacagagctcatgacggcgtcagcatatcgctggccgtgcatccaaccctaccatatgtgctgtcatggccttgttcgggcccccacgagaagaagctatggaactgggaaaagggatgggactgcacacaaacatttgagagggagtacgttgcaaggaattttgtatgtcaagttgcttttgacccaaaggagaccaacagatttgctagcgcttcgaactatagggttaaggtttggagcgttgatcttcccaaatgtaactataatctgcctggtttttttaacgaagtgaacttcctggaattcttcacacgtgatgatcaacagtatttgattattactgtctctcatgataagactgcaaaaatatgggacatgcggaacaagaaatatgtttatgatagtatggaacaaaatttgatgtctcccgtgtcttctgtcttctcacatcccaatctgccgatactacttacacgttcaattgatggcacttctcatttctggagtcccaaagatttcaggtttgaggcagtccttgactgtcgttatggaggacatgtatggggcattgcatgtttgatgggatcaaaaagaaggtttgtaattggacaagaaactgcattaacaatcctggatgttggtgaccaagaatgccaggacatgagacaagaaggcacaagttctgaggtgataaccccagggtcaagcgagcttttgcttgacgtccacccgctgacactccactttcccttccatgcccacaagttgatcccgtgcacgctgcacctaacaaataaaacagatgaacatgtggcttttaatcttagtatagaagacggaatggagtcttggcagcagatcttttctaatatatgcgaagataggtacatctattcatttatgagcctatcagaatctgatcagttttttgaggatttaaaggagataaggaatgtggcgccgcctcaggtgaaactgaaagcagttttttctctgcaaggacagacaacgtttgagaacggatcgtcaactggagaaaacttagtccaacctttaattaacatatggactttgttcaaccctgccaaggatttttctagtatgctgatctctctagatgctgatccaacagagtcatgggttataacaggtcaccgccacggtgatgttgctttatggaagcacggcatgcagaaaatgatgtctttgattaacatatcgggagaagcaagccttcctcggaatagcttgaacacccaacatgatgtttattccgttaaattcattgcaaggaagcggtggtttgtagccgggacatgtgatggtttcatccatgtgtataagtatgaaacaagaataatggactgcataaagagattcagagggatatcatcttcgtgatcgtagtacaattga

SEQ ID NO: 41150 - DNA, 7358 bp, Zea Mays
gttccattacagtctacaacaacaacaaccaagtcattctcgtgaccaaaaattgcttcacctgctcccgtatgcatgatactcgggagattttccgggcagaagaggaaatcctgacaagtagtgcgttccttgctcacaggccctcgttgtgtcatgtaactgcaaatggctcgccaaactagcgttacagaagctgacctggagttcatgctaattgatgaaaatgcaaagccgaagcccctgccttattcacttctcgaaaagatcacaaatggtttctccggggcacatattattgggtatggtggatctgcagatgtttatgagggattcatcgggaatcacaaaatcgctgtgaagaggttgcgcataccatatcagcacgagaaggaattcagtcaagagattgaatgcctgatgaaggtgaagcacataaatgtcgttaggtttataggatattgttccgacacgcaagggcaggcggaaaagtatgaagataatcatgtcatggcagacagccaagaacggttaatttgttttgaatttctaccagcatgtcttgataaatacatcaaagatccatcatgttcacttgaatggagacagcgctatcaaataatcaacggagtttgtcagggcttacatcaacttcatgagcatgaaattcttcacttggatctgaatccgagaaatatacttctagacgatgacatggtcccaaagatttctgattttggcatctccaagtgcttgaaaaaaaaccaaggccacttttatactgaaactataagtggaacaccgatatatatgtcaccggaacggggcaaacatggtccaatcacaacgaagtctgatttgtttagtcttggtgtcacagttatcgagataatgacagggaacaaggagaacattgatcaagccactgttgaagatgtatttgctagctgcatcaaaattttcaatgataaatcattgacagctgcacaagtgcggcagataatggtatgtgctgagatagggattaagtgccgcaacagtgaaccagacaagagaccatcaaatacaaaggaaataatcgataagcttgaagaggaagcaaggacagaggaatctcaagagtctggcaagctacttaaggtcctaccaaccctactcctgtttgatttgcatcccgggaaattgatcccatgctcactgcagctaacaaacgacacggatgaacacatggcatataagcttagtataacagagagtgtggactggtcaaagtacttcacgaccaagctgccgctatatggcattgtgcaggcgcgatccacttacactgtcattctgacagtgttgttggagtgtgatgctccggtcattaacagatcttgttatatgaccctgcagagctgtacactggcatatgagtacatctggaagttcaataacacacttgagtttgaggattttcttgaggttaagaaaacagagaatgcggtgaaggaagtgaaactgaaagcatttttgtgtgaggaaggacgatcaatttctaagcaaacgaggccgcgcgtcaagctcttgtccatagtgaaaccacaaacacctctgttgtcattggatgcacacccgaccaagccctgggtcataactggtcatgcctttggacatgttcgcatttggaaccatgagacacagaagctactgtattcgtttaaactatctctgggaccagtttattctgtcaaatttattgcacggaagcaatggttcgtctccagctctgcagaaggcctcatacatgtctacagtatggaaacaaaaatgcagaaggtcaagagttacagagctcatgacggcgtcagcatatcgctggccgtgcatccaaccctaccatatgtgctgtcatggccttgttcgggcccccacgagaagaagctatggaactgggaaaagggatgggactgcacacaaacatttgagagggagtacgttgcaaggaattttgtatgtcaagttgcttttgacccaaaggagaccaacagatttgctagcgcttcgaactatagggttaaggtttggagcgttgatcttcccaaatgtaactataatctgcctggtttttttaacgaagtgaacttcctggaattcttcacacgtgatgatcaacagtatttgattattactgtctctcatgataagactgcaaaaatatgggacatgcggaacaagaaatatgtttatgatagtatggaacaaaatttgatgtctcccgtgtcttctgtcttctcacatcccaatctgccgatactacttacacgttcaattgatggcacttctcatttctggagtcccaaagatttcaggtttgaggcagtccttgactgtcgttatggaggacatgtatggggcattgcatgtttgatgggatcaaaaagaaggtttgtaattggacaagaaactgcattaacaatcctggatgttggtgaccaagaatgccaggacatgagacaagaaggcacaagttctgaggtgataaccccagggtcaagcgagcttttgcttgacgtccacccgctgacactccactttcccttccatgcccacaagttgatcccgtgcacgctgcacctaacaaataaaacagatgaacatgtggcttttaatcttagtatagaagacggaatggagtcttggcagcagatctttgtaaggatgcccctaagtggaattgtgccaccaaaatccacttacactcttgttgtcacaatgagggagctgacgtatctaccaacacaaaactttaatttgaccctgcagtctaatatatgcgaagataggtacatctattcatttatgagcctatcagaatctgatcagttttttgaggatttaaaggagataaggaatgtggcgccgcctcaggtgaaactgaaagcagttttttctctgcaaggacagacaacgtttgagaacggatcgtcaactggagaaaacttagtccaacctttaattaacatatggactttgttcaaccctgccaaggatttttctagtatgctgatctctctagatgctgatccaacagagtcatgggttataacaggtcaccgccacggtgatgttgctttatggaagcacggcatgcagcatactcatctgggatcatagactggggtatttgctcgtccagagcgcttatcgttcatccaacccagccatatttgctctctacctgtgaagaaatgaagctttgggactgggacgatgattggaagtgcatacaaaaatttggtagggaacacactgattccatacttcaagtggcatttagcccaaatgacagttttgccagtgtttcaagtgatcacacaataaagctttggtgcctgaaatctcccacatcagagtgtactctgcacggccattcggacaaagtgaattgcttggatttcgtcacacatgatggtcagcaatatttgattagtggatctcaagactgtactgccaaggcatgggccttgaaggaaaaggaatgcgtccagacaatggatgttttcatgtcgccagttgtttctgtcatttcccttccggacactccatatataactacaggttcagcagatggcactattcatttgtggagttctgctaatttcaggcttgagagaatacttagccttggtttatgtggccctgtttgggatctacgtttgattgggccaacgaggatcgtgattcaaccgaacaactatgaaatatcagtcatcatggatattgacacaggttctgaggctagctcgtcagctccctcaaatgagctgatccaggttgaccccaaagagttgcgcttcccggttgcccaagaggtgtcaagcacactagagatccgtaacgttacagatcaccatgtggcattctgtatgtggtcattgaaccatacagcaaattacattccagtgccgaacatagaagttctatcaccacagtcaatgcggcaagttgttataacaagaattgcacgacgagagcctgtgccagcagaccccgtcgacgacatagtctatgtgaagggcactaccgtggttcagggtacaacgagcgcagatgtcacttatgacatgttcgatggaacaaggacaggccaaattctgcaaccggccatggagctgaatgttgttctcgtagctgactccgagatcatacacaaagcaaggttaccatgggccttagatgtgcatccaacaatgccatggataatgatggctcaaggagattaccaaattcgtatatggaactataagacacgggcaattacttcggctaaatttataatgcacaagcaatggattctggcgggctgttctagtggacttgtctatgtgtaccgttatgaaccagaaaagaaaaaatcagtagagaaaatccgagttctacaaggacactcaaatgctatcaattccttggctgttcattcaactaagccatgcgtgctgtcagcatccaaagatggcaaaattttgatctgggactatgaaaatgagtgggagttaatgaaaacatttgatgtcaaaagtcctgtgcagcatgttgcgtttagcccaaaggactccaatatgttcgccagtgcccaggacaaaacagtaaagatatgggattggcattctggtaactgcaagtctacattgtctgggcattcagatttggtgttatgtctggattacttcagtcagggtgatcagctatacttgatcactggttcacgagacaaaactgccaagatatgggattgcaagacgaggagttgtgttcggacattggaagggcatacagatgttgttaatgttgcatgttgccatccagatcttctaatactaattacaggttcattgaacgggtcagttcgtctgtgggatttgaatcgctcaactacgttccgatatgagctcatatttgaccttggagaagtatatgctatagcaagtttgaagggtacaaggattgtgattggacacgaaataggattagcactggtagacatagacctagagggcaagaaggatggatatgtgaagagcaatgtcgcaattatggattcaaaaaatgacacagatcaaaatatgaaagagttaagcccaacagcttcctcaagtgaggtgcaaaaggtgtcaagcattatagcattggagactctatacaaaatgaagtcatcagaatcgtctatagatgtccatccaacagagacatggatggtcattacatccgacaaatatgttcatatatgggactaccatacaaggtcagattggctaaatttatagcccgcaagcaatgggttattgcgggtgctactagtggattcatcttcgtctatgattatgactcaaaaaaggaaataatacacgttttgtgtaaccacacagaacccatcaagtctttggctattcacggaactgagccccttgtgctgtcagcatccgtggatggcaaaattttgctgtgggactatgcaaatgactggcatttgattaaaacatttgatgcgagaagtcaacgtttggtgcaagtcgcgtttaatccaaaggacaccaatatgtttgctagtgctcagggcaaaacagtaaagatttgggatcgccagcatgatgaatgccaatacaaattagatgggcattcacatcagatcgagtgttttgattactttagtggtggtgattttgataagctatatatagtcaccggctctcaagataaaactgccaagatctgggactgcgagaatgcgggctgtgtccagacactggaaggacatgcaggtcccgttagagctgtctgttaccatcagaatctctcgttattaattacagggtgctctgacggatcaattcatctatggaactccactaccttcaggcttgagcataaactgaactttgctgacttcggattactgagttctgtagcttgtttgaaaggatcgaaaaggattgcaatcagaagcagggaaggattagcacttgtagacatagacatagaggacaagaaggatagcgatgtggagagcatcacgactactgcttccatgaacgacacaggtccaattacagaagagaacggagtggcagcagaccatatctctgatgaccacctggcgcagggcgtagtatatgtacatacagagattataggcaaagtcaattcagcatgcaccatagacgtccatccgacaaagccatggatggtcatcactcaagctaacaagtttgttcatgtttgggactaccatacaaaggtagtggaatggacgattcagattaagggagcgaaagttagttcagctaaatttatagccagccaggattggattgtggcgggtactacccgtggattcctccacgtgtacgattgcgaatcgaggaaggaaatacgccgtctttgtgaacacccgaaatctatcacgtcattggctgttgacgatgatgcccttgagctggtgctgtcagcgtccatcgatggcaagattttgatctggagctactggcactactatcacgcacgtagacgtagtacctggcatttggaaaaaacatttgacgcgggaagccagtgtctgaagcaagtcgcgtttattgctccaagtgtccatcgcagcagcagcactatcatcgctactgctcgagacggaacagtaaagatttgggatcccgatcgttctgacggatgccgtgagttcacattggctgcggattcaggtcagattgttgaatgtttcgattggtttagtcgtggtactgatatatacttggtcaccggttctcgagacaacactgccaagatctgggacatagaggatgggagttgtgtccgaacactggaaggacacgcagatcatgttaccgttgtctgttaccatccggatctttcaatgctcattacaggttcaagggacggctcgattcgtctgtggaactccactaccttcaggtttgagcatgagctgaactttgacctcgggtctctgagttctttagcttgtatcaagggatcaacaaggattgcaatcggatatgaaagaggtctagtactggcagacatttgcactcaggaacatagagcatgatctataaagcggcataataccttgagagcgacagaataaaatctaaacattgataaagcggcaaaaatccctggcaaacatttgctgatgcgatgggattgcatccaaacatttttcttggtaagctaatagactgcaataagtttttccatggacttgggaggtgtcgatctgcggatatgcttttgtatggtttaaacatatcatcggatagaaatttatactactatattaaaaatttaatatggac

SEQ ID NO: 41151 - DNA, 7578 bp, Zea Mays
gttccattacagtctacaacaacaacaaccaagtcattctcgtgaccaaaaattgcttcacctgctcccgtatgcatgatactcgggagattttccgggcagaagaggaaatcctgacaagtagtgcgttccttgctcacaggccctcgttgtgtcatgtaactgcaaatggctcgccaaactagcgttacagaagctgacctggagttcatgctaattgatgaaaatgcaaagccgaagcccctgccttattcacttctcgaaaagatcacaaatggtttctccggggcacatattattgggtatggtggatctgcagatgtttatgagggattcatcgggaatcacaaaatcgctgtgaagaggttgcgcataccatatcagcacgagaaggaattcagtcaagagattgaatgcctgatgaaggtgaagcacataaatgtcgttaggtttataggatattgttccgacacgcaagggcaggcggaaaagtatgaagataatcatgtcatggcagacagccaagaacggttaatttgttttgaatttctaccagcatgtcttgataaatacatcaaagatccatcatgttcacttgaatggagacagcgctatcaaataatcaacggagtttgtcagggcttacatcaacttcatgagcatgaaattcttcacttggatctgaatccgagaaatatacttctagacgatgacatggtcccaaagatttctgattttggcatctccaagtgcttgaaaaaaaaccaaggccacttttatactgaaactataagtggaacaccgatatatatgtcaccggaacggggcaaacatggtccaatcacaacgaagtctgatttgtttagtcttggtgtcacagttatcgagataatgacagggaacaaggagaacattgatcaagccactgttgaagatgtatttgctagctgcatcaaaattttcaatgataaatcattgacagctgcacaagtgcggcagataatggtatgtgctgagatagggattaagtgccgcaacagtgaaccagacaagagaccatcaaatacaaaggaaataatcgataagcttgaagaggaagcaaggacagaggaatctcaagagtctggcaagctacttaaggtcctaccaaccctactcctgtttgatttgcatcccgggaaattgatcccatgctcactgcagctaacaaacgacacggatgaacacatggcatataagcttagtataacagagagtgtggactggtcaaagtacttcacgaccaagctgccgctatatggcattgtgcaggcgcgatccacttacactgtcattctgacagtgttgttggagtgtgatgctccggtcattaacagatcttgttatatgaccctgcagagctgtacactggcatatgagtacatctggaagttcaataacacacttgagtttgaggattttcttgaggttaagaaaacagagaatgcggtgaaggaagtgaaactgaaagcatttttgtgtgaggaaggacgatcaatttctaagcaaacgaggccgcgcgtcaagctcttgtccatagtgaaaccacaaacacctctgttgtcattggatgcacacccgaccaagccctgggtcataactggtcatgcctttggacatgttcgcatttggaaccatgagacacagaagctactgtattcgtttaaactatctctgggaccagtttattctgtcaaatttattgcacggaagcaatggttcgtctccagctctgcagaaggcctcatacatgtctacagtatggaaacaaaaatgcagaaggtcaagagttacagagctcatgacggcgtcagcatatcgctggccgtgcatccaaccctaccatatgtgctgtcatggccttgttcgggcccccacgagaagaagctatggaactgggaaaagggatgggactgcacacaaacatttgagagggagtacgttgcaaggaattttgtatgtcaagttgcttttgacccaaaggagaccaacagatttgctagcgcttcgaactatagggttaaggtttggagcgttgatcttcccaaatgtaactataatctgcctggtttttttaacgaagtgaacttcctggaattcttcacacgtgatgatcaacagtatttgattattactgtctctcatgataagactgcaaaaatatgggacatgcggaacaagaaatatgtttatgatagtatggaacaaaatttgatgtctcccgtgtcttctgtcttctcacatcccaatctgccgatactacttacacgttcaattgatggcacttctcatttctggagtcccaaagatttcaggtttgaggcagtccttgactgtcgttatggaggacatgtatggggcattgcatgtttgatgggatcaaaaagaaggtttgtaattggacaagaaactgcattaacaatcctggatgttggtgaccaagaatgccaggacatgagacaagaaggcacaagttctgaggtgataaccccagggtcaagcgagcttttgcttgacgtccacccgctgacactccactttcccttccatgcccacaagttgatcccgtgcacgctgcacctaacaaataaaacagatgaacatgtggcttttaatcttagtatagaagacggaatggagtcttggcagcagatctttgtaaggatgcccctaagtggaattgtgccaccaaaatccacttacactcttgttgtcacaatgagggagctgacgtatctaccaacacaaaactttaatttgaccctgcagtctaatatatgcgaagataggtacatctattcatttatgagcctatcagaatctgatcagttttttgaggatttaaaggagataaggaatgtggcgccgcctcaggtgaaactgaaagcagttttttctctgcaaggacagacaacgtttgagaacggatcgtcaactggagaaaacttagtccaacctttaattaacatatggactttgttcaaccctgccaaggatttttctagtatgctgatctctctagatgctgatccaacagagtcatgggttataacaggtcaccgccacggtgatgttgctttatggaagcacggcatgcagaaaatgatgtctttgattaacatatcgggagaagcaagccttcctcggaatagcttgaacacccaacatgatgtttattccgttaaattcattgcaaggaagcggtggtttgtagccgggacatgtgatggtttcatccatgtgtataagtatgaaacaagaataatggactgcataaagagattcagagcatactcatctgggatcatagactggggtatttgctcgtccagagcgcttatcgttcatccaacccagccatatttgctctctacctgtgaagaaatgaagctttgggactgggacgatgattggaagtgcatacaaaaatttggtagggaacacactgattccatacttcaagtggcatttagcccaaatgacagttttgccagtgtttcaagtgatcacacaataaagctttggtgcctgaaatctcccacatcagagtgtactctgcacggccattcggacaaagtgaattgcttggatttcgtcacacatgatggtcagcaatatttgattagtggatctcaagactgtactgccaaggcatgggccttgaaggaaaaggaatgcgtccagacaatggatgttttcatgtcgccagttgtttctgtcatttcccttccggacactccatatataactacaggttcagcagatggcactattcatttgtggagttctgctaatttcaggcttgagagaatacttagccttggtttatgtggccctgtttgggatctacgtttgattgggccaacgaggatcgtgattcaaccgaacaactatgaaatatcagtcatcatggatattgacacaggttctgaggctagctcgtcagctccctcaaatgagctgatccaggttgaccccaaagagttgcgcttcccggttgcccaagaggtgtcaagcacactagagatccgtaacgttacagatcaccatgtggcattctgtatgtggtcattgaaccatacagcaaattacattccagtgccgaacatagaagttctatcaccacagtcaatgcggcaagttgttataacaagaattgcacgacgagagcctgtgccagcagaccccgtcgacgacatagtctatgtgaagggcactaccgtggttcagggtacaacgagcgcagatgtcacttatgacatgttcgatggaacaaggacaggccaaattctgcaaccggccatggagctgaatgttgttctcgtagctgactccgagatcatacacaaagcaaggttaccatgggccttagatgtgcatccaacaatgccatggataatgatggctcaaggagattaccaaattcgtatatggaactataagacacggatagagaaacctattgctatcaaggggagagaagttacttcggctaaatttataatgcacaagcaatggattctggcgggctgttctagtggacttgtctatgtgtaccgttatgaaccagaaaagaaaaaatcagtagagaaaatccgagttctacaaggacactcaaatgctatcaattccttggctgttcattcaactaagccatgcgtgctgtcagcatccaaagatggcaaaattttgatctgggactatgaaaatgagtgggagttaatgaaaacatttgatgtcaaaagtcctgtgcagcatgttgcgtttagcccaaaggactccaatatgttcgccagtgcccaggacaaaacagtaaagatatgggattggcattctggtaactgcaagtctacattgtctgggcattcagatttggtgttatgtctggattacttcagtcagggtgatcagctatacttgatcactggttcacgagacaaaactgccaagatatgggattgcaagacgaggagttgtgttcggacattggaagggcatacagatgttgttaatgttgcatgttgccatccagatcttctaatactaattacaggttcattgaacgggtcagttcgtctgtgggatttgaatcgctcaactacgttccgatatgagctcatatttgaccttggagaagtatatgctatagcaagtttgaagggtacaaggattgtgattggacacgaaataggattagcactggtagacatagacctagagggcaagaaggatggatatgtgaagagcaatgtcgcaattatggattcaaaaaatgacacagatcaaaatatgaaagagttaagcccaacagcttcctcaagtgaggtgcaaaaggtgtcaagcattatagcattggagactctatacaaaatgaagtcatcagaatcgtctatagatgtccatccaacagagacatggatggtcattacatccgacaaatatgttcatatatgggactaccatacaaggtcagattggctaaatttatagcccgcaagcaatgggttattgcgggtgctactagtggattcatcttcgtctatgattatgactcaaaaaaggaaataatacacgttttgtgtaaccacacagaacccatcaagtctttggctattcacggaactgagccccttgtgctgtcagcatccgtggatggcaaaattttgctgtgggactatgcaaatgactggcatttgattaaaacatttgatgcgagaagtcaacgtttggtgcaagtcgcgtttaatccaaaggacaccaatatgtttgctagtgctcagggcaaaacagtaaagatttgggatcgccagcatgatgaatgccaatacaaattagatgggcattcacatcagatcgagtgttttgattactttagtggtggtgattttgataagctatatatagtcaccggctctcaagataaaactgccaagatctgggactgcgagaatgcgggctgtgtccagacactggaaggacatgcaggtcccgttagagctgtctgttaccatcagaatctctcgttattaattacagggtgctctgacggatcaattcatctatggaactccactaccttcaggcttgagcataaactgaactttgctgacttcggattactgagttctgtagcttgtttgaaaggatcgaaaaggattgcaatcagaagcagggaaggattagcacttgtagacatagacatagaggacaagaaggatagcgatgtggagagcatcacgactactgcttccatgaacgacacaggtccaattacagaagagaacggagtggcagcagaccatatctctgatgaccacctggcgcagggcgtagtatatgtacatacagagattataggcaaagtcaattcagcatgcaccatagacgtccatccgacaaagccatggatggtcatcactcaagctaacaagtttgttcatgtttgggactaccatacaaaggtagtggaatggacgattcagattaagggagcgaaagttagttcagctaaatttatagccagccaggattggattgtggcgggtactacccgtggattcctccacgtgtacgattgcgaatcgaggaaggaaatacgccgtctttgtgaacacccgaaatctatcacgtcattggctgttgacgatgatgcccttgagctggtgctgtcagcgtccatcgatggcaagattttgatctggagctactggcactactatcacgcacgtagacgtagtacctggcatttggaaaaaacatttgacgcgggaagccagtgtctgaagcaagtcgcgtttattgctccaagtgtccatcgcagcagcagcactatcatcgctactgctcgagacggaacagtaaagatttgggatcccgatcgttctgacggatgccgtgagttcacattggctgcggattcaggtcagattgttgaatgtttcgattggtttagtcgtggtactgatatatacttggtcaccggttctcgagacaacactgccaagatctgggacatagaggatgggagttgtgtccgaacactggaaggacacgcagatcatgttaccgttgtctgttaccatccggatctttcaatgctcattacaggttcaagggacggctcgattcgtctgtggaactccactaccttcaggtttgagcatgagctgaactttgacctcgggtctctgagttctttagcttgtatcaagggatcaacaaggattgcaatcggatatgaaagaggtctagtactggcagacatttgcactcaggaacatagagcatgatctataaagcggcataataccttgagagcgacagaataaaatctaaacattgataaagcggcaaaaatccctggcaaacatttgctgatgcgatgggattgcatccaaacatttttcttggtaagctaatagactgcaataagtttttccatggacttgggaggtgtcgatctgcggatatgcttttgtatggtttaaacatatcatcggatagaaatttatactactatattaaaaatttaatatggac

SEQ ID NO: 41152 - DNA, 4369 bp, Zea Mays
tccggatcggacagagcaacaaaacaacatgcggttggattgggacaccaacatgccaaactcgtcggttggattgggacatcaacaaggcacaatactcatcgcctacagaatcatactcatctgggatcatagactggggtatttgctcgtccagagcgcttatcgttcatccaacccagccatatttgctctctacctgtgaagaaatgaagctttgggactgggacgatgattggaagtgcatacaaaaatttggtagggaacacactgattccatacttcaagtggcatttagcccaaatgacagttttgccagtgtttcaagtgatcacacaataaagctttggtgcctgaaatctcccacatcagagtgtactctgcacggccattcggacaaagtgaattgcttggatttcgtcacacatgatggtcagcaatatttgattagtggatctcaagactgtactgccaaggcatgggccttgaaggaaaaggaatgcgtccagacaatggatgttttcatgtcgccagttgtttctgtcatttcccttccggacactccatatataactacaggttcagcagatggcactattcatttgtggagttctgctaatttcaggcttgagagaatacttagccttggtttatgtggccctgtttgggatctacgtttgattgggccaacgaggatcgtgattcaaccgaacaactatgaaatatcagtcatcatggatattgacacaggttctgaggctagctcgtcagctccctcaaatgagctgatccaggttgaccccaaagagttgcgcttcccggttgcccaagaggtgtcaagcacactagagatccgtaacgttacagatcaccatgtggcattctgtatgtggtcattgaaccatacagcaaattacattccagtgccgaacatagaagttctatcaccacagtcaatgcggcaagttgttataacaagaattgcacgacgagagcctgtgccagcagaccccgtcgacgacatagtctatgtgaagggcactaccgtggttcagggtacaacgagcgcagatgtcacttatgacatgttcgatggaacaaggacaggccaaattctgcaaccggccatggagctgaatgttgttctcgtagctgactccgagatcatacacaaagcaaggttaccatgggccttagatgtgcatccaacaatgccatggataatgatggctcaaggagattaccaaattcgtatatggaactataagacacgggcaattacttcggctaaatttataatgcacaagcaatggattctggcgggctgttctagtggacttgtctatgtgtaccgttatgaaccagaaaagaaaaaatcagtagagaaaatccgagttctacaaggacactcaaatgctatcaattccttggctgttcattcaactaagccatgcgtgctgtcagcatccaaagatggcaaaattttgatctgggactatgaaaatgagtgggagttaatgaaaacatttgatgtcaaaagtcctgtgcagcatgttgcgtttagcccaaaggactccaatatgttcgccagtgcccaggacaaaacagtaaagatatgggattggcattctggtaactgcaagtctacattgtctgggcattcagatttggtgttatgtctggattacttcagtcagggtgatcagctatacttgatcactggttcacgagacaaaactgccaagatatgggattgcaagacgaggagttgtgttcggacattggaagggcatacagatgttgttaatgttgcatgttgccatccagatcttctaatactaattacaggttcattgaacgggtcagttcgtctgtgggatttgaatcgctcaactacgttccgatgagctcatatttgaccttggagaagtatatgctatagcaagtttgaagggtacaaggattgtgattggacacgaaataggattagcactggtagacatagacctagagggcaagaaggatggatatgtgaagagcaatgtcgcaattatggattcaaaaaatgacacagatcaaaatatgaaagagttaagcccaacagcttcctcaagtgaggtgcaaaaggtgtcaagcattatagcattggagactctatacaaaatgaagtcatcagaatcgtctatagatgtccatccaacagagacatggatggtcattacatccgacaaatatgttcatatatgggactaccatacaagggaagtgaaacagatgatggatactaagggagcgaaagtcagattggctaaatttatagcccgcaagcaatgggttattgcgggtgctactagtggattcatcttcgtctatgattatgactcaaaaaaggaaataatacacgttttgtgtaaccacacagaacccatcaagtctttggctattcacggaactgagccccttgtgctgtcagcatccgtggatggcaaaattttgctgtgggactatgcaaatgactggcatttgattaaaacatttgatgcgagaagtcaacgtttggtgcaagtcgcgtttaatccaaaggacaccaatatgtttgctagtgctcagggcaaaacagtaaagatttgggatcgccagcatgatgaatgccaatacaaattagatgggcattcacatcagatcgagtgttttgattactttagtggtggtgattttgataagctatatatagtcaccggctctcaagataaaactgccaagatctgggactgcgagaatgcgggctgtgtccagacactggaaggacatgcaggtcccgttagagctgtctgttaccatcagaatctctcgttattaattacagggtgctctgacggatcaattcatctatggaactccactaccttcaggcttgagcataaactgaactttgctgacttcggattactgagttctgtagcttgtttgaaaggatcgaaaaggattgcaatcagaagcagggaaggattagcacttgtagacatagacatagaggacaagaaggatagcgatgtggagagcatcacgactactgcttccatgaacgacacaggtccaattacagaagagaacggagtggcagcagaccatatctctgatgaccacctggcgcagggcgtagtatatgtacatacagagattataggcaaagtcaattcagcatgcaccatagacgtccatccgacaaagccatggatggtcatcactcaagctaacaagtttgttcatgtttgggactaccatacaaaggtagtggaatggacgattcagattaagggagcgaaagttagttcagctaaatttatagccagccaggattggattgtggcgggtactacccgtggattcctccacgtgtacgattgcgaatcgaggaaggaaatacgccgtctttgtgaacacccgaaatctatcacgtcattggctgttgacgatgatgcccttgagctggtgctgtcagcgtccatcgatggcaagattttgatctggagctactggcactactatcacgcacgtagacgtagtacctggcatttggaaaaaacatttgacgcgggaagccagtgtctgaagcaagtcgcgtttattgctccaagtgtccatcgcagcagcagcactatcatcgctactgctcgagacggaacagtaaagatttgggatcccgatcgttctgacggatgccgtgagttcacattggctgcggattcaggtcagattgttgaatgtttcgattggtttagtcgtggtactgatatatacttggtcaccggttctcgagacaacactgccaagatctgggacatagaggatgggagttgtgtccgaacactggaaggacacgcagatcatgttaccgttgtctgttaccatccggatctttcaatgctcattacaggttcaagggacggctcgattcgtctgtggaactccactaccttcaggtttgagcatgagctgaactttgacctcgggtctctgagttctttagcttgtatcaagggatcaacaaggattgcaatcggatatgaaagaggtctagtactggcagacatttgcactcaggaacatagagcatgatctataaagcggcataataccttgagagcgacagaataaaatctaaacattgataaagcggcaaaaatccctggcaaacatttgctgatgcgatgggattgcatccaaacatttttcttggtaagctaatagactgcaataagtttttccatggacttgggaggtgtcgatctgcggatatgcttttgtatggtttaaacatatcatcggatagaaatttatactactatattaaaaatttaatatggac

SEQ ID NO: 41153 - DNA, 3228 bp, Zea Mays
ctttgctgcaaatggctgtcgtctcaaacgtaagcaactaacatgtggctgtatatatatgtacacacgcatagacgcgatcttagtacaacgcgcgactccatacaacaatacaaacaaagctgtaacgtactgtaaaagtaagatatggaggccgccggcggcggcggcgaggttcacaaggctagcaacgacaaggaggagcatttcgtgctcgtgcacggcgccggccacggcgcctggtgctggttcaagctggcgtgcctgctccggggctccggccgccaccgcgtctcctgcgtcgacctcgccggggccgccggcagcctcgtcgacccggacgacgtccgctcgttcgacgagtacgacgcgccgctcctcgacttgatggccgccttgccggacgacggccgcaaggtggttctggtagggcatagcgcaggaggactgagcgtcacccacgcgatgcatctgttcagagacaagatcaagcaggccatcttcgtagcagcgaccatgctcccgttcgggtaccagtcggagcaagatatcaaagatggagcacctgatctatccgagttcggcgacgacgtttacgacctcaagttcagtctgggagacgaccgccctccgacgagcgtggcgctgagagaggagcaccagcgcgcgatcctgtaccagcaatgcacccacgaggactccacgctcgcatccattctgctgcgcccgtggccggcagctctgggcgccgccaggttcggcttcggccgcgccgacgacggcgccgtgaacactgtgcgtcgggtgtacgtgaagacggccaacgaccgcatgctgaagccggagcagcaggaggcgatggtccgccggtggccgccgagcgaggtggcggcgatggacaccgaccacagccctttcttctccgccccagagcgcctcttcgagctgatcatcaagtcattgtgaatctctcatctgtagtaatcgcttgtgttcttccagactccagtgcctggtgctgtcctgtatgccatgccaaccaataagttatcatttatttatcaataaattatctcaaccaagttatcatttatttaccatgctgaaaaacatgaggtcagaaggctaaatatatataccactcagcccagccacacacacaaaaaaaaagagggggaaaagatggagaaaaactagccggtccacacactagactagatcctgagcatctaccatattaggcacctctgcatgccagaaacacctggtgtccagactagagactccctatttagaatagaaatcaccggacgccttgtcggtttggcgtttaatttggactggcgaagaaaatgcaggcccccctgctgctgctgcacgtccgtcaaatagattggtagggagcccagagggtgatgggaatggcgaaggagcagcacttcgtgcttgttcatggcgaagggcatggggcctggtgctggttcaagctccgctggctcctcgagggcgctggccaccgtgtcacgtgcgttgacctggccggaggcggcgtcgatcctaccgaccccaacaccatccggtccttcaagcagtacgacaagccgctcatagacctcatctccaacttgccagacggagagaaggtgattctgatcggacatggcgctggagggctgagtgtgatccatgcaatgcatgaatttgttgacaggatcggtcaagcatttttcgtggccgccacaatgctgccgtttggatttcaagccgatgaagataagaacgatgtaatgtttttgaagaatttgtttgccatctttttaaaccacatagaccctcctagcaaatgataaaaaaatatagagtacacatcaaacaaacatatacatataggggcaaaccttaaggcttttattatagaagaaaaatgtaataacacatatgagcatggaaactctgaaacaatcatacgaagttgcgttagctcgtggtgaatctactataattaatcttcttttataatacgatgtatgattgttacatccttctcatatcaacatgtaacaggggttaccgactttgcccgagaacgagattgagttgacacttggtgcaggagcagatgatcctccaacaaccattgccttgaggccagaattccagcgtgatcgactatcacaacaaagccctgaagaggaatcagtacttgcttcaatgctgatgcgtccgtggcctgcaacagctatcagtacagcaagcttcgaaggagatgatgagagattgaaccgaatcaaacgaactttcataaagatggagcgcgaccacatgctggatcctcaacagcaagactccatgatcaaaaagtggccacccagtgaggttttggtcatagatacagatcacagccccttcttctctgcaccagaacagctgttcaatttaatagtcaaatctctatgatgacaaatgcagaaagctactgactggggttgcccaaattcttgtaacactacccacaaacaataatcaccacaagatttaggacctcagatttgtcaaacatgcttctcaatgaatcttcctggcatatccgcatatctacaaatatggtttaatggtgcaagattgcaagtaaaagatcgcttagcgcaaacacttaaattcagttttttgaacaactcactcaagtcagagcctttataatttccataccaaaagttcttacatgtcacgcataaaaaacataaaatatagatgctactttggaagcacttttaattgcaccggtgatggataacaatatatagtttggaccagtttttgttaacctgagttccctcttaatgaaaggcatgtcatcggaaatgttctaaaaaaagttaatgtgatgaggccttcagagttatcactttcctctttttagcaattcaagagttcttgttttcatcaaataactgatgagcaatagaattttcacttcaaatagtttcataatatacaatcacctcatgacaatatggggacttatcaactgtcagaacaaatatgaacagaagctaaatcaattcccagtgcactatggttcatgataaaatccatcccaatagttccagaataagcatctgccatctgggttcacatgcagaagttttggagtcgacggaccataaaacccttcaacgccgcatctctaaaaggtgcacagggtctatagatttcacataagacgcc

SEQ ID NO: 41154 - DNA, 3014 bp, Zea Mays
cgtctcaaacgtaagcaactaacatgtggctgtatatatatgtacacacgcatagacgcgatcttagtacaacgcgcgactccatacaacaatacaaacaaagctgtaacgtactgtaaaagtaagatatggaggccgccggcggcggcggcgaggttcacaaggctagcaacgacaaggaggagcatttcgtgctcgtgcacggcgccggccacggcgcctggtgctggttcaagctggcgtgcctgctccggggctccggccgccaccgcgtctcctgcgtcgacctcgccggggccgccggcagcctcgtcgacccggacgacgtccgctcgttcgacgagtacgacgcgccgctcctcgacttgatggccgccttgccggacgacggccgcaaggtggttctggtagggcatagcgcaggaggactgagcgtcacccacgcgatgcatctgttcagagacaagatcaagcaggccatcttcgtagcagcgaccatgctcccgttcgggtaccagtcggagcaagatatcaaagatgtgatcccccctcccccttattgccttgttcaactctcgttaattttatatctggtaactgaaaacttggactggaaaccaacagggagcacctgatctatccgagttcggcgacgacgtttacgacctcaagttcagtctgggagacgaccgccctccgacgagcgtggcgctgagagaggagcaccagcgcgcgatcctgtaccagcaatgcacccacgaggactccacgctcgcatccattctgctgcgcccgtggccggcagctctgggcgccgccaggttcggcttcggccgcgccgacgacggcgccgtgaacactgtgcgtcgggtgtacgtgaagacggccaacgaccgcatgctgaagccggagcagcaggaggcgatggtccgccggtggccgccgagcgaggtggcggcgatggacaccgaccacagccctttcttctccgccccagagcgcctcttcgagctgatcatcaagtcattgtgaatctctcatctgtagtaatcgcttgtgttcttccagactccagtgcctggtgctgtcctgtatgccatgccaaccaataagttatcatttatttatcaataaattatctcaaccaagttatcatttatttaccatgctgaaaaacatgaggtcagaaggctaaatatatataccactcagcccagccacacacacaaaaaaaaagagggggaaaagatggagaaaaactagccggtccacacactagactagatcctgagcatctaccatattaggcacctctgcatgccagaaacacctggtgtccagactagagactccctatttagaatagaaatcaccggacgccttgtcggtttggcgtttaatttggactggcgaagaaaatgcaggcccccctgctgctgctgcacgtccgtcaaatagattggtagggagcccagagggtgatgggaatggcgaaggagcagcacttcgtgcttgttcatggcgaagggcatggggcctggtgctggttcaagctccgctggctcctcgagggcgctggccaccgtgtcacgtgcgttgacctggccggaggcggcgtcgatcctaccgaccccaacaccatccggtccttcaagcagtacgacaagccgctcatagacctcatctccaacttgccagacggagagaaggtgattctgatcggacatggcgctggagggctgagtgtgatccatgcaatgcatgaatttgttgacaggatcggtcaagcatttttcgtggccgccacaatgctgccgtttggatttcaagccgatgaagataagaacgatgggttaccgactttgcccgagaacgagattgagttgacacttggtgcaggagcagatgatcctccaacaaccattgccttgaggccagaattccagcgtgatcgactatcacaacaaagccctgaagaggaatcagtacttgcttcaatgctgatgcgtccgtggcctgcaacagctatcagtacagcaagcttcgaaggagatgatgagagattgaaccgaatcaaacgaactttcataaagatggagcgcgaccacatgctggatcctcaacagcaagactccatgatcaaaaagtggccacccagtgaggttttggtcatagatacagatcacagccccttcttctctgcaccagaacagctgttcaatttaatagtcaaatctctatgatgacaaatgcagaaagctactgactggggttgcccaaattcttgtaacactacccacaaacaataatcaccacaagatttaggacctcagatttgtcaaacatgcttctcaatgaatcttcctggcatatccgcatatctacaaatatggtttaatggtgcaagattgcaagtaaaagatcgcttagcgcaaacacttaaattcagttttttgaacaactcactcaagtcagagcctttataatttccataccaaaagttcttacatgtcacgcataaaaaacataaaatatagatgctactttggaagcacttttaattgcaccggtgatggataacaatatatagtttggaccagtttttgttaacctgagttccctcttaatgaaaggcatgtcatcggaaatgttctaaaaaaagttaatgtgatgaggccttcagagttatcactttcctctttttagcaattcaagagttcttgttttcatcaaataactgatgagcaatagaattttcacttcaaatagtttcataatatacaatcacctcatgacaatatggggacttatcaactgtcagaacaaatatgaacagaagctaaatcaattcccagtgcactatggttcatgataaaatccatcccaatagttccagaataagcatctgccatctgggttcacatgcagaagttttggagtcgacggaccataaaacccttcaacgccgcatctctaaaaggtgcacagggtctatagatttcacataagacgcc

SEQ ID NO: 41155 - DNA, 2466 bp, Zea Mays
cagctcccaggcaagaatcgtagggtcatccatgtaggcgacatttgtgattgtattttttctcatcaaaacagcctaagatatgaaagaacaatgtatgcaattgtgatggtatctggtaagacatggcagaagggcgatcaaacaaaataagtgccataaaaaacagctgttgttaagaattcagatcccaacgctatgaatataccaacactcgcttctccatcttgtgaatgtggcatcagggaagaaggcgtcatcagaagtatgatccaggccagcctcctttccccaccttggcatgctgtgccttacctccataatcttaccagctattacacagtgacagtatcagcctcatcttatagtttcctgcctcgctgatcacaaaatctaatgcctataacaagggaaaaaaaggaattctaagcttagctgtcacttaattagtaaatagcgagtctctgtttgagagatacaggcaatgtagtactacaaactacaaacgctggacgataacaataataaatgatgtgaagacgcgcgcggatgcaccaagcatttcaccaaacaagcgccgcggatgctacagaatcgcgacgcgcgcgcacatagaagacctcctcgtcgtaggagaagtgcttgagctgcagcgcgcggtacccgccgtcgttgaaggcccaggtgcagcacacattgaggtccgcgcgggcggcgtccactagagcagcggtgaacgcggcgcgcgtggcggcgtccgccgcgaaatgagtcgtgcacgaagaagggccgccccgacgctcacaggtgcgggccccggcgctccaccgccgcccactcgccctcgtcggcacccagcagcatggcggaggggatgcagcaggaggccgcgaggaggacgcggcggaggagagacacccgcggcgtcgctcggcctcggagcggcggccgcggtggcgccgccaagcgaggacacgtcgggctgttccactcccacgccgattggtgggtccggtcaggcgggtcaacgcccgccccggcggcgggcatctggaggcttgctcttgtttggaggctgacacgtgggggccacaacacagcggcagaaataatcccgaccggaccaagcgcccaacaactgccgccccaagccaagggaagggaaaaggctatcgttctcgtcagtcgtcacgagagccgcgacggcgcgcatggcggcgacggcagcggcgctccggtgctgcttccccggatcctccggtgtcggtagtggcttcgtcaagcccaactcctccaggcgaggctggtgcgcagcggccgtggcggcgccgtcgcgggaggcggaaccggtttcgtcgctggggcaccgcacccgcgtcgacttccccatccttcaccaggaatttgatgatgccaaattagtttacttcgacaatggtgcaacatcgcagaaaccatgtagtgtgatgaaaacattagatgagtactaccgatcgtacaattcgaatgttcatcgtggtatccatgcactcagtgcgaaggctactcatgcatatgaggatgcaagaagaaaagttgcaaattttgtcaacgcagctgatagcagagagattgttttcactcgtaatgctactgaagctattaatctggtagcctattcatggggactatctaacttgaaagaaggagatgaaaagactggtgccaccttaaaatatgttggattgactaaagaaaatgtcccagacattgagcagttaaaagggtttctgtcgaacaagacaaagatagttgttgttcatcatgtctcaaatgttctaggttccatgcttcctatcgaggagattgtaacatggtcaaacagagttggagctaaagtccttgtagatgcttgccaaagtgttccccatatgccagttgatgttcagaaacttggcgcggactttcttgtcgcatcctctcataagatgtgtggccctacaggcgtcggatttttgcatggtaaatttgagattttgtcgtctatggagcctttcttaggtggtggtgaaatgattgcggatgtattcgaagacaaatccacatatgctgagcctccctctagatttgaggctggaactcctgcaattggagaagctataggactgggagcagccatcgactatttatcatgcattggcatggagcagatccacgaatatgaggtcaatacaaatcttggtcctgttgtgcgagctattcctacgatagcatcctcactcctgttagcttctgcattccagaaagagctggggacatacctctacgaaagccttctctctgttccaaatgtccagatatatggcccggcgccttcccagactgtccaccgtgctccgttgtgctccttcaatatcgagaacgtccatcctacagatatcgcagagattcttgatctgcagcattgtctctacagatatagcagaa

SEQ ID NO: 41156 - DNA, 2874 bp, Zea Mays
cagctcccaggcaagaatcgtagggtcatccatgtaggcgacatttgtgattgtattttttctcatcaaaacagcctaagatatgaaagaacaatgtatgcaattgtgatggtatctggtaagacatggcagaagggcgatcaaacaaaataagtgccataaaaaacagctgttgttaagaattcagatcccaacgctatgaatataccaacactcgcttctccatcttgtgaatgtggcatcagggaagaaggcgtcatcagaagtatgatccaggccagcctcctttccccaccttggcatgctgtgccttacctccataatcttaccagctattacacagtgacagtatcagcctcatcttatagtttcctgcctcgctgatcacaaaatctaatgcctataacaagggaaaaaaaggaattctaagcttagctgtcacttaattagtaaatagcgagtctctgtttgagagatacaggcaatgtagtactacaaactacaaacgctggacgataacaataataaatgatgtgaagacgcgcgcggatgcaccaagcatttcaccaaacaagcgccgcggatgctacagaatcgcgacgcgcgcgcacatagaagacctcctcgtcgtaggagaagtgcttgagctgcagcgcgcggtacccgccgtcgttgaaggcccaggtgcagcacacattgaggtccgcgcgggcggcgtccactagagcagcggtgaacgcggcgcgcgtggcggcgtccgccgcgaaatgagtcgtgcacgaagaagggccgccccgacgctcacaggtgcgggccccggcgctccaccgccgcccactcgccctcgtcggcacccagcagcatggcggaggggatgcagcaggaggccgcgaggaggacgcggcggaggagagacacccgcggcgtcgctcggcctcggagcggcggccgcggtggcgccgccaagcgaggacacgtcgggctgttccactcccacgccgattggtgggtccggtcaggcgggtcaacgcccgccccggcggcgggcatctggaggcttgctcttgtttggaggctgacacgtgggggccacaacacagcggcagaaataatcccgaccggaccaagcgcccaacaactgccgccccaagccaagggaagggaaaaggctatcgttctcgtcagtcgtcacgagagccgcgacggcgcgcatggcggcgacggcagcggcgctccggtgctgcttccccggatcctccggtgtcggtagtggcttcgtcaagcccaactcctccaggcgaggctggtgcgcagcggccgtggcggcgccgtcgcgggaggcggaaccggtttcgtcgctggggcaccgcacccgcgtcgacttccccatccttcaccaggaatttgatgatgccaaattagtttacttcgacaatggtgcaacatcgcagaaaccatgtagtgtgatgaaaacattagatgagtactaccgatcgtacaattcgaatgttcatcgtggtatccatgcactcagtgcgaaggctactcatgcatatgaggatgcaagaagaaaagttgcaaattttgtcaacgcagctgatagcagagagattgttttcactcgtaatgctactgaagctattaatctggtagcctattcatggggactatctaacttgaaagaaggagatgaaattgttcttacagttgcagagcatcatagtgctattgttccatggcaatttgtttcccagaagactggtgccaccttaaaatatgttggattgactaaagaaaatgtcccagacattgagcagttaaaagggtttctgtcgaacaagacaaagatagttgttgttcatcatgtctcaaatgttctaggttccatgcttcctatcgaggagattgtaacatggtcaaacagagttggagctaaagtccttgtagatgcttgccaaagtgttccccatatgccagttgatgttcagaaacttggcgcggactttcttgtcgcatcctctcataaggcgtcggatttttgcatggtaaatttgagattttgtcgtctatggagcctttcttaggtggtggtgaaatgattgcggatgtattcgaagacaaatccacatatgctgagcctccctctagatttgaggctggaactcctgcaattggagaagctataggactgggagcagccatcgactatttatcatgcattggcatggagcagatccacgaatatgagaaagagctggggacatacctctacgaaagccttctctctgttccaaatgtccagatatatggcccggcgccttcccagactgtccaccgtgctccgttgtgctccttcaatatcgagaacgtccatcctacagatatcgcagagattcttgatctgcagcatagcgtagcgattcggtcggggcatcactgcgcgcagatcttgcataggacccttggcatcaacgcaagtgctcgtgcgagtcttcacttctacaacacaaaagacgaggtggataccttcgtcgacgcgcttaaagccaccgttgatttcctcacggatcgatactagtgcggttcagttcagttcccttttttttttgccagtttcatcgctctctcgtttgaactgttgtatgcacacacaaaaaagtatgcatatatatttggtataaagaaaacatacaaagtgtacggcttggcaaagtgagctcccttatttggagttttggactgtactcccttatttggcggttgttgttgaattaaacgtagttcaggatgcagagagtacaaacgactcgaccatggtcactgttatgcagtaaaacattgttatacgagaagatgagccggcagttaactctg

SEQ ID NO: 41157 - DNA, 2829 bp, Zea Mays
cagctcccaggcaagaatcgtagggtcatccatgtaggcgacatttgtgattgtattttttctcatcaaaacagcctaagatatgaaagaacaatgtatgcaattgtgatggtatctggtaagacatggcagaagggcgatcaaacaaaataagtgccataaaaaacagctgttgttaagaattcagatcccaacgctatgaatataccaacactcgcttctccatcttgtgaatgtggcatcagggaagaaggcgtcatcagaagtatgatccaggccagcctcctttccccaccttggcatgctgtgccttacctccataatcttaccagctattacacagtgacagtatcagcctcatcttatagtttcctgcctcgctgatcacaaaatctaatgcctataacaagggaaaaaaaggaattctaagcttagctgtcacttaattagtaaatagcgagtctctgtttgagagatacaggcaatgtagtactacaaactacaaacgctggacgataacaataataaatgatgtgaagacgcgcgcggatgcaccaagcatttcaccaaacaagcgccgcggatgctacagaatcgcgacgcgcgcgcacatagaagacctcctcgtcgtaggagaagtgcttgagctgcagcgcgcggtacccgccgtcgttgaaggcccaggtgcagcacacattgaggtccgcgcgggcggcgtccactagagcagcggtgaacgcggcgcgcgtggcggcgtccgccgcgaaatgagtcgtgcacgaagaagggccgccccgacgctcacaggtgcgggccccggcgctccaccgccgcccactcgccctcgtcggcacccagcagcatggcggaggggatgcagcaggaggccgcgaggaggacgcggcggaggagagacacccgcggcgtcgctcggcctcggagcggcggccgcggtggcgccgccaagcgaggacacgtcgggctgttccactcccacgccgattggtgggtccggtcaggcgggtcaacgcccgccccggcggcgggcatctggaggcttgctcttgtttggaggctgacacgtgggggccacaacacagcggcagaaataatcccgaccggaccaagcgcccaacaactgccgccccaagccaagggaagggaaaaggctatcgttctcgtcagtcgtcacgagagccgcgacggcgcgcatggcggcgacggcagcggcgctccggtgctgcttccccggatcctccggtgtcggtagtggcttcgtcaagcccaactcctccaggcgaggctggtgcgcagcggccgtggcggcgccgtcgcgggaggcggaaccggtttcgtcgctggggcaccgcacccgcgtcgacttccccatccttcaccaggaatttgatgatgccaaattagtttacttcgacaatggtgcaacatcgcagaaaccatgtagtgtgatgaaaacattagatgagtactaccgatcgtacaattcgaatgttcatcgtggtatccatgcactcagtgcgaaggctactcatgcatatgaggatgcaagaagaaaagttgcaaattttgtcaacgcagctgatagcagagagattgttttcactcgtaatgctactgaagctattaatctggtagcctattcatggggactatctaacttgaaagaaggagatgaaaagactggtgccaccttaaaatatgttggattgactaaagaaaatgtcccagacattgagcagttaaaagggtttctgtcgaacaagacaaagatagttgttgttcatcatgtctcaaatgttctaggttccatgcttcctatcgaggagattgtaacatggtcaaacagagttggagctaaagtccttgtagatgcttgccaaagtgttccccatatgccagttgatgttcagaaacttggcgcggactttcttgtcgcatcctctcataagatgtgtggccctacaggcgtcggatttttgcatggtaaatttgagattttgtcgtctatggagcctttcttaggtggtggtgaaatgattgcggatgtattcgaagacaaatccacatatgctgagcctccctctagatttgaggctggaactcctgcaattggagaagctataggactgggagcagccatcgactatttatcatgcattggcatggagcagatccacgaatatgagaagagctggggacatacctctacgaaagccttctctctgttccaaatgtccagatatatggcccggcgccttcccagactgtccaccgtgctccgttgtgctccttcaatatcgagaacgtccatcctacagatatcgcagagattcttgatctgcagcatagcgtagcgattcggtcggggcatcactgcgcgcagatcttgcataggacccttggcatcaacgcaagtgctcgtgcgagtcttcacttctacaacacaaaagacgaggtggataccttcgtcgacgcgcttaaagccaccgttgatttcctcacggatcgatactagtgcggttcagttcagttcccttttttttttgccagtttcatcgctctctcgtttgaactgttgtatgcacacacaaaaaagtatgcatatatatttggtataaagaaaacatacaaagtgtacggcttggcaaagtgagctcccttatttggagttttggactgtactcccttatttggcggttgttgttgaattaaacgtagttcaggatgcagagagtacaaacgactcgaccatggtcactgttatgcagtaaaacattgttatacgagaagatgagccggcagttaactctg

SEQ ID NO: 41158 - DNA, 2867 bp, Zea Mays
cagctcccaggcaagaatcgtagggtcatccatgtaggcgacatttgtgattgtattttttctcatcaaaacagcctaagatatgaaagaacaatgtatgcaattgtgatggtatctggtaagacatggcagaagggcgatcaaacaaaataagtgccataaaaaacagctgttgttaagaattcagatcccaacgctatgaatataccaacactcgcttctccatcttgtgaatgtggcatcagggaagaaggcgtcatcagaagtatgatccaggccagcctcctttccccaccttggcatgctgtgccttacctccataatcttaccagctattacacagtgacagtatcagcctcatcttatagtttcctgcctcgctgatcacaaaatctaatgcctataacaagggaaaaaaaggaattctaagcttagctgtcacttaattagtaaatagcgagtctctgtttgagagatacaggcaatgtagtactacaaactacaaacgctggacgataacaataataaatgatgtgaagacgcgcgcggatgcaccaagcatttcaccaaacaagcgccgcggatgctacagaatcgcgacgcgcgcgcacatagaagacctcctcgtcgtaggagaagtgcttgagctgcagcgcgcggtacccgccgtcgttgaaggcccaggtgcagcacacattgaggtccgcgcgggcggcgtccactagagcagcggtgaacgcggcgcgcgtggcggcgtccgccgcgaaatgagtcgtgcacgaagaagggccgccccgacgctcacaggtgcgggccccggcgctccaccgccgcccactcgccctcgtcggcacccagcagcatggcggaggggatgcagcaggaggccgcgaggaggacgcggcggaggagagacacccgcggcgtcgctcggcctcggagcggcggccgcggtggcgccgccaagcgaggacacgtcgggctgttccactcccacgccgattggtgggtccggtcaggcgggtcaacgcccgccccggcggcgggcatctggaggcttgctcttgtttggaggctgacacgtgggggccacaacacagcggcagaaataatcccgaccggaccaagcgcccaacaactgccgccccaagccaagggaagggaaaaggctatcgttctcgtcagtcgtcacgagagccgcgacggcgcgcatggcggcgacggcagcggcgctccggtgctgcttccccggatcctccggtgtcggtagtggcttcgtcaagcccaactcctccaggcgaggctggtgcgcagcggccgtggcggcgccgtcgcgggaggcggaaccggtttcgtcgctggggcaccgcacccgcgtcgacttccccatccttcaccaggaatttgatgatgccaaattagtttacttcgacaatggtgcaacatcgcagaaaccatgtagtgtgatgaaaacattagatgagtactaccgatcgtacaattcgaatgttcatcgtggtatccatgcactcaggctactcatgcatatgaggatgcaagaagaaaagttgcaaattttgtcaacgcagctgatagcagagagattgttttcactcgtaatgctactgaagctattaatctggtagcctattcatggggactatctaacttgaaagaaggagatgaaattgttcttacagttgcagagcatcatagtgctattgttccatggcaatttgtttcccagaagactggtgccaccttaaaatatgttggattgactaaagaaaatgtcccagacattgagcagttaaaagggtttctgtcgaacaagacaaagatagttgttgttcatcatgtctcaaatgttctaggttccatgcttcctatcgaggagattgtaacatggtcaaacagagttggagctaaagtccttgtagatgcttgccaaagtgttccccatatgccagttgatgttcagaaacttggcgcggactttcttgtcgcatcctctcataaggcgtcggatttttgcatggtaaatttgagattttgtcgtctatggagcctttcttaggtggtggtgaaatgattgcggatgtattcgaagacaaatccacatatgctgagcctccctctagatttgaggctggaactcctgcaattggagaagctataggactgggagcagccatcgactatttatcatgcattggcatggagcagatccacgaatatgagaaagagctggggacatacctctacgaaagccttctctctgttccaaatgtccagatatatggcccggcgccttcccagactgtccaccgtgctccgttgtgctccttcaatatcgagaacgtccatcctacagatatcgcagagattcttgatctgcagcatagcgtagcgattcggtcggggcatcactgcgcgcagatcttgcataggacccttggcatcaacgcaagtgctcgtgcgagtcttcacttctacaacacaaaagacgaggtggataccttcgtcgacgcgcttaaagccaccgttgatttcctcacggatcgatactagtgcggttcagttcagttcccttttttttttgccagtttcatcgctctctcgtttgaactgttgtatgcacacacaaaaaagtatgcatatatatttggtataaagaaaacatacaaagtgtacggcttggcaaagtgagctcccttatttggagttttggactgtactcccttatttggcggttgttgttgaattaaacgtagttcaggatgcagagagtacaaacgactcgaccatggtcactgttatgcagtaaaacattgttatacgagaagatgagccggcagttaactctg

SEQ ID NO: 41159 - DNA, 765 bp, Zea Mays
ttttctttgatcttcgaagatatgttattggccgcaatcatttgaggctggaactcctgcaattggagaagctataggactgggagcagccatcgactatttatcatgcattggcatggagcagatccacgaatatgagaaagagctggggacatacctctacgaaagccttctctctgttccaaatgtccagatatatggcccggcgccttcccagactgtccaccgtgctccgttgtgctccttcaatatcgagaacgtccatcctacagatatcgcagagattcttgatctgcagcatagcgtagcgattcggtcggggcatcactgcgcgcagatcttgcataggacccttggcatcaacgcaagtgctcgtgcgagtcttcacttctacaacacaaaagacgaggtggataccttcgtcgacgcgcttaaagccaccgttgatttcctcacggatcgatactagtgcggttcagttcagttcccttttttttttgccagtttcatcgctctctcgtttgaactgttgtatgcacacacaaaaaagtatgcatatatatttggtataaagaaaacatacaaagtgtacggcttggcaaagtgagctcccttatttggagttttggactgtactcccttatttggcggttgttgttgaattaaacgtagttcaggatgcagagagtacaaacgactcgaccatggtcactgttatgcagtaaaacattgttatacgagaagatgagccggcagttaactctg

SEQ ID NO: 41160 - DNA, 1862 bp, Zea Mays
acacgatcgatcgggccaggcccgcattctatgggatccgtctctccactctcttctctaccgaacacaatctcatccgtcttcctcttccccatcagccgccctaccgagtcttcgcacgcacgacgcttcgtcaggatcgattcgcgagacctctcctgtccggatcgaggttcatggtttacatatgcgcgtttgtttactgatgcataccacgaccacctgatccggatgtcaggacagatctcctgctttaatcgagtccagttcatgtatgaactctcccttttcctggcacgttgctagatgtaaaagggtgttccgggatttaagagaaccacccacgcatccatgtctgaccagcaaaggcactacggcagctacgagctcctcccggctcacccagatttgcggtgcctggtctgcacgcggccgttcactcttgacgccgaggtcaccgacagcttggaagctttagccatatgcagggagtgcaagacgacggtgcttagtgacagcaacagggacgacactccccgagccaaccgacagagaagatggcgaaggcagcaaagctccatcaggggggtctcggtgttctcgcagctgatcaacctagctagacaacagggtcatgaggcggacactgattctccgacggttccccgccgccacacatcctatagttctacgccgagccggtcccagagggggcacacttccgacgacgagagcgatggtctgagctacgccgattccgtgtttggtgagatcgagtcgaacatcagttttggtgatgagggtggggaatctgacacttctcttgatcgccacaccatggttgggagggaaattggcatacagcttgacaatgagagctacatgaacacagatacagatattgatcctatgaatgctggagtataccagtgggactcagacgatcctgaagacgatgaagatgaggagtcagaggagtctggtttggatgaaggagatgacaccatgcaggagcgccggcagcagtggcatgatatcgtcccgagtggattgaatgagcaggaatctgaaggtgctgcatggacttggagaacagttggaagccaagacataaacaggactgatctgagagtcgacatggaaggacgggaaatcaggagactttttattgggaaccccggagattatgttgatgcaagacagtttgaaatgcttctcgagcaattcgctgatgaggataacaattccagaagaggagctccacctgcagcggcatcttccatcgaaaatctttcgtctgtggtcatctccaaaggctatgagataaacggtggtgtaacctgtccagtctgcaaagatgacatgcctatcaccactgtagcaaaacagctaccatgcatgcatctctatcattcatcttgcatcttgccatggcttaattctaggaacacatgcccagtttgtcgttacgagcttcctacagatgactcggaatatgagaggtccaagcatgccgcggtcaatgaaggaggtatccatggggtggagcgtacccatccgcaggaagttgttgaagaaacttatgaacctgaggttgatggaggttccaatacaggcggtgatacaatgaatgagactaatacacatgaacagcatactgcacagcagccaaatggagcacatgggcgtcatagatggctgtttattgcagcagctccagttgttgtaacttcaagcatgtaactaacactctgccttaaagtttacccatgcattcatcagtaagtgcctaaaatatctcttgtgcatgatgcacattgtagtttgactggtaatttgcaggtcctatgaaacttctgctt

SEQ ID NO: 41161 - DNA, 1928 bp, Zea Mays
acacgatcgatcgggccaggcccgcattctatgggatccgtctctccactctcttctctaccgaacacaatctcatccgtcttcctcttccccatcagccgccctaccgagtcttcgcacgcacgacgcttcgtcaggatcgattcgcgagacctctcctgtccggatcgaggttcatggtttacatatgcgcgtttgtttactgatgcataccacgaccacctgatccggatgtcaggacagatctcctgctttaatcgagtccagttcatgtatgaactctcccttttcctggcacgttgctagatgtaaaagggtgttccgggatttaagagaaccacccacgcatccatgtctgaccagcaaaggcactacggcagctacgagctcctcccggctcacccagatttgcggtgcctggtctgcacgcggccgttcactcttgacgccgaggtcaccgacagcttggaagctttagccatatgcagggagtgcaagacgacggtgcttagtgacagcaacagggacgacactccccgagccaaccgacagagaagatggcgaaggcagcaaagctccatcaggggggtctcggtgttctcgcagctgatcaacctagctagacaacagggtcatgaggcggacactgattctccgacggttccccgccgccacacatcctatagttctacgccgagccggtcccagagggggcacacttccgacgacgagagcgatggtctgagctacgccgattccgtgtttggtgagatcgagtcgaacatcagttttggtgatgagggtggggaatctgacacttctcttgatcgccacaccatggttgggagggaaattggcatacagcttgacaatgagagctacatgaacacagatacagatattgatcctatgaatgctggagtataccagtgggactcagacgatcctgaagacgatgaagatgaggagtcagaggagtctggtttggatgaaggagatgacaccatgcaggagcgccggcagcagtggcatgatatcgtcccgagtggattgaatgagcaggaatctgaaggtgctgcatggacttggagaacagttggaagccaagacataaacaggactgatctgagagtcgacatggaaggacgggaaatcaggagactttttattgggaaccccggagattatgttgatgcaagacagtttgaaatgcttctcgagcaattcgctgatgaggataacaattccagaagaggagctccacctgcagcggcatcttccatcgaaaatctttcgtctgtggtcatctccaaaggctatgagataaacggtggtgtaacctgtccagtctgcaaagatgacatgcctatcaccactgtagcaaaacagctaccatgcatgcatctctatcattcatcttgcatcttgccatggcttaattctaggaacacatgcccagtttgtcgttacgagcttcctacagatgactcggaatatgagaggtccaagcatgccgcggtcaatgaaggaggtatccatggggtggagcgtacccatccgcaggaagttgttgaagaaacttatgaacctgaggttgatggaggttccaatacaggcggtgatacaatgaatgagactaatacacatgtagacacaagaagaagttggtggtctatgttctaagtaaccagtgtttacttgctgatgctgaatttctgtgtgatggcgtgtgcttgttgccacttgccagtgttgtgtcaattatgtatgaaaaggttctagataaatttgaagtgcaaactgtgtgtgccaaccaaggtgttcttgtaaccaagttcagacagttcagcaaaacaaatactgatgattgctgctgttcattgatattttatatgtttggttgctcaggtcctatgaaacttctgctt

SEQ ID NO: 41162 - DNA, 1674 bp, Zea Mays
tcctctcatactttcccatctaatggaggaactacttgagatagttctagttgtttcgaccatacttcttggcttagctctagtttacttatatgaaatcctatggctgaggcttgagaagataaggaagaagttaaggaggcaaggcataaacggtcctaaacctacgtttctctacggcaacacccaggagatgaagagaatccgacaagaactcaagtttgtgcagaggcaagacaaagacatgaatggctacatatccaccatcttccctcatttccttttctggaggaagacatatgggcccgtgttcctttactcaacaggagtgttggagatattgcatgttgctcagccagaaatggtgaaagacatgggccactggactccatcagagctcgggaagccacaacatataatgaaatcacggaaacctctcttcggattaggtatactagcagcaaatggcgacctttgggcctatgagaagaagatcctggcaccacagttctttgtagaaaaaattaagggtatgatagggctaattgtggatgcaaccgttccactgttacaatcatgggagaatatgctcgatggcacaggaggtagtaaggagatctatgttgatggatacctgaggaacttttcagcggatgtgattgctagagcatgttttgggagcaatttcgtagaaggaaaagacatattttgcaagctcaggcagctccaaaagttgatttctgaacaggatacacttgttgggctgtctgcagtgtggaaatacttgcctaccaagagaaaccgggagatacaaaagctagatcaagaagtccggttactaatcctggatctctcaagggaagacaggagcagaagccgcagcaataatgccggcacgcacgtgtccacatacgacaaccttctgcatgccattgtcgatggtgcaaaccagagccccagctactgcagtgcccctgaagatttcatcgtcgacaactgcaagaacatctactttgctgggtatgaaactacagcggtcactgccacctggtgcctgatgctccttgctgcacacccagactggcaggaccgtgctcgggctgagattcgagaagtgtgctgtggacagacagcgatggacatcgacgtccttcgtcagctgaaaatacttacaatggtgatacaagagactctccggctgtaccctccagcgtcactgatcatgcgtgaggccctgacaggcatcaggctcggtggagtcgacgtccctcgcggcaccatcatccaagtagccatttcattgctgcaccttgacatggaagcctggggtccagacgctaacgagtttcgtccagaccggttcgcgaacggagctgccgcggcgtgcaagccagcccacatgtatatgccgttcgggtacgggccgaggctgtgcaccgggcagaacctggcaatggcggagctgaaggttgttcttgcgcgcctgctgagcaagttctcgttctcggtgtcgcctgggtaccagcactccccggtgtttcggttgaccattgagccggagtccggcatgccccttgtggtgacaaggctagcatgatcttctgtttgtttccaaacgagctgcaacgccccaccatcaccaccaagcatcggattcggtatgtgtggctgtgc

SEQ ID NO: 41163 - DNA, 1126 bp, Zea Mays
cgagaatatatctttattaacccaaatcaagcagattggtagccaggaaattgagtgcactgacgaaatgaagagagtacatgtgggcggtgaggaatcaggttcctcctcttccgtctctcctcccacgacaaaatgaatcggttgctgggcctgggtgggatggatggtgaggtcagcgagaccgtcacttgtcaacaaagagagcagagcgccatcttctccgcgcggccggccaggccagctagccgccatagcaagctaggccgaagcagaggatctaacagagcggggaaaagaaaagaggagtaatggccaaggtccaccccaacgccgcggggtccgtcgttgccacagcagcagcagtaggccgggccccggcggaggctgatggagagccgtccactgtgctgacggtgtggcgcaagtcgctgctcttcaactgcgacggcttcactgtctacgacgccagcggcgacctggccttccgcgtcgactgctacgccggctccacccggcgctggcgccgcgccggcgtcgtgctcatggacgccagcgggaagccgctcctcaccgtgcgccgcaagacgcggctcggcctcgcggagcgctgggtcatctacgacgccgacgccgacgacggcacgacgacgacggccagggccacgccgctgctctccgtccgccgccgcatcggcgcgtgctgcaagacgctggcgctcgcccactccgcggccgcgggcaccgacgacgcggcggcggcggctgcactgtcgtacgtggtggagggctcctacgggcggcgcgcctgcgcggtgcgtgaggagcgcgggggcgccgtcgtcgcggaggtgcagaggaaggaggccgtcggcgacgacgtgttccgcctcgtcgtggcggggtcacgtctcggcgcgccgctttccatggcgctcgtcatcgccctcgacgacatgttccgcggcggggccggcggcggcggctggtcgacgacgcggtcgttgctacgcaggaagaattcgtccatggctatatagaatggctatatagaataggagaattttgcaaacatgggaccgtctaccagacttttggcaccacggtcggtcgtggcaattgaaag

SEQ ID NO: 41164 - DNA, 611 bp, Zea Mays
gaaatgaccagaactcgagtgatcttagaacatcttggcaattcttgcattttacatgatagagtataagaataatgatatcgcatcgtatctgttggaacaatggaccgcaatccgagaccgtcaaagtcaaactgcttctgccggctggcatcgtccgccggacaccgactagattctctcatctatgccgtgtcttgtcttctagaacaagatgaatttacagcaaaacacgtgtgtacaatacaggcgcaacgacgagctcgctcacatcacatcactgctagacagctagagggccatctctgcctgaagcctggtcagctcgctcacatcactgccctgtctagaagacgccgccgccgctttcgccgatggttccacggaccgcctcgccggcggctcaggcagctcgtcctcgatctccccctcctcctcctcctcctcctccagctcttccagctccgcttctagctcgtcctgttttttttcccacctaaactagttagagaaacaaatttcttccatgcacaggactcctccaagatggctggagtctagatcgtgcatgtgtgcctgtatgtacccagttcacaacaacaagggaggcg

SEQ ID NO: 41165 - DNA, 3508 bp, Zea Mays
caagctccgagacgtgcgccgtttgcattgcatgtatgtgtttccttttacctggtcatggactcgcagctggaaattcgatagctgctcgatctgtgtctcgtacagtttcttcttctttaggcactggattgcggctgaaacgaaacaaacacggaagaaatctcacgtacgagcgaaatagctattttttgagagagcgaaaagctagtatagtttaagaaaggtaagcaggcaaaatttgcatatttgacaaactaaggttgtggtgtaggcgtgtagcggaacataagaatggcggatgtgttggctcttccttaccgttcttgttcttcgcttttgtgtaatccttcgccttctctatttccgcggaacatttcttctggaggaaacgctccttcttctccagcatctctagagtctgcacgcaaggagatggagggtacggaagcacacccagtatgaaaggtggtagcaatttcctcaaaaaaaaaaagaaatctaaggtagtaagttaatatcttggaactgcagatgtaaattggtcatctgttggcaatagctggtggtgtggatcgaggggcgtgatcacagaacagataatccacaatgtcagcaccggatactatactatattgtgtccttaaaatagatgtgagtgctgaataaatgttgactagggctgaccatctcgaatttaactgactatcctaattcctgcctaaagttcaagcatttcggacaagccggcagcttatgtccagaaggatttcttcctctctatctccccccttttcaacgaggacttctgatcttctcttgtttgttccactcttattctatgaaaatccagtcaattaagaaatctacatgatcatgttacagcatccagctgaagaaagataggctgttttatgacacttggttttaatatatatatatatatacttccacaatgttgtgttaatagcaaaagaggaaaaagcagggagttcttctggcataatcttatgaaggggagcaaggcaccattctgagaaaaaagaactcttagactatcaccagcaacgttctctaaatttcatcttttaaaggaatattctctatcctttacagaacactctaaaaaaaattatcctctatatcttcttcatctccagcagcatcttctaaatttcgttctctatatcttatttttcacaaaactgtgaaatagtcaacgcttaacgtcaccccaactgtgggcccgatccatggggactctcgtcgcctcctcctattggctcctggtctcaggggtgcatgtgggcgctcctccatgtagtgttaaccttagtaaccaggttcccagatcgatgggatcgaggaacgggaacgcggtacgctacaaaaactaggatttaacattactggatcgagattgttcccacgttcccggaacggaacgaacgttcccggaacgaggaacgtggccaagttcccggttcccggttactaaggtgttaacagtgcaccacaatacccatgctggccaacaacagtactatagcggacgcacactagaatgctagacatagcgtgtgcgaccaatgtccgctactttagcggttagtttaccgtttgttgttggagcacataccggacaccggaaccgctaattttagagttcaggagcgtttagagatacttgttggagacagtcttatattttacagctaaccagtttccactttgggtcttgtgtggatgtggtttggagtgattgaagagtgtttaaatccctaatagatcaaatccctcttcaatacatatcaatccacttcgatcccacttattactatagtacccaaactagacctcgtggggaaaattaaacctccacgaattgcagcccctaatccaatcctatcttgccaaaaagggagtaaatacgtaatagtagtatagtactgcagctgatatatcactatcgggggaacacaattgcagcaagagtgaagatcaggaacaggaaatataaacaacgaattaggtaacagaggggatgaaagacctcatggagccgatccaacgtcggtatggcagaggaggcagcctccttcttcttcttgctcttagtcttcgtcagcagtctcttcagcatcttcttggcagtcctcgctggttctccctctcgtctgatgatggcctgtgtacgaaggaataggacgagggtgatgaactggagacggccttctcgagggagaaagggaaagtgaggggaaaaaaagtagggggcatcgttagcatgaagaataaatatgtagggggggcatcgttagcatgtggcgggagacagagaaggacttgtctgctcgtgacaaagaagaaaatccagtttcaatggtgtcgttatcttaaaatactttgctccatgttagacggcttgccaacttgtggccactttccgttcagacttgtgtgttatgtgaaatatgttttcaaggaaaaggtcgagtttttgttgttgatacatacaagtagagaacaacagtactaggaacttccaaaagctgtagaccttgaattcacaggctgtagatcatatagatatatatatatcatctttttactggacaaagtcaacgcacaggtctacagggcaacgacggcagcgtttccctgtggctgtggtaagagaagttcatttaaaaatccagaattctaacagccacgcaagacatctatctaggacagacgacaaagacaacagaatcagcatattaagcagaggacagaggagtggcggttgttttatgtagtagcaggtatgttggattaggtaggtctagcaacttactagtatatgatttggcgtcttcttacttggaacaaactgtgaatcttacaccatgtcacaaactagcgagggtaaagtgagttagtccaagtagccatctccttttcctctcaggacaagtagctgagctgccattccttatcatctgtggcttttgaggaactacaatggatgcgtaatgaaattcgcccatactccagctgagagcggaataaagggaggggtattcgatcccagtcctgaaagtgaaaagcatccaactttcgaaaaaaaaagggcttggcagattcggtttccctttcctctttgatagtagcacggagcacggatcccctccctccctctcttcctagcgtaatgctactcagaagcacagcgcgatacgatttggtgacgaactggtagcgtggtggaggagaactggagaagaggttgcatatcaagcgcagacacatgatgactagatgagcgtagcagtgaaatacgtacctatgcctctcgcttaccccgaaagaaacaagcttgagaaatcgacaggcaccagtgaactccggtcccggaagggatcaagcatggccgcctgaattgaatcgacggaaacagaggggcagttaacatgcaggtgcccgctctctgcaggctgcagcagcgtttgcgaacagataaaag

SEQ ID NO: 41166 - DNA, 2715 bp, Zea Mays
ctcttgtgcttacgcccttgttcgtctcccggcggcgtcttcctctttactcctcccgctctccctccctcgcaccgtccgtctgctagctcagcctactcactccactcaactcacccccaactccactccgctcccgagcccggactgactgactgactgtggtggtggtggtgcatcagcagcccgcgcggcgccaaaacacgcaaactgctccctccctcactcacccctatcccccgcgctgggtcgcccgatcgccatgcgcgcggcggcttcctcttggcgtttctagatgggctcctcctcctccctcctcttctcctcgtcctcctccgccgcatccaccgccccccactcctttccccactctcatgccaccgccaccgcctccgcctcctctcactccttattgccgccgctgccctcccccacacctccctccgcctcctccttcttccccaaaccacttcctcctccactacctccatcagctagaccaccaagaagccgccgccgccgccatggtccgcaagcgccccgcgtccgacatggacctcccgccgccgcgccgccacgtcacgggcgacctctccgacgtcacggcggccgctgccgccggtgttggtggtagtggcgcgccgtcctccgccagcgcgcagctgcccgcgctgcccacccagctccaccagctgccccccgcgttccagcaccacgcgccggaggtggacgtgcccgcgcacccggccccggccgcccacgcgcaggcgggcggcgaggcaaccgcgtccacgaccgcgtgggtggacggcatcatccgcgacatcatcgggagcagcggcggcgccgcggtctccatcacgcagctcatccacaacgtccgcgagatcatccacccctgcaaccccggcctcgcgtcgctcctggagctccgcctccgctccctcctcgcagccgacccggccccactgccgccgccgccgcagccgcagcagcatgctctcctgcacggcgctccggccgccgctcccgcggggctgacgctccctcccccgccaccgcttccggacaagcgccgccacgagcatccaccgccgtgccagcagcaacagcaggaggaaccgcatccggcgccgcagtcgcccaaggccccgaccgcggaagagaccgcagcggcggccgccgccgcacaagcagcagctgctgcggccgccaaggagcggaaggaggagcagcggcggaagcagcgcgacgaggagggcctccacctgctgacgctgctgctgcagtgcgccgaggccgtgaacgcggacaacctggacgacgcgcaccagacgctgctggagatcgcggagctagcgacgccgttcggcacctcgacgcagcgcgtggccgcctacttcgcggaggccatgtcggcgcggctcgtcagctcctgcctgggcctgtacgcgccgctgccgccgggctcccccgccgcggcgcgcctccacggccgcgtcgccgccgcgttccaggtgttcaacggcatcagccccttcgtcaagttctcgcacttcaccgccaaccaggccatccaggaggcgttcgagcgggaggagcgcgtgcacatcatcgacctcgacatcatgcaggggctgcagtggccggggctcttccacatccttgcctcccgccccgggggcccgcccagggtgaggctcaccggcctcggggcgtccatggaggcgctcgaggccacggggaagcgcctctccgatttcgccgacacgctcggcctgcccttcgagttctgcgccgtcgccgtccactggctgcaccactcgctctacgacgtcactggctccgactccaacacgctctggctcatccaaaggctggcccccaaggtggtgacaatggtggagcaggacctgagccactcgggctccttcctggcgcgcttcgtggaggccatccactactactcggcgctgttcgactcgctggacgcgagctacggcgaggacagccccgagcggcacgtcgtggagcagcagctgctgtcgcgggagatccgcaacgtgctggccgtgggcgggccggcccgcaccggcgacgtcaagttcggcagctggcgcgagaagctggcgcagtccgggttccgcgccgcctcgctcgccggcagcgccgcggcgcaggcgtccctgctgctcggcatgttcccctccgacgggtacacgctggtggaggagaacggcgcgctgaagctcgggtggaaggacctctgcctgctcaccgcgtcggcctggcgccccatccaggtgccgccgtgccgttgatgagacctctgcctgctcctgcttgcgttgagaggccgccactccacttgttttgcatctgtagctgctcggtttggtcatcagctgggagataagaaaagcggaaacgtactaattgctctggagtagatccatccattcacagtgatagttactgatgtactaagctttaattagttcaatgctagatcgttcttgttcaggtgtcgatcgcgtatccttgtccttggtctccttttcattttggtgctttgtctagtcgctttcccgactaatgccgtgctcttcatgcgcgttctagtgaagattcttgccgagaatattagcatagttttcatgtaaagtagccatcaagcaagtattaatttgtggctacttcaatgacatcctaagg

SEQ ID NO: 41167 - DNA, 1605 bp, Zea Mays
gtgacagttgcgagcaagcctgcatctacctcattggatgctcacgtggtgttcgatgaaaaggagcaaagctggaacttcattttcgcggagtacgctgcagcagctggacatcatcatctctcaattgtatggcaaatagcggaggattactcccattgcgaatttctgctccaactccccatatactgccccatgcctgctttccgtgctgtcacacaagttcagcaggatgctgttggacaaggacagtcggtgcctggggacaaagttctcaacaccctgtccatcaggtgtttgacgaattgctttagcatcatacagtgtcgtttcttgcactcgtgcaattgcagaacggatgcagtgcagcataggcaatcatggccaccgcctgtacagtatgggatactgggtgatggtgttcaagtctggcttccgccttggccaccacctgtttgggaattctggctgtcactgaagattactggtccacagatgatgcattcggtaggatactttggattgccagttatgccggcgacatgtattacaatttcagagattgtgtctggttcaagcgagcaaatatttcctgaaatatttctgcaaagcttacatgagtgcagagtttgtcttagtgaaaatactggcagaagtttactccagctcccatgccaccatttgttttgcttgatgtgtatgaagtctaattgcagaattcatgtaatagaagggaatttaacccaggtctggttaagagaagatgcagttgcttacttcaaaaatatgtttgatggtggcctgaggccaacctcaaatgcatttaacaaagttatagatcgctgggtgaaggttgatatgctcaacgaggcccatgggttctttgatatgatgcttgaaaaggacatagatgatgttacggtggtcattttctactttggaggacaacatgtgggctgggaaatgaagacaaaatggttgtctaatggttggctatgtttgctctcgccgccgatctggaggtggttcaccacggagggcgaggagcaggaggcagcgtacgaagcggccgtagagcagctgctggtcctggagaaggagctcgccgtctcctggaagccattcttcggcggggacaaggtcgggttcgtggacctatcgctcggcccgctggcgtacgtgcttccgatcgatgtacgaggaggtgatcggcggcggcgtgagcgtgacgacgaataataagatggtcgcggaggagaagatgccgtgcctcgctgcgtggatggggaggttcctcagctcgccggccgtcagggcccatctgccgccgctcgagaagctgcggcccaggtaccaggccatgcgcgagtcgcttctcgtctcagcgagagcacaagtggtcgagaaggagcgcggcagcagtagctagctacttgctactatctcattatctgtcaggctgtcagctccattcgataatttaataagaaaaaaaactgcccatgttgatgtatcaagtcgatacaaatgcactggcttttccccagtctgagcttgcttctattgggtgagcaaggcaataaagatcctgctaattaagtgtct

SEQ ID NO: 41168 - DNA, 477 bp, Zea Mays
cttcaaacagcttcccaacaatactttcaaaaccaaactcttgtgacacatgaacccatagtctaactttaaaatgctttgctatagtggtaccatcgttaaaaacaagtttagccaaggtagttttgccagatccaccaagtccaacgatggaaactatcatggttttttgttggtcattggtttcagttaatttagatattagctggtgcttctccatttctcttccgagtattaatgttgcatccatggtaggcactgatggcagccccacagctgtctttttcatatgggaaatagaatgaccactaccagttaaactagtagctattatattgatgtcggctctttgcttcacgattgcagcaaatctcttcttgattgccttgatcttcttagctgccttacactgaaatatgaacgattctggttttctacgcatatatctggacacgaaaccaccatcaccagaagcat

SEQ ID NO: 41169 - DNA, 2234 bp, Zea Mays
atggcagcgaggagcaaggacgcgaagaaggtggtgcagtaccgggagtgccagcgcaaccacgcggcgtccatcggcgggcacgccgtggacgggtgccgcgagttcatggcgtcgggcgccgagggcacggcgtgcgcggcctgcgggtgccaccgcagcttccacaggcgcgagccgtcagcccaacaaacgaaaaggcgcatacgattcaggaaacgtgggccggagccaatgaacgtgcacatgcagcagcagcaccacctccgtcagctccgagccgtcctcctccgccgcggccaccccgtccccccaccgccggcgacccacccggaccctgaccgggccttcctcgccgccatccgtgccgccgcctcctctgccccacgcctcgtgctcgccgcctgcgcctgcctccgccgcgccggcctgcccgcaccggggccccgagcgcttccggccctgctccgctccgctgcgcgctgcgagggtgctggcgcgtacgtcgcggccacgcacgcgctggccgtcaggacaggggcactggacgatgggtttgtcggaaccgcgctggccggggcgtacgcggcgtgcgggtgcgtgagggacacgcggaaagtgtttgacggaatggccgtgagggacgtcgtctcctggggcgtcatgcttgatagttattgtcagactcggaactataaagaagctttgcttctgtttgctaagatgaagaattctggagttgttccagaccaattgatccttgctactgttctaccagcttgtggtcatataaggcatttgagaatcgggaaagccattcactcgtacatgttggtgtcggacatgattatcggcgctcacattagtagtgctctcatcagtttgtatgctagttgtgcgaacatggagatggcagaaaagctatataacgaaatgccaaggaaggacttggtctcatcaactgccatggtttctgggtacgccaggaatagaaaagtcgagattgctcgctctatatttgatgggatgccagagaaggatgttgtatcttggagtgccatgatatcaggatatgttgatagtaaccagcctaacgaagcactgagtctgttcaatggtatgcaagagtgtggtatcaggtctgatgaaattaccatgttaagtgtcatatctgcatgtgctaatttaggttccctcgataaagccaagtggatccatgccttcattaagaacagtgggttgaataaggtactgcacatttgcaatgctcttattgatatgttcgccaaatgtgggggtattaaccttgcattgaatgtcttcaatgaaatgcctctaaagaatgttatcacctggacaagtatgattagtgcctttgctatgcacggtgatgggaaatcttccttacgtctgtttgagcagatgaaagatgaaggcgctgaacccaatgaagtgacatttcttagtttactttatgcttgctgtcatgctggtctagttcatgaaggccgtttattgtttagctcgatggttcagcaatacgggattgaacccaagcatgagcactatggttgtatggtggatcttctaggaagggctaaacttatgcaagaagcagttagtctcatagagtcaatgcatttagagcccaatgtgcctatctggggatctcttttagcagcatgctggatgcatggtgatctcaagctcggcgcttttgctgccaagaaaattttgcagttggatcctaatcatgatggagcatctgtgcttttattgaagatatacatgaaatctgataacttgaacaatgctcaggaggtgaggggagtaatgaaactccacagggtctcaaaagaaacaggcttgagttggatggaactgaatgagccttttcatgagtttgcagctggaggtgaaaaacatccagaaagtggcaagatcttccttcaaaaagttgtgaattaaagatgcatggatgttgaggatatgagagaatatgttttgctgcatagtgggaaacttgttttttttcctgccaagtgatttaagagactgtggaaggcaatggttatttttcaaatctgatgagcgagtcattcagcccactgcttgaccttgaactgaataccaattctcaagatcaactgtcacagaatatggtagcagcaccaaccgagagaccaaatcagagaagatcaaagaatttcagcgagcaggaagatgcactatcg

SEQ ID NO: 41170 - DNA, 2267 bp, Zea Mays
atggcagcgaggagcaaggacgcgaagaaggtggtgcagtaccgggagtgccagcgcaaccacgcggcgtccatcggcgggcacgccgtggacgggtgccgcgagttcatggcgtcgggcgccgagggcacggcgtgcgcggcctgcgggtgccaccgcagcttccacaggcgcgagccgtcagcccaacaaacgaaaaggcgcatacgattcaggaaacgtgggccggagccaatgaacgtgcacatgcagcagcagcaccacctccgtcagctccgagccgtcctcctccgccgcggccaccccgtccccccaccgccggcgacccacccggaccctgaccgggccttcctcgccgccatccgtgccgccgcctcctctgccccacgcctcgtgctcgccgcctgcgcctgcctccgccgcgccggcctgcccgcaccggggccccgagcgcttccggccctgctccgctccgctgcgcgctgcgagggtgctggcgcgtacgtcgcggccacgcacgcgctggccgtcaggacaggggcactggacgatgggtttgtcggaaccgcgctggccggggcgtacgcggcgtgcgggtgcgtgagggacacgcggaaagtgtttgacggaatggccgtgagggacgtcgtctcctggggcgtcatgcttgatagttattgtcagactcggaactataaagaagctttgcttctgtttgctaagatgaagaattctggagttgttccagaccaattgatccttgctactgttctaccagcttgtggtcatataaggcatttgagaatcgggaaagccattcactcgtacatgttggtgtcggacatgattatcggcgctcacattagtagtgctctcatcagtttgtatgctagttgtgcgaacatggagatggcagaaaagctatataacgaaatgccaaggaaggacttggtctcatcaactgccatggtttctgggtacgccaggaatagaaaagtcgagattgctcgctctatatttgatgggatgccagagaaggatgttgtatcttggagtgccatgatatcaggatatgttgatagtaaccagcctaacgaagcactgagtctgttcaatggtatgcaagagtgtggtatcaggtctgatgaaattaccatgttaagtgtcatatctgcatgtgctaatttaggttccctcgataaagccaagtggatccatgccttcattaagaacagtgggttgaataaggtactgcacatttgcaatgctcttattgatatgttcgccaaatgtgggggtattaaccttgcattgaatgtcttcaatgaaatgcctctaaagaatgttatcacctggacaagtatgattagtgcctttgctatgcacggtgatgggaaatcttccttacgtctgtttgagcagatgaaagatgaaggcgctgaacccaatgaagtgacatttcttagtttactttatgcttgctgtcatgctggtctagttcatgaaggccgtttattgtttagctcgatggttcagcaatacgggattgaacccaagcatgagcactatggttgtatggtggatcttctaggaagggctaaacttatgcaagaagcagttagtctcatagagtcaatgcatttagagcccaatgtgcctatctggggatctcttttagcagcatgctggatgcatggtgatctcaagctcggcgcttttgctgccaagaaaattttgcagttggatcctaatcatgatggagcatctgtgcttttattgaagatatacatgaaatctgataacttgaacaatgctcaggaggtgaggggagtaatgaaactccacagggtctcaaaagaaacaggcttgagttggatggaactgaatgagccttttcatgagtttgcagctggaggtgaaaaacatccagaaagtggcaagatcttccttcaaaaagttgtgaattaaagatgcatggatgttgaggatatgagagaatatgttttgctgcatagtgggaaacttgttttttttcctgccaagtgatttaagtacatcgattggtaatatctcttgcatgggcagagactgtggaaggcaatggttatttttcaaatctgatgagcgagtcattcagcccactgcttgaccttgaactgaataccaattctcaagatcaactgtcacagaatatggtagcagcaccaaccgagagaccaaatcagagaagatcaaagaatttcagcgagcaggaagatgcactatcg

SEQ ID NO: 41171 - DNA, 2387 bp, Zea Mays
atggcagcgaggagcaaggacgcgaagaaggtggtgcagtaccgggagtgccagcgcaaccacgcggcgtccatcggcgggcacgccgtggacgggtgccgcgagttcatggcgtcgggcgccgagggcacggcgtgcgcggcctgcgggtgccaccgcagcttccacaggcgcgagccgtcagcccaacaaacgaaaaggcgcatacgattcaggaaacgtgggccggagccaatgaacgtgcacatgcagcagcagcaccacctccgtcagctccgagccgtcctcctccgccgcggccaccccgtccccccaccgccggcgacccacccggaccctgaccgggccttcctcgccgccatccgtgccgccgcctcctctgccccacgcctcgtgctcgccgcctgcgcctgcctccgccgcgccggcctgcccgcaccggggccccgagcgcttccggccctgctccgctccgctgcgcgctgcgagggtgctggcgcgtacgtcgcggccacgcacgcgctggccgtcaggacaggggcactggacgatgggtttgtcggaaccgcgctggccggggcgtacgcggcgtgcgggtgcgtgagggacacgcggaaagtgtttgacggaatggccgtgagggacgtcgtctcctggggcgtcatgcttgatagttattgtcagactcggaactataaagaagctttgcttctgtttgctaagatgaagaattctggagttgttccagaccaattgatccttgctactgttctaccagcttgtggtcatataaggcatttgagaatcgggaaagccattcactcgtacatgttggtgtcggacatgattatcggcgctcacattagtagtgctctcatcagtttgtatgctagttgtgcgaacatggagatggcagaaaagctatataacgaaatgccaaggaaggacttggtctcatcaactgccatggtttctgggtacgccaggaatagaaaagtcgagattgctcgctctatatttgatgggatgccagagaaggatgttgtatcttggagtgccatgatatcaggatatgttgatagtaaccagcctaacgaagcactgagtctgttcaatggtatgcaagagtgtggtatcaggtctgatgaaattaccatgttaagtgtcatatctgcatgtgctaatttaggttccctcgataaagccaagtggatccatgccttcattaagaacagtgggttgaataaggtactgcacatttgcaatgctcttattgatatgttcgccaaatgtgggggtattaaccttgcattgaatgtcttcaatgaaatgcctctaaagaatgttatcacctggacaagtatgattagtgcctttgctatgcacggtgatgggaaatcttccttacgtctgtttgagcagatgaaagatgaaggcgctgaacccaatgaagtgacatttcttagtttactttatgcttgctgtcatgctggtctagttcatgaaggccgtttattgtttagctcgatggttcagcaatacgggattgaacccaagcatgagcactatggttgtatggtggatcttctaggaagggctaaacttatgcaagaagcagttagtctcatagagtcaatgcatttagagcccaatgtgcctatctggggatctcttttagcagcatgctggatgcatggtgatctcaagctcggcgcttttgctgccaagaaaattttgcagttggatcctaatcatgatggagcatctgtgcttttattgaagatatacatgaaatctgataacttgaacaatgctcaggaggtgaggggagtaatgaaactccacagggtctcaaaagaaacaggcttgagttggatggaactgaatgagccttttcatgagtttgcagctggaggtgaaaaacatccagaaagtggcaagatcttccttcaaaaagttgtgaattaaagatgcatggatgttgaggatatgagagaatatgttttgctgcatagtgggaaacttgttttttttcctgccaagtgatttaaggagaattgcgtctcattgtattaagaagaaaagtaaccagggtctaaagaaggcccgatacaaaagaccccttacgggggccagaaacacgcatacaagaaggattgcttactgcaatagtacatcgattggtaatatctcttgcatgggcagagactgtggaaggcaatggttatttttcaaatctgatgagcgagtcattcagcccactgcttgaccttgaactgaataccaattctcaagatcaactgtcacagaatatggtagcagcaccaaccgagagaccaaatcagagaagatcaaagaatttcagcgagcaggaagatgcactatcg

SEQ ID NO: 41172 - DNA, 2887 bp, Zea Mays
gccctgctccgtgcgatacgacgcgtgggcaaatgagtgatgggggagggcccatcccacggtgaccgaacaaacaagtaccacccaggcaggcaggcttcttcctgcgggattcgacgcggagcggaagccccagtggccagtgcccaccaccttcacgcctcctcgcgtcgtcgcaaccgcagatctggccaacggcccccgaccgatcgacccccctccccctcggcgcggcgaggcgcagtcaaatttgtcaagctactgttgatgctccagatatagtagaaaaccatgggagaagttagtgatgataattccaacatgtcctttctaaaaagaatcgctacaagtgacgtgccactgttgaaagagtatggtgtgaatggagttgttgtcgccctgcttctggctgtagttactcctgtcctgctttccatgatgtttggcaagaagacaaagcaaagggcggtgcgagctgatgtgggtggagaggagggatttgcaatgcggaacaacaggttttcctccttagttgaagtcccatgggagggcgccacgacaatgtcagctctgttcgagatggccagcaaaaagtactctcgacagaggtgtcttggcacgaggaagctaattaagagggaatttatggaatcttctgatggtaggaagtttgagaaactgcaccttggtgaatatgaatgggatacctacactgaggcatttaatcgtgcatgtaatttttcttctggacttatcaagatgggccacgacctagatagtcatgctgctatcttctctgatacaagagctgagtggatcattgctgctcagggatgcttccgacaaaatttaacggttgtaacaatatatgcatctcttggtgaggatgcattggtgcattcactaaatgagacacaggtttcaactctgatatgtgattcgaagcaacttaagaagatacctgcaatcagctataaattgcagagtcttaggcgtattatctatattgaggatgaacctgtcgaggctgagacactgaaccaagtgaagcatttgacaacattgtctttcactgaagtagaggagcttggcaagacatctcatgttgatgcaaggttaccttcaggctctgatactgcagttatcatgtatacaagcggaagtactggtcttcccaagggtgtaatgatcacacatggcaacatggtggccacaactgcagcagtcatgacaatagtcccaaaccttggcatgaatgatgtttatctggcttatcttccattggctcatgtctttgaactagcaggggagactgtcatgttagcttctggcagtgccattggatatggttcagcattaactatgactgatacatcgaacaagattaaaaagggaacaaaaggagatgtttctgtactgaatcctactcttatgatttcagttcctgcaattttggatcgtatcaaagatgcagtatttaagaaagttggtgagaagggtggcctgacaaaaaagctgtcttgattttttcatataagcgaaatattgcagcaattgaagggagttggtttggatcttgggcaccagagaggatgttatgggatcacattatttataaaccaatacgggcaatgcttggaggacgtctaagatttgttctttgtggtggtgcacctctgtcaagtgacacacaaagatttatgaatatatgtctaggtgtcccagtgggtcaaggctatggattgactgaaacttgtgctggagcagctttcactgaatgggatgatacaagtgtgggtcgtgttggtccaccacttccttgttgctatgtgaagcttgtctcatgggaagaaggtggttacaagatttctgattctccaatgccgagaggagaggtcgcggttggtggacacagtataacaaaaggttatttcaacaatgaagcaaagacgaacgaagtatacaaggttgatgagaggggcatacgctggttctacactggtgatattggtcagttccatcctgatgggtgccttgagattattgacaggaaaaaagatatagtaaagcttcagcatggagaatatgtgtctcttggcaaggttgaatcggctctagcaacaagcaactatgtggagaacatcatggtttatgccgatccatttcataactactgtgttgccctggttgttccagcgcaccaggccttggagaagtgggctcagaattccgggatgaactatgaaggctttggagagctttgccaaaacgaccgagcaattaaggaggttcagcaatcgctatcaaaggccgcaaaagcagcgaggctcgagaaattcgaggtgccagcgaagatcgtgctgttgcctgaaccgtggacgccggagtccgggctggtgaccgcagcgcttaaactgaagagggagcaaataaaggccaaattcaaaggcgatctggacaagctctaccactgaagaagcgacagaggacggtttaatttgcacctactgcttccagacgcttgcggtgccaaaagctgcctggatggaacttttactgacctgcacgagtggtgtgtgtgtgtgtatcccagctgctgatacacaggagcttcgttcttctgtgactgtgactgagggaaaataaacccagtgttggaatgatcttgatttgtaatagcttcacgtcatgggattttaattttgtcatagcacagaggatgctcaatttcacgtccgttacgggtcagttatgacactaagcatattgtaaatgatgtttttttatatagacacaataaataggccctgggcacatcacctaatggtactctatatcgccatctattgatttgtaatgggaagacggacgaggttggttagttttg

SEQ ID NO: 41173 - DNA, 1437 bp, Zea Mays
aacaaacaagtaccacccaggcaggcaggcttcttcctgcgggattcgacgcggagcggaagccccagtggccagtgcccaccaccttcacgcctcctcgcgtcgtcgcaaccgcagatctggccaacggcccccgaccgatcgacccccctccccctcggcgcggcgaggcgcagcaattcaagtgtatcaccgttgttacttccataacgtgctaacagtcaaatttgtcaagctactgttgatgctccagatatagtagaaaaccatgggagaagttagtgatgataattccaacatgtcctttctaaaaagaatcgctacaagtgacgtgccactgttgaaagagtatggtgtgaatggagttgttgtcgccctgcttctggctgtagttactcctgtcctgctttccatgatgtttggcaagaagacaaagcaaagggcggtgcgagctgatgtgggtggagaggagggatttgcaatgcggaacaacaggttttcctccttagttgaagtcccatgggagggcgccacgacaatgtcagctctgttcgagatggccagcaaaaagtactctcgacagaggtgtcttggcacgaggaagctaattaagagggaatttatggaatcttctgatggtaggaagtttgagaaactgcaccttggtgaatatgaatgggatacctacactgaggcatttaatcgtgcatgtaatttttcttctggacttatcaagatgggccacgacctagatagtcatgctgctatcttctctgatacaagagctgagtggatcattgctgctcagggatgcttccgacaaaatttaacggttgtaacaatatatgcatctcttggtgaggatgcattggtgcattcactaaatgagacacaggtttcaactctgatatgtgattcgaagcaacttaagaagatacctgcaatcagctataaattgcagagtcttaggcgtattatctatattgaggatgaacctgtcgaggctgagacactgaaccaagtgaagcatttgacaacattgtctttcactgaagtagaggagcttggcaagacatctcatgttgatgcaaggttaccttcaggctctgatactgcagttatcatgtatacaagcggaagtactggtcttcccaaggtgtaatgatcacacatggcaacatggtggccacaactgcagcagtcatgacaatagtcccaaaccttggcatgaatgatgtttatctggcttatcttccattggctcatgtctttgaactagcaggggagactgtcatgttagcttctggcagtgccattggatatggttcagcattaactatgactgatacatcgaacaagattaaaaagggaacaaaaggagatgtttctgtactgaatcctactcttatgatttcagttcctgcaattttggatcgt

SEQ ID NO: 41174 - DNA, 2864 bp, Zea Mays
aacaaacaagtaccacccaggcaggcaggcttcttcctgcgggattcgacgcggagcggaagccccagtggccagtgcccaccaccttcacgcctcctcgcgtcgtcgcaaccgcagatctggccaacggcccccgaccgatcgacccccctccccctcggcgcggcgaggcgcagcaattcaagtgtatcaccgttgttacttccataacgtgctaacagtcaaatttgtcaagctactgttgatgctccagatatagtagaaaaccatgggagaagttagtgatgataattccaacatgtcctttctaaaaagaatcgctacaagtgacgtgccactgttgaaagagtatggtgtgaatggagttgttgtcgccctgcttctggctgtagttactcctgtcctgctttccatgatgtttggcaagaagacaaagcaaagggcggtgcgagctgatgtgggtggagaggagggatttgcaatgcggaacaacaggttttcctccttagttgaagtcccatgggagggcgccacgacaatgtcagctctgttcgagatggccagcaaaaagtactctcgacagaggtgtcttggcacgaggaagctaattaagagggaatttatggaatcttctgatggtaggaagtttgagaaactgcaccttggtgaatatgaatgggatacctacactgaggcatttaatcgtgcatgtaatttttcttctggacttatcaagatgggccacgacctagatagtcatgctgctatcttctctgatacaagagctgagtggatcattgctgctcagggatgcttccgacaaaatttaacggttgtaacaatatatgcatctcttggtgaggatgcattggtgcattcactaaatgagacacaggtttcaactctgatatgtgattcgaagcaacttaagaagatacctgcaatcagctataaattgcagagtcttaggcgtattatctatattgaggatgaacctgtcgaggctgagacactgaaccaagtgaagcatttgacaacattgtctttcactgaagtagaggagcttggcaagacatctcatgttgatgcaaggttaccttcaggctctgatactgcagttatcatgtatacaagcggaagtactggtcttcccaagggtgtaatgatcacacatggcaacatggtggccacaactgcagcagtcatgacaatagtcccaaaccttggcatgaatgatgtttatctggcttatcttccattggctcatgtctttgaactagcaggggagactgtcatgttagcttctggcagtgccattggatatggttcagcattaactatgactgatacatcgaacaagattaaaaagggaacaaaaggagatgtttctgtactgaatcctactcttatgatttcagttcctgcaattttggatcgtatcaaagatgcagtatttaagaaagttggtgagaagggtggcctgacaaaaaagctgtcttgattttttcatataagcgaaatattgcagcaattgaagggagttggtttggatcttgggcaccagagaggatgttatgggatcacattatttataaaccaatacgggcaatgcttggaggacgtctaagatttgttctttgtggtggtgcacctctgtcaagtgacacacaaagatttatgaatatatgtctaggtgtcccagtgggtcaaggctatggattgactgaaacttgtgctggagcagctttcactgaatgggatgatacaagtgtgggtcgtgttggtccaccacttccttgttgctatgtgaagcttgtctcatgggaagaaggtggttacaagatttctgattctccaatgccgagaggagaggtcgcggttggtggacacagtataacaaaaggttatttcaacaatgaagcaaagacgaacgaagtatacaaggttgatgagaggggcatacgctggttctacactggtgatattggtcagttccatcctgatgggtgccttgagattattgacaggaaaaaagatatagtaaagcttcagcatggagaatatgtgtctcttggcaaggttgaatcggctctagcaacaagcaactatgtggagaacatcatggtttatgccgatccatttcataactactgtgttgccctggttgttccagcgcaccaggccttggagaagtgggctcagaattccgggatgaactatgaaggctttggagagctttgccaaaacgaccgagcaattaaggaggttcagcaatcgctatcaaaggccgcaaaagcagcgaggctcgagaaattcgaggtgccagcgaagatcgtgctgttgcctgaaccgtggacgccggagtccgggctggtgaccgcagcgcttaaactgaagagggagcaaataaaggccaaattcaaaggcgatctggacaagctctaccactgaagaagcgacagaggacggtttaatttgcacctactgcttccagacgcttgcggtgccaaaagctgcctggatggaacttttactgacctgcacgagtggtgtgtgtgtgtgtatcccagctgctgatacacaggagcttcgttcttctgtgactgtgactgagggaaaataaacccagtgttggaatgatcttgatttgtaatagcttcacgtcatgggattttaattttgtcatagcacagaggatgctcaatttcacgtccgttacgggtcagttatgacactaagcatattgtaaatgatgtttttttatatagacacaataaataggccctgggcacatcacctaatggtactctatatcgccatctattgatttgtaatgggaagacggacgaggttggttagttttg

SEQ ID NO: 41175 - DNA, 2679 bp, Zea Mays
cgacgcggagcggaagccccagtggccagtgcccaccaccttcacgcctcctcgcgtcgtcgcaaccgcagatctggccaacggcccccgaccgatcgacccccctccccctcggcgcggcgaggcgcagtcaaatttgtcaagctactgttgatgctccagatatagtagaaaaccatgggagaagttagtgatgataattccaacatgtcctttctaaaaagaatcgctacaagtgacgtgccactgttgaaagagtatggtgtgaatggagttgttgtcgccctgcttctggctgtagttactcctgtcctgctttccatgatgtttggcaagaagacaaagcaaagggcggtgcgagctgatgtgggtggagaggagggatttgcaatgcggaacaacaggttttcctccttagttgaagtcccatgggagggcgccacgacaatgtcagctctgttcgagatggccagcaaaaagtactctcgacagaggtgtcttggcacgaggaagctaattaagagggaatttatggaatcttctgatggtaggaagtttgagaaactgcaccttggtgaatatgaatgggatacctacactgaggcatttaatcgtgcatgtaatttttcttctggacttatcaagatgggccacgacctagatagtcatgctgctatcttctctgatacaagagctgagtggatcattgctgctcagggatgcttccgacaaaatttaacggttgtaacaatatatgcatctcttggtgaggatgcattggtgcattcactaaatgagacacaggtttcaactctgatatgtgattcgaagcaacttaagaagatacctgcaatcagctataaattgcagagtcttaggcgtattatctatattgaggatgaacctgtcgaggctgagacactgaaccaagtgaagcatttgacaacattgtctttcactgaagtagaggagcttggcaagacatctcatgttgatgcaaggttaccttcaggctctgatactgcagttatcatgtatacaagcggaagtactggtcttcccaagggtgtaatgatcacacatggcaacatggtggccacaactgcagcagtcatgacaatagtcccaaaccttggcatgaatgatgtttatctggcttatcttccattggctcatgtctttgaactagcaggggagactgtcatgttagcttctggcagtgccattggatatggttcagcattaactatgactgatacatcgaacaagattaaaaagggaacaaaaggagatgtttctgtactgaatcctactcttatgatttcagttcctgcaattttggatcgtatcaaagatgcagtatttaagaaagttggtgagaagggtggcctgacaaaaaagctgtcttgattttttcatataagcgaaatattgcagcaattgaagggagttggtttggatcttgggcaccagagaggatgttatgggatcacattatttataaaccaatacgggcaatgcttggaggacgtctaagatttgttctttgtggtggtgcacctctgtcaagtgacacacaaagatttatgaatatatgtctaggtgtcccagtgggtcaaggctatggattgactgaaacttgtgctggagcagctttcactgaatgggatgatacaagtgtgggtcgtgttggtccaccacttccttgttgctatgtgaagcttgtctcatgggaagaaggtggttacaagatttctgattctccaatgccgagaggagaggtcgcggttggtggacacagtataacaaaaggttatttcaacaatgaagcaaagacgaacgaagtatacaaggttgatgagaggggcatacgctggttctacactggtgatattggtcagttccatcctgatgggtgccttgagattattgacaggaaaaaagatatagtaaagcttcagcatggagaatatgtgtctcttggcaagcgcaccaggccttggagaagtgggctcagaattccgggatgaactatgaaggctttggagagctttgccaaaacgaccgagcaattaaggaggttcagcaatcgctatcaaaggccgcaaaagcagcgaggctcgagaaattcgaggtgccagcgaagatcgtgctgttgcctgaaccgtggacgccggagtccgggctggtgaccgcagcgcttaaactgaagagggagcaaataaaggccaaattcaaaggcgatctggacaagctctaccactgaagaagcgacagaggacggtttaatttgcacctactgcttccagacgcttgcggtgccaaaagctgcctggatggaacttttactgacctgcacgagtggtgtgtgtgtgtgtatcccagctgctgatacacaggagcttcgttcttctgtgactgtgactgagggaaaataaacccagtgttggaatgatcttgatttgtaatagcttcacgtcatgggattttaattttgtcatagcacagaggatgctcaatttcacgtccgttacgggtcagttatgacactaagcatattgtaaatgatgtttttttatatagacacaataaataggccctgggcacatcacctaatggtactctatatcgccatctattgatttgtaatgggaagacggacgaggttggttagttttg

SEQ ID NO: 41176 - DNA, 2678 bp, Zea Mays
cgacgcggagcggaagccccagtggccagtgcccaccaccttcacgcctcctcgcgtcgtcgcaaccgcagatctggccaacggcccccgaccgatcgacccccctccccctcggcgcggcgaggcgcagcaaatttgtcaagctactgttgatgctccagatatagtagaaaaccatgggagaagttagtgatgataattccaacatgtcctttctaaaaagaatcgctacaagtgacgtgccactgttgaaagagtatggtgtgaatggagttgttgtcgccctgcttctggctgtagttactcctgtcctgctttccatgatgtttggcaagaagacaaagcaaagggcggtgcgagctgatgtgggtggagaggagggatttgcaatgcggaacaacaggttttcctccttagttgaagtcccatgggagggcgccacgacaatgtcagctctgttcgagatggccagcaaaaagtactctcgacagaggtgtcttggcacgaggaagctaattaagagggaatttatggaatcttctgatggtaggaagtttgagaaactgcaccttggtgaatatgaatgggatacctacactgaggcatttaatcgtgcatgtaatttttcttctggacttatcaagatgggccacgacctagatagtcatgctgctatcttctctgatacaagagctgagtggatcattgctgctcagggatgcttccgacaaaatttaacggttgtaacaatatatgcatctcttggtgaggatgcattggtgcattcactaaatgagacacaggtttcaactctgatatgtgattcgaagcaacttaagaagatacctgcaatcagctataaattgcagagtcttaggcgtattatctatattgaggatgaacctgtcgaggctgagacactgaaccaagtgaagcatttgacaacattgtctttcactgaagtagaggagcttggcaagacatctcatgttgatgcaaggttaccttcaggctctgatactgcagttatcatgtatacaagcggaagtactggtcttcccaagggtgtaatgatcacacatggcaacatggtggccacaactgcagcagtcatgacaatagtcccaaaccttggcatgaatgatgtttatctggcttatcttccattggctcatgtctttgaactagcaggggagactgtcatgttagcttctggcagtgccattggatatggttcagcattaactatgactgatacatcgaacaagattaaaaagggaacaaaaggagatgtttctgtactgaatcctactcttatgatttcagttcctgcaattttggatcgtatcaaagatgcagtatttaagaaagttggtgagaagggtggcctgacaaaaaagctgtcttgattttttcatataagcgaaatattgcagcaattgaagggagttggtttggatcttgggcaccagagaggatgttatgggatcacattatttataaaccaatacgggcaatgcttggaggacgtctaagatttgttctttgtggtggtgcacctctgtcaagtgacacacaaagatttatgaatatatgtctaggtgtcccagtgggtcaaggctatggattgactgaaacttgtgctggagcagctttcactgaatgggatgatacaagtgtgggtcgtgttggtccaccacttccttgttgctatgtgaagcttgtctcatgggaagaaggtggttacaagatttctgattctccaatgccgagaggagaggtcgcggttggtggacacagtataacaaaaggttatttcaacaatgaagcaaagacgaacgaagtatacaaggttgatgagaggggcatacgctggttctacactggtgatattggtcagttccatcctgatgggtgccttgagattattgacaggaaaaaagatatagtaaagcttcagcatggagaatatgtgtctcttggcaagcgcaccaggccttggagaagtgggctcagaattccgggatgaactatgaaggctttggagagctttgccaaaacgaccgagcaattaaggaggttcagcaatcgctatcaaaggccgcaaaagcagcgaggctcgagaaattcgaggtgccagcgaagatcgtgctgttgcctgaaccgtggacgccggagtccgggctggtgaccgcagcgcttaaactgaagagggagcaaataaaggccaaattcaaaggcgatctggacaagctctaccactgaagaagcgacagaggacggtttaatttgcacctactgcttccagacgcttgcggtgccaaaagctgcctggatggaacttttactgacctgcacgagtggtgtgtgtgtgtgtatcccagctgctgatacacaggagcttcgttcttctgtgactgtgactgagggaaaataaacccagtgttggaatgatcttgatttgtaatagcttcacgtcatgggattttaattttgtcatagcacagaggatgctcaatttcacgtccgttacgggtcagttatgacactaagcatattgtaaatgatgtttttttatatagacacaataaataggccctgggcacatcacctaatggtactctatatcgccatctattgatttgtaatgggaagacggacgaggttggttagttttg

SEQ ID NO: 41177 - DNA, 2624 bp, Zea Mays
tcgtcctgttgcgcggcttcttctgctttgcaattcaagtgtatcaccgttgttacttccataacgtgctaacagtcaaatttgtcaagctactgttgatgctccagatatagtagaaaaccatgggagaagttagtgatgataattccaacatgtcctttctaaaaagaatcgctacaagtgacgtgccactgttgaaagagtatggtgtgaatggagttgttgtcgccctgcttctggctgtagttactcctgtcctgctttccatgatgtttggcaagaagacaaagcaaagggcggtgcgagctgatgtgggtggagaggagggatttgcaatgcggaacaacaggttttcctccttagttgaagtcccatgggagggcgccacgacaatgtcagctctgttcgagatggccagcaaaaagtactctcgacagaggtgtcttggcacgaggaagctaattaagagggaatttatggaatcttctgatggtaggaagtttgagaaactgcaccttggtgaatatgaatgggatacctacactgaggcatttaatcgtgcatgtaatttttcttctggacttatcaagatgggccacgacctagatagtcatgctgctatcttctctgatacaagagctgagtggatcattgctgctcagggatgcttccgacaaaatttaacggttgtaacaatatatgcatctcttggtgaggatgcattggtgcattcactaaatgagacacaggtttcaactctgatatgtgattcgaagcaacttaagaagatacctgcaatcagctataaattgcagagtcttaggcgtattatctatattgaggatgaacctgtcgaggctgagacactgaaccaagtgaagcatttgacaacattgtctttcactgaagtagaggagcttggcaagacatctcatgttgatgcaaggttaccttcaggctctgatactgcagttatcatgtatacaagcggaagtactggtcttcccaagggtgtaatgatcacacatggcaacatggtggccacaactgcagcagtcatgacaatagtcccaaaccttggcatgaatgatgtttatctggcttatcttccattggctcatgtctttgaactagcaggggagactgtcatgttagcttctggcagtgccattggatatggttcagcattaactatgactgatacatcgaacaagattaaaaagggaacaaaaggagatgtttctgtactgaatcctactcttatgatttcagttcctgcaattttggatcgtatcaaagatgcagtatttaagaaagttggtgagaagggtggcctgacaaaaaagctgtcttgattttttcatataagcgaaatattgcagcaattgaagggagttggtttggatcttgggcaccagagaggatgttatgggatcacattatttataaaccaatacgggcaatgcttggaggacgtctaagatttgttctttgtggtggtgcacctctgtcaagtgacacacaaagatttatgaatatatgtctaggtgtcccagtgggtcaaggctatggattgactgaaacttgtgctggagcagctttcactgaatgggatgatacaagtgtgggtcgtgttggtccaccacttccttgttgctatgtgaagcttgtctcatgggaagaaggtggttacaagatttctgattctccaatgccgagaggagaggtcgcggttggtggacacagtataacaaaaggttatttcaacaatgaagcaaagacgaacgaagtatacaaggttgatgagaggggcatacgctggttctacactggtgatattggtcagttccatcctgatgggtgccttgagattattgacaggaaaaaagatatagtaaagcttcagcatggagaatatgtgtctcttggcaagcgcaccaggccttggagaagtgggctcagaattccgggatgaactatgaaggctttggagagctttgccaaaacgaccgagcaattaaggaggttcagcaatcgctatcaaaggccgcaaaagcagcgaggctcgagaaattcgaggtgccagcgaagatcgtgctgttgcctgaaccgtggacgccggagtccgggctggtgaccgcagcgcttaaactgaagagggagcaaataaaggccaaattcaaaggcgatctggacaagctctaccactgaagaagcgacagaggacggtttaatttgcacctactgcttccagacgcttgcggtgccaaaagctgcctggatggaacttttactgacctgcacgagtggtgtgtgtgtgtgtatcccagctgctgatacacaggagcttcgttcttctgtgactgtgactgagggaaaataaacccagtgttggaatgatcttgatttgtaatagcttcacgtcatgggattttaattttgtcatagcacagaggatgctcaatttcacgtccgttacgggtcagttatgacactaagcatattgtaaatgatgtttttttatatagacacaataaataggccctgggcacatcacctaatggtactctatatcgccatctattgatttgtaatgggaagacggacgaggttggttagttttg

SEQ ID NO: 41178 - DNA, 2576 bp, Zea Mays
tcctgttgcgcggcttcttctgctttgtcaaatttgtcaagctactgttgatgctccagatatagtagaaaaccatgggagaagttagtgatgataattccaacatgtcctttctaaaaagaatcgctacaagtgacgtgccactgttgaaagagtatggtgtgaatggagttgttgtcgccctgcttctggctgtagttactcctgtcctgctttccatgatgtttggcaagaagacaaagcaaagggcggtgcgagctgatgtgggtggagaggagggatttgcaatgcggaacaacaggttttcctccttagttgaagtcccatgggagggcgccacgacaatgtcagctctgttcgagatggccagcaaaaagtactctcgacagaggtgtcttggcacgaggaagctaattaagagggaatttatggaatcttctgatggtaggaagtttgagaaactgcaccttggtgaatatgaatgggatacctacactgaggcatttaatcgtgcatgtaatttttcttctggacttatcaagatgggccacgacctagatagtcatgctgctatcttctctgatacaagagctgagtggatcattgctgctcagggatgcttccgacaaaatttaacggttgtaacaatatatgcatctcttggtgaggatgcattggtgcattcactaaatgagacacaggtttcaactctgatatgtgattcgaagcaacttaagaagatacctgcaatcagctataaattgcagagtcttaggcgtattatctatattgaggatgaacctgtcgaggctgagacactgaaccaagtgaagcatttgacaacattgtctttcactgaagtagaggagcttggcaagacatctcatgttgatgcaaggttaccttcaggctctgatactgcagttatcatgtatacaagcggaagtactggtcttcccaagggtgtaatgatcacacatggcaacatggtggccacaactgcagcagtcatgacaatagtcccaaaccttggcatgaatgatgtttatctggcttatcttccattggctcatgtctttgaactagcaggggagactgtcatgttagcttctggcagtgccattggatatggttcagcattaactatgactgatacatcgaacaagattaaaaagggaacaaaaggagatgtttctgtactgaatcctactcttatgatttcagttcctgcaattttggatcgtatcaaagatgcagtatttaagaaagttggtgagaagggtggcctgacaaaaaagctgtcttgattttttcatataagcgaaatattgcagcaattgaagggagttggtttggatcttgggcaccagagaggatgttatgggatcacattatttataaaccaatacgggcaatgcttggaggacgtctaagatttgttctttgtggtggtgcacctctgtcaagtgacacacaaagatttatgaatatatgtctaggtgtcccagtgggtcaaggctatggattgactgaaacttgtgctggagcagctttcactgaatgggatgatacaagtgtgggtcgtgttggtccaccacttccttgttgctatgtgaagcttgtctcatgggaagaaggtggttacaagatttctgattctccaatgccgagaggagaggtcgcggttggtggacacagtataacaaaaggttatttcaacaatgaagcaaagacgaacgaagtatacaaggttgatgagaggggcatacgctggttctacactggtgatattggtcagttccatcctgatgggtgccttgagattattgacaggaaaaaagatatagtaaagcttcagcatggagaatatgtgtctcttggcaagcgcaccaggccttggagaagtgggctcagaattccgggatgaactatgaaggctttggagagctttgccaaaacgaccgagcaattaaggaggttcagcaatcgctatcaaaggccgcaaaagcagcgaggctcgagaaattcgaggtgccagcgaagatcgtgctgttgcctgaaccgtggacgccggagtccgggctggtgaccgcagcgcttaaactgaagagggagcaaataaaggccaaattcaaaggcgatctggacaagctctaccactgaagaagcgacagaggacggtttaatttgcacctactgcttccagacgcttgcggtgccaaaagctgcctggatggaacttttactgacctgcacgagtggtgtgtgtgtgtgtatcccagctgctgatacacaggagcttcgttcttctgtgactgtgactgagggaaaataaacccagtgttggaatgatcttgatttgtaatagcttcacgtcatgggattttaattttgtcatagcacagaggatgctcaatttcacgtccgttacgggtcagttatgacactaagcatattgtaaatgatgtttttttatatagacacaataaataggccctgggcacatcacctaatggtactctatatcgccatctattgatttgtaatgggaagacggacgaggttggttagttttg

SEQ ID NO: 41179 - DNA, 1191 bp, Zea Mays
ccttctcttaccttggttggttctatctcttcttaaccaccacctgttcgtttttctctctgcttgcgtagttgcgtctccccctccgccccgcccctctccatttggcagcagccagagccacgcgcgcgcgccggcctccctcctcgcgacctcctggcccgctgatctctggccggccgtcgtcggtgtaaccatggcggcggcggcggctttcgtcgtcgtcgttgtccaactccaagcatcatcaggagaaggagggggacgagctgaggcggaactcggacgtggtggagatcctcaggaacacgcagttccgccgcctctgcaagcgctccggccgccggatacccgagcggatcctcgaccacgatcgtgtgatctggctaggcgacctcaactaccggatcgctctgagctacacggaggccaagaagctcgtccaggccaacgactgggccgctctcttcgagaaggatcagagggtggaacgagggcaagatcctcttcgccccgacgtacaagtactcgtggaactccgacacctacgccggcgaggacgtgtcgtccaagaagaagaggaggacgccggcatggtgcgaccgcatcctctggcacggcgaagggatagtgcagctgtcctacatccgcggcgagtccaagttctccgaccaccgccctgtctgcggcgtgttcatcgtcgaggccgcggtcgtccccgacagcagccgcctcgtcaagttcgcctcgggccccaacatgaaagtcggcgcggaggagctcctgctcgcctcctccaagtatgatctatagcagcgcatggcaatccaaagcagcggccctactagagagactcaggaaggctaaccgaaaaaatgatcaaggaccacaccacacgccgttctgttcattgctattacttcaagaaccaagactgctcgctcccatccacagagtaccatcagtacagactacagagtacagcactgatacagcatcttcattctatatatgggccgtgattcatttgattttattaacttaaagttgatgtttttttcttctccatttcaagagggaaacaaaaatgcagtcttgtgcatgtttatgcaatgcccatacacgtctgactggcaaatgaaatagttgcataaatatatggagtatggtattgtgctttctctgaaacac

SEQ ID NO: 41180 - DNA, 2512 bp, Zea Mays
ccttctcttaccttggttggttctatctcttcttaaccaccacctgttcgtttttctctctgcttgcgtagttgcgtctccccctccgccccgcccctctccatttggcagcagccagagccacgcgcgcgcgccggcctccctcctcgcgacctcctggcccgctgatctctggccggccgtcgtcggtgtaaccatggcggcggcggcggctttcgtcgtcgtcgttgtccaactccaagcatcatcaggagtttcgttcgccctgcagtctccgttccgtgatgagctgctcgccgtttgaagctggtcgcggaaactaaaccggccgcgcgcgggttcagagacacatggacaagagcggcggcagcagcaggaagacgaggaggaagaagaagtctctcttcccaaaactccacggagcagaagatgatgttgggaataatgatgcctcgccgagacgtctcgccgcagttgctggcttgaaggagtcccctgaacggtggtcagtggcagcagtggcttccccgtcagcgtcagcgtcgtcctcatccttcttcaaaagcctttcggagagcaggagtctaaagtttggcggcggtttcggttcgcctgcaccagccagcgccgctgctcatacggaagctttcagggtgtttgcagccacatggaacgtagccgggaaggccccggacaagggtctaagtctcaacgatttcctgccttctgatgactactcggacatttatgtgctagggttccaggaagtggtcccgctgaacgccggcaacgtgctggtgatcgaggacaacgagccggcgtcgagatggctggcgctcatcaaccaggcgctgaaccggccgtcgccgccttccgacgcctccgcggcatcggaagctccagcgaccagctgctcgttcagccggtcgtccctggacacggcggcggcggcggtggctgtgcagacgccggcgacgccgagcgccagccgctggacccatcccggttccacaaggcctccaacagggagatccggcgcgccgccatcacccgcgggcggcggctcaaggcgtgcacgtgcccgtcgccggaccaccagcaccgtcgccgccgccgccggcgcctgccgctgagggcgccctgcctgatgggctgcggcggcaggggcgcgagcgccgcagccgtcgagggcgacgacacgacgacgacgtccgacgaggaggacgaggaggtcagggccagcagcttcgcggcgtccgacgtgaccaagagccccgccgccgctgccgcctgggcggctgcgggtgcgggggcgccgggccggcgcgagaggtactgcctggtggcgtgcaagcagatggtggggctgttcgcgacggtgtgggtgaggcgcgggctggtgccccacgtcggccacgtccgcttctcctgcgtcggccgcggcatcatgggctacctcggcaacaaggggtgcatctcggtgagcatgtcgctgcaccagacgagcctgtgcttcgtgtgcagccacctggcgtcgggggagaaggagggggacgagctgaggcggaactcggacgtggtggagatcctcaggaacacgcagttccgccgcctctgcaagcgctccggccgccggatacccgagcggatcctcgaccacgatcgtgtgatctggctaggcgacctcaactaccggatcgctctgagctacacggaggccaagaagctcgtccaggccaacgactgggccgctctcttcgagaaggatcagctcaagactgaaagggagagcggggtgttcagagggtggaacgagggcaagatcctcttcgccccgacgtacaagtactcgtggaactccgacacctacgccggcgaggacgtgtcgtccaagaagaagaggaggacgccggcatggtgcgaccgcatcctctggcacggcgaagggatagtgcagctgtcctacatccgcggcgagtccaagttctccgaccaccgccctgtctgcggcgtgttcatcgtcgaggccgcggtcgtccccgacagcagccgcctcgtcaagttcgcctcgggccccaacatgaaagtcggcgcggaggagctcctgctcgcctcctccaagtatgatctatagcagcgcatggcaatccaaagcagcggccctactagagagactcaggaaggctaaccgaaaaaatgatcaaggaccacaccacacgccgttctgttcattgctattacttcaagaaccaagactgctcgctcccatccacagagtaccatcagtacagactacagagtacagcactgatacagcatcttcattctatatatgggccgtgattcatttgattttattaacttaaagttgatgtttttttcttctccatttcaagagggaaacaaaaatgcagtcttgtgcatgtttatgcaatgcccatacacgtctgactggcaaatgaaatagttgcataaatatatggagtatggtattgtgctttctctgaaacac

SEQ ID NO: 41181 - DNA, 2010 bp, Zea Mays
tcagttgctggcttgaaggagtcccctgaacggtggtcagtggcagcagtggcttccccgtcagcgtcagcgtcgtcctcatccttcttcaaaagcctttcggagagcaggagtctaaagtttggcggcggtttcggttcgcctgcaccagccagcgccgctgctcatacggaagctttcagggtgtttgcagccacatggaacgtagccgggaaggccccggacaagggtctaagtctcaacgatttcctgccttctgatgactactcggacatttatgtgctagggttccaggaagtggtcccgctgaacgccggcaacgtgctggtgatcgaggacaacgagccggcgtcgagatggctggcgctcatcaaccaggcgctgaaccggccgtcgccgccttccgacgcctccgcggcatcggaagctccagcgaccagctgctcgttcagccggtcgtccctggacacggcggcggcggcggtggctgtgcagacgccggcgacgccgagcgccagccgctggacccatcccggttccacaaggcctccaacagggagatccggcgcgccgccatcacccgcgggcggcggctcaaggcgtgcacgtgcccgtcgccggaccaccagcaccgtcgccgccgccgccggcgcctgccgctgagggcgccctgcctgatgggctgcggcggcaggggcgcgagcgccgcagccgtcgagggcgacgacacgacgacgacgtccgacgaggaggacgaggaggtcagggccagcagcttcgcggcgtccgacgtgaccaagagccccgccgccgctgccgcctgggcggctgcgggtgcgggggcgccgggccggcgcgagaggtactgcctggtggcgtgcaagcagatggtggggctgttcgcgacggtgtgggtgaggcgcgggctggtgccccacgtcggccacgtccgcttctcctgcgtcggccgcggcatcatgggctacctcggcaacaaggggtgcatctcggtgagcatgtcgctgcaccagacgagcctgtgcttcgtgtgcagccacctggcgtcgggggagaaggagggggacgagctgaggcggaactcggacgtggtggagatcctcaggaacacgcagttccgccgcctctgcaagcgctccggccgccggatacccgagcggatcctcgaccacgatcgtgtgatctggctaggcgacctcaactaccggatcgctctgagctacacggaggccaagaagctcgtccaggccaacgactgggccgctctcttcgagaaggatcagagggtggaacgagggcaagatcctcttcgccccgacgtacaagtactcgtggaactccgacacctacgccggcgaggacgtgtcgtccaagaagaagaggaggacgccggcatggtgcgaccgcatcctctggcacggcgaagggatagtgcagctgtcctacatccgcggcgagtccaagttctccgaccaccgccctgtctgcggcgtgttcatcgtcgaggccgcggtcgtccccgacagcagccgcctcgtcaagttcgcctcgggccccaacatgaaagtcggcgcggaggagctcctgctcgcctcctccaagtatgatctatagcagcgcatggcaatccaaagcagcggccctactagagagactcaggaaggctaaccgaaaaaatgatcaaggaccacaccacacgccgttctgttcattgctattacttcaagaaccaagactgctcgctcccatccacagagtaccatcagtacagactacagagtacagcactgatacagcatcttcattctatatatgggccgtgattcatttgattttattaacttaaagttgatgtttttttcttctccatttcaagagggaaacaaaaatgcagtcttgtgcatgtttatgcaatgcccatacacgtctgactggcaaatgaaatagttgcataaatatatggagtatggtattgtgctttctctgaaacac

SEQ ID NO: 41182 - DNA, 1777 bp, Zea Mays
aattttcagcacatttttttaagttccaggaagtggtcccgctgaacgccggcaacgtgctggtgatcgaggacaacgagccggcgtcgagatggctggcgctcatcaaccaggcgctgaaccggccgtcgccgccttccgacgcctccgcggcatcggaagctccagcgaccagctgctcgttcagccggtcgtccctggacacggcggcggcggcggtggctgtgcagacgccggcgacgccgagcgccagccgctggacccatcccggttccacaaggcctccaacagggagatccggcgcgccgccatcacccgcgggcggcggctcaaggcgtgcacgtgcccgtcgccggaccaccagcaccgtcgccgccgccgccggcgcctgccgctgagggcgccctgcctgatgggctgcggcggcaggggcgcgagcgccgcagccgtcgagggcgacgacacgacgacgacgtccgacgaggaggacgaggaggtcagggccagcagcttcgcggcgtccgacgtgaccaagagccccgccgccgctgccgcctgggcggctgcgggtgcgggggcgccgggccggcgcgagaggtactgcctggtggcgtgcaagcagatggtggggctgttcgcgacggtgtgggtgaggcgcgggctggtgccccacgtcggccacgtccgcttctcctgcgtcggccgcggcatcatgggctacctcggcaacaaggggtgcatctcggtgagcatgtcgctgcaccagacgagcctgtgcttcgtgtgcagccacctggcgtcgggggagaaggagggggacgagctgaggcggaactcggacgtggtggagatcctcaggaacacgcagttccgccgcctctgcaagcgctccggccgccggatacccgagcggatcctcgaccacgatcgtgtgatctggctaggcgacctcaactaccggatcgctctgagctacacggaggccaagaagctcgtccaggccaacgactgggccgctctcttcgagaaggatcagctcaagactgaaagggagagcggggtgttcagagggtggaacgagggcaagatcctcttcgccccgacgtacaagtactcgtggaactccgacacctacgccggcgaggacgtgtcgtccaagaagaagaggaggacgccggcatggtgcgaccgcatcctctggcacggcgaagggatagtgcagctgtcctacatccgcggcgagtccaagttctccgaccaccgccctgtctgcggcgtgttcatcgtcgaggccgcggtcgtccccgacagcagccgcctcgtcaagttcgcctcgggccccaacatgaaagtcggcgcggaggagctcctgctcgcctcctccaagtatgatctatagcagcgcatggcaatccaaagcagcggccctactagagagactcaggaaggctaaccgaaaaaatgatcaaggaccacaccacacgccgttctgttcattgctattacttcaagaaccaagactgctcgctcccatccacagagtaccatcagtacagactacagagtacagcactgatacagcatcttcattctatatatgggccgtgattcatttgattttattaacttaaagttgatgtttttttcttctccatttcaagagggaaacaaaaatgcagtcttgtgcatgtttatgcaatgcccatacacgtctgactggcaaatgaaatagttgcataaatatatggagtatggtattgtgctttctctgaaacac

SEQ ID NO: 41183 - DNA, 1506 bp, Zea Mays
caaagaacgtgtctcgcaacatatttgtactaacacccctgaagtagaagaaaaatgccgtgagcgcagcagatgtcgtgcggtgcagtgcagtgcaggtgcgggatctctgaatcgctgacgcccagcctcctctgtcatctccctcctcggacctcgccacctcacgcggaaggaggggaagaggaagcgcggagactggaaatcgggccccaaatccgcttcggtctctcgatcggcgaggcatgattcatacaaccggctaggatggcctcaaaagctataaaaagaaggcctatcagcgctgagactgatacaacaggggaaaaacaaatggatacagcactgtcagatcctgtaacagaacctcttctaggaaacactcctcaggaagagaaatccaagacatatgagcctattacacggtcaggtttctgggatgggacggcacaggagtgtcttcgttggacacatcttttagcagcttttgttgctcaatctgcaagaaacatagtaaatgttctttctgaatttggatatttgctagcaagactctttggttgctcttctgcttccaaaagttcacaaaatggacagacacttccagttaacctcagtccattacaggaagaaaggttaagattgttgagacaaaggatagatgtgccatatgactgctcctctgtcaagcatcaggatgccctgaaagaactttggaagttggcttaccctaacagacaacttcctcctctgaagtcagatctctggaaggagatgggctggcagaactccgatccatccacagattttagagcagctgggttcatgtccttggagaatctaatatattttgccagaaattacccattgattttacatgcaggattcctttcacaggctactgcataaagcagatggtaagagagctgaatgggagtatccttttgcagtaggcggcgtaaacatatcctatatgttagttcaaatgctggatttacagtcaggaaaaatgagaacaaaagctggtgttcactttgttcaactactcgatgatgacggtgtggctttcgataaccttttctgtgtagcatttcaggtgcttgattctcaatggcttgcaaggcgagcgagttatatggaattcaatgaggttctgaagtctacacggggtcagttagagcaagagcttactatcggaggtatttctcgcattcaagacatgccatcattcagaatgctgagaaggtagcgctgtttgtacttcacaggaaaagagatacattttagattccaatatattgtttaaatttgttgtccgttctttcactggattttgaagacgtgacattgtgtatgttattgagtatattgtttgtaatgtcgcagcttaaagctacagatcataatatatgatatgatatcttgaaaagaaaaactacgacttccagacatttttattccctggacaatacgtgacaaattatttctaagtgtctcagagtaaat

SEQ ID NO: 41184 - DNA, 1481 bp, Zea Mays
gaacgtgtctcgcaacatatttgtactaacacccctgaagtagaagaaaaatgccgtgagcgcagcagatgtcgtgcggtgcagtgcagtgcaggtgcgggatctctgaatcgctgacgcccagcctcctctgtcatctccctcctcggacctcgccacctcacgcggaaggaggggaagaggaagcgcggagactggaaatcgggccccaaatccgcttcggtctctcgatcggcgaggcatgattcatacaaccggctaggatggcctcaaaagctataaaaagaaggcctatcagcgctgagactgatacaacaggggaaaaacaaatggatacagcactgtcagatcctgtaacagaacctcttctaggaaacactcctcaggaagagaaatccaagacatatgagcctattacacggtcaggtttctgggatgggacggcacaggagtgtcttcgttggacacatcttttagcagcttttgttgctcaatctgcaagaaacatagtaaatgttctttctgaatttggatatttgctagcaagactctttggttgctcttctgcttccaaaagttcacaaaatggacagacacttccagttaacctcagtccattacaggaagaaaggttaagattgttgagacaaaggatagatgtgccatatgactgctcctctgtcaagcatcaggatgccctgaaagaactttggaagttggcttaccctaacagacaacttcctcctctgaagtcagatctctggaaggagatgggctggcagaactccgatccatccacagattttagctgggttcatgtccttggagaatctaatatattttgccagaaattacccagattcctttcacaggctactgcataaagcagatggtaagagagctgaatgggagtatccttttgcagtaggcggcgtaaacatatcctatatgttagttcaaatgctggatttacagtcaggaaaaatgagaacaaaagctggtgttcactttgttcaactactcgatgatgacggtgtggctttcgataaccttttctgtgtagcatttcaggtgcttgattctcaatggcttgcaaggcgagcgagttatatggaattcaatgaggttctgaagtctacacggggtcagttagagcaagagcttactatcggaggtatttctcgcattcaagacatgccatcattcagaatgctgagaaggtagcgctgtttgtacttcacaggaaaagagatacattttagattccaatatattgtttaaatttgttgtccgttctttcactggattttgaagacgtgacattgtgtatgttattgagtatattgtttgtaatgtcgcagcttaaagctacagatcataatatatgatatgatatcttgaaaagaaaaactacgacttccagacatttttattccctggacaatacgtgacaaattatttctaagtgtctcagagtaaat

SEQ ID NO: 41185 - DNA, 1387 bp, Zea Mays
caacatatttgtactaacacccctgaagtagaagaaaaatgccgtgagcgcagcagatgtcgtgcggtgcagtgcagtgcaggtgcgggatctctgaatcgctgacgcccagcctcctctgtcatctccctcctcggacctcgccacctcacgcggaaggaggggaagaggaagcgcggagactggaaatcgggccccaaatccgcttcggtctctcgatcggcgaggcatgattcatacaaccggctaggatggcctcaaaagctataaaaagaaggcctatcagcgctgagactgatacaacaggggaaaaacaaatggatacagcactgtcagatcctgtaacagaacctcttctaggaaacactcctcaggaagagaaatccaagacatatgagcctattacacggtcaggtttctgggatgggacggcacaggagtgtcttcgttggacacatcttttagcagcttttgttgctcaatctgcaagaaacatagtaaatgttctttctgaatttggatatttgctagcaagactctttggttgctcttctgcttccaaaagttcacaaaatggacagacacttccagttaacctcagtccattacaggaagaaaggttaagattgttgagacaaaggatagatgtgccatatgactgctcctctgtcaagcatcaggatgccctgaaagaactttggaagttggcttaccctaacagacaacttcctcctctgaagtcagatctctggaaggagatgggctggcagaactccgatccatccacagattttagagcagctgggttcatgtccttggagaatctaatatattttgccagaaattacccagattcctttcacaggctactgcataaagcagatggaaaaatgagaacaaaagctggtgttcactttgttcaactactcgatgatgacggtgtggctttcgataaccttttctgtgtagcatttcaggtgcttgattctcaatggcttgcaaggcgagcgagttatatggaattcaatgaggttctgaagtctacacggggtcagttagagcaagagcttactatcggaggtatttctcgcattcaagacatgccatcattcagaatgctgagaaggtagcgctgtttgtacttcacaggaaaagagatacattttagattccaatatattgtttaaatttgttgtccgttctttcactggattttgaagacgtgacattgtgtatgttattgagtatattgtttgtaatgtcgcagcttaaagctacagatcataatatatgatatgatatcttgaaaagaaaaactacgacttccagacatttttattccctggacaatacgtgacaaattatttctaagtgtctcagagtaaat

SEQ ID NO: 41186 - DNA, 1407 bp, Zea Mays
actaacacccctgaagtagaagaaaaatgccgtgagcgcagcagatgtcgtgcggtgcagtgcagtgcaggtgcgggatctctgaatcgctgacgcccagcctcctctgtcatctccctcctcggacctcgccacctcacgcggaaggaggggaagaggaagcgcggagactggaaatcgggccccaaatccgcttcggtctctcgatcggcgaggcatgattcatacaaccggctaggatggcctcaaaagctataaaaagaaggcctatcagcgctgagactgatacaacaggggaaaaacaaatggatacagcactgtcagatcctgtaacagaacctcttctaggaaacactcctcaggaagagaaatccaagacatatgagcctattacacggtcaggtttctgggatgggacggcacaggagtgtcttcgttggacacatcttttagcagcttttgttgctcaatctgcaagaaacatagtaaatgttctttctgaatttggatatttgctagcaagactctttggttgctcttctgcttccaaaagttcacaaaatggacagacacttccagttaacctcagtccattacaggaagaaaggttaagattgttgagacaaaggatagatgtgccatatgactgctcctctgtcaagcatcaggatgccctgaaagaactttggaagttggcttaccctaacagacaacttcctcctctgaagtcagatctctggaaggagatgggctggcagaactccgatccatccacagattttaggattcctttcacaggctactgcataaagcagatggtaagagagctgaatgggagtatccttttgcagtaggcggcgtaaacatatcctatatgttagttcaaatgctggatttacagtcaggaaaaatgagaacaaaagctggtgttcactttgttcaactactcgatgatgacggtgtggctttcgataaccttttctgtgtagcatttcaggtgcttgattctcaatggcttgcaaggcgagcgagttatatggaattcaatgaggttctgaagtctacacggggtcagttagagcaagagcttactatcggaggtatttctcgcattcaagacatgccatcattcagaatgctgagaaggtagcgctgtttgtacttcacaggaaaagagatacattttagattccaatatattgtttaaatttgttgtccgttctttcactggattttgaagacgtgacattgtgtatgttattgagtatattgtttgtaatgtcgcagcttaaagctacagatcataatatatgatatgatatcttgaaaagaaaaactacgacttccagacatttttattccctggacaatacgtgacaaattatttctaagtgtctcagagtaaat

SEQ ID NO: 41187 - DNA, 1432 bp, Zea Mays
actaacacccctgaagtagaagaaaaatgccgtgagcgcagcagatgtcgtgcggtgcagtgcagtgcaggtgcgggatctctgaatcgctgacgcccagcctcctctgtcatctccctcctcggacctcgccacctcacgcggaaggaggggaagaggaagcgcggagactggaaatcgggccccaaatccgcttcggtctctcgatcggcgagcaggcatgattcatacaaccggctaggatggcctcaaaagctataaaaagaaggcctatcagcgctgagactgatacaacaggggaaaaacaaatggatacagcactgtcagatcctgtaacagaacctcttctaggaaacactcctcaggaagagaaatccaagacatatgagcctattacacggtcaggtttctgggatgggacggcacaggagtgtcttcgttggacacatcttttagcagcttttgttgctcaatctgcaagaaacatagcaagactctttggttgctcttctgcttccaaaagttcacaaaatggacagacacttccagttaacctcagtccattacaggaagaaaggttaagattgttgagacaaaggatagatgtgccatatgactgctcctctgtcaagcatcaggatgccctgaaagaactttggaagttggcttaccctaacagacaacttcctcctctgaagtcagatctctggaaggagatgggctggcagaactccgatccatccacagattttagagcagctgggttcatgtccttggagaatctaatatattttgccagaaattacccagattcctttcacaggctactgcataaagcagatggtaagagagctgaatgggagtatccttttgcagtaggcggcgtaaacatatcctatatgttagttcaaatgctggatttacagtcaggaaaaatgagaacaaaagctggtgttcactttgttcaactactcgatgatgacggtgtggctttcgataaccttttctgtgtagcatttcaggtgcttgattctcaatggcttgcaaggcgagcgagttatatggaattcaatgaggttctgaagtctacacggggtcagttagagcaagagcttactatcggaggtatttctcgcattcaagacatgccatcattcagaatgctgagaaggtagcgctgtttgtacttcacaggaaaagagatacattttagattccaatatattgtttaaatttgttgtccgttctttcactggattttgaagacgtgacattgtgtatgttattgagtatattgtttgtaatgtcgcagcttaaagctacagatcataatatatgatatgatatcttgaaaagaaaaactacgacttccagacatttttattccctggacaatacgtgacaaattatttctaagtgtctcagagtaaat

SEQ ID NO: 41188 - DNA, 1460 bp, Zea Mays
actaacacccctgaagtagaagaaaaatgccgtgagcgcagcagatgtcgtgcggtgcagtgcagtgcaggtgcgggatctctgaatcgctgacgcccagcctcctctgtcatctccctcctcggacctcgccacctcacgcggaaggaggggaagaggaagcgcggagactggaaatcgggccccaaatccgcttcggtctctcgatcggcgagcaggcatgattcatacaaccggctaggatggcctcaaaagctataaaaagaaggcctatcagcgctgagactgatacaacaggggaaaaacaaatggatacagcactgtcagatcctgtaacagaacctcttctaggaaacactcctcaggaagagaaatccaagacatatgagcctattacacggtcaggtttctgggatgggacggcacaggagtgtcttcgttggacacatcttttagcagcttttgttgctcaatctgcaagaaacatagtaaatgttctttctgaatttggatatttgctagcaagactctttggttgctcttctgcttccaaaagttcacaaaatggacagacacttccagttaacctcagtccattacaggaagaaaggttaagattgttgagacaaaggatagatgtgccatatgactgctcctctgtcaagcatcaggatgccctgaaagaactttggaagttggcttaccctaacagacaacttcctcctctgaagtcagatctctggaaggagatgggctggcagaactccgatccatccacagattttagctgggttcatgtccttggagaatctaatatattttgccagaaattacccagattcctttcacaggctactgcataaagcagatggtaagagagctgaatgggagtatccttttgcagtaggcggcgtaaacatatcctatatgttagttcaaatgctggatttacagtcaggaaaaatgagaacaaaagctggtgttcactttgttcaactactcgatgatgacggtgtggctttcgataaccttttctgtgtagcatttcaggtgcttgattctcaatggcttgcaaggcgagcgagttatatggaattcaatgaggttctgaagtctacacggggtcagttagagcaagagcttactatcggaggtatttctcgcattcaagacatgccatcattcagaatgctgagaaggtagcgctgtttgtacttcacaggaaaagagatacattttagattccaatatattgtttaaatttgttgtccgttctttcactggattttgaagacgtgacattgtgtatgttattgagtatattgtttgtaatgtcgcagcttaaagctacagatcataatatatgatatgatatcttgaaaagaaaaactacgacttccagacatttttattccctggacaatacgtgacaaattatttctaagtgtctcagagtaaat

SEQ ID NO: 41189 - DNA, 2472 bp, Zea Mays
actaacacccctgaagtagaagaaaaatgccgtgagcgcagcagatgtcgtgcggtgcagtgcagtgcaggtgcgggatctctgaatcgctgacgcccagcctcctctgtcatctccctcctcggacctcgccacctcacgcggaaggaggggaagaggaagcgcggagactggaaatcgggccccaaatccgcttcggtctctcgatcggcgaggcatgattcatacaaccggctaggatggcctcaaaagctataaaaagaaggcctatcagcgctgagactgatacaacaggggaaaaacaaatggatacagcactgtcagatcctgtaacagaacctcttctaggaaacactcctcaggaagagaaatccaagacatatgagcctattacacggtcaggtttctgggatgggacggcacaggagtgtcttcgttggacacatcttttagcagcttttgttgctcaatctgcaagaaacatagtaaatgttctttctgaatttggatatttgctagcaagactctttggttgctcttctgcttccaaaagttcacaaaatggacagacacttccagttaacctcagtccattacaggaagaaaggttaagattgttgagacaaaggatagatgtgccatatgactgctcctctgtcaagcatcaggttctcattctgtatcttttttttgacaaaggggaacaccccctatttcattacgaaatagaaaccgaaccaaggtttttacaaaccacagacttaaccaatatccaaaagccgacaagactaccacactatcagctacgaacgggataagcccaacaaagggaacacatcattccagagatatatgaaaaaaactaacaaccaaccagagagaccaactagagacaagaccaaacgcagcctggactagccaccagcagcgacgaccaaagctaggtttttatctactggagaagataagctgattacatccaaacagaacaggacatgaaaagatgcatcagcagccaaaatgtcactggaggcgtctatcgaccggcttccaaccatgggccttgctgtagatgtcacttgttatctttcggattctgcggcttccttgctccaccagtttttttcccctctttgtctgccgaatagaccaagcatcaatccagtaacaacaggagaaaatcacattagatgggtcatcaatcagcttagcattgaagcaacaatcgttacgagtgcgccaaattgcccaaaggacagcaccacacccaaagagaaccagcttcttttcagttttataaaaactattaatccagggaccaaaaaggtcagctgtgtctttgggaatagaggacagattaaaggcaatttggataattctccaaataaacctggccacagggcagtgaaaaagcaaatgatctatggactccaaaagtccacaaaagatacagtccggattcccatgccagtgtcttttaaccaaattatcttttgtcagaatcttcttatcattctgtatctagttttacctttatggcatttctttttattatcaaatgaatggcaattttatacctgtgaagaattggataaatgcaattaactttggtatgtgatattcgtgaccgataaaggcactgcaattcagaagaaataacatcttttttctgttacaggatgccctgaaagaactttggaagttggcttaccctaacagacaacttcctcctctgaagtcagatctctggaaggagatgggctggcagaactccgatccatccacagattttagagcagctgggttcatgtccttggagaatctaatatattttgccagaaattacccagattcctttcacaggctactgcataaagcagatggtaagagagctgaatgggagtatccttttgcagtaggcggcgtaaacatatcctatatgttagttcaaatgctggatttacagtcaggaaaaatgagaacaaaagctggtgttcactttgttcaactactcgatgatgacggtgtggctttcgataaccttttctgtgtagcatttcaggtgcttgattctcaatggcttgcaaggcgagcgagttatatggaattcaatgaggttctgaagtctacacggggtcagttagagcaagagcttactatcggaggtatttctcgcattcaagacatgccatcattcagaatgctgagaaggtagcgctgtttgtacttcacaggaaaagagatacattttagattccaatatattgtttaaatttgttgtccgttctttcactggattttgaagacgtgacattgtgtatgttattgagtatattgtttgtaatgtcgcagcttaaagctacagatcataatatatgatatgatatcttgaaaagaaaaactacgacttccagacatttttattccctggacaatacgtgacaaattatttctaagtgtctcagagtaaat

SEQ ID NO: 41190 - DNA, 1481 bp, Zea Mays
actaacacccctgaagtagaagaaaaatgccgtgagcgcagcagatgtcgtgcggtgcagtgcagtgcaggtgcgggatctctgaatcgctgacgcccagcctcctctgtcatctccctcctcggacctcgccacctcacgcggaaggaggggaagaggaagcgcggagactggaaatcgggccccaaatccgcttcggtctctcgatcggcgagcaggcatgattcatacaaccggctaggatggcctcaaaagctataaaaagaaggcctatcagcgctgagactgatacaacaggggaaaaacaaatggatacagcactgtcagatcctgtaacagaacctcttctaggaaacactcctcaggaagagaaatccaagacatatgagcctattacacggtcaggtttctgggatgggacggcacaggagtgtcttcgttggacacatcttttagcagcttttgttgctcaatctgcaagaaacatagtaaatgttctttctgaatttggatatttgctagcaagactctttggttgctcttctgcttccaaaagttcacaaaatggacagacacttccagttaacctcagtccattacaggaagaaaggttaagattgttgagacaaaggatagatgtgccatatgactgctcctctgtcaagcatcaggatgccctgaaagaactttggaagttggcttaccctaacagacaacttcctcctctgaagtcagatctctggaaggagatgggctggcagaactccgatccatccacagattttagagcagctgggttcatgtccttggagaatctaatatattttgccagaaattacccattgattttacatgcaggattcctttcacaggctactgcataaagcagatggtaagagagctgaatgggagtatccttttgcagtaggcggcgtaaacatatcctatatgttagttcaaatgctggatttacagtcaggaaaaatgagaacaaaagctggtgttcactttgttcaactactcgatgatgacggtgtggctttcgataaccttttctgtgtagcatttcaggtgcttgattctcaatggcttgcaaggcgagcgagttatatggaattcaatgaggttctgaagtctacacggggtcagttagagcaagagcttactatcggaggtatttctcgcattcaagacatgccatcattcagaatgctgagaaggtagcgctgtttgtacttcacaggaaaagagatacattttagattccaatatattgtttaaatttgttgtccgttctttcactggattttgaagacgtgacattgtgtatgttattgagtatattgtttgtaatgtcgcagcttaaagctacagatcataatatatgatatgatatcttgaaaagaaaaactacgacttccagacatttttattccctggacaatacgtgacaaattatttctaagtgtctcagagtaaat

SEQ ID NO: 41191 - DNA, 1378 bp, Zea Mays
actaacacccctgaagtagaagaaaaatgccgtgagcgcagcagatgtcgtgcggtgcagtgcagtgcaggtgcgggatctctgaatcgctgacgcccagcctcctctgtcatctccctcctcggacctcgccacctcacgcggaaggaggggaagaggaagcgcggagactggaaatcgggccccaaatccgcttcggtctctcgatcggcgagcaggcatgattcatacaaccggctaggatggcctcaaaagctataaaaagaaggcctatcagcgctgagactgatacaacaggggaaaaacaaatggatacagcactgtcagatcctgtaacagaacctcttctaggaaacactcctcaggaagagaaatccaagacatatgagcctattacacggtcaggtttctgggatgggacggcacaggagtgtcttcgttggacacatcttttagcagcttttgttgctcaatctgcaagaaacatagtaaatgttctttctgaatttggatatttgctagcaagactctttggttgctcttctgcttccaaaagttcacaaaatggacagacacttccagttaacctcagtccattacaggaagaaaggttaagattgttgagacaaaggatagatgtgccatatgactgctcctctgtcaagcatcaggatgccctgaaagaactttggaagttggcttaccctaacagacaacttcctcctctgaagtcagatctctggaaggagatgggctggcagaactccgatccatccacagattttagagcagctgggttcatgtccttggagaatctaatatattttgccagaaattacccagattcctttcacaggctactgcataaagcagatggaaaaatgagaacaaaagctggtgttcactttgttcaactactcgatgatgacggtgtggctttcgataaccttttctgtgtagcatttcaggtgcttgattctcaatggcttgcaaggcgagcgagttatatggaattcaatgaggttctgaagtctacacggggtcagttagagcaagagcttactatcggaggtatttctcgcattcaagacatgccatcattcagaatgctgagaaggtagcgctgtttgtacttcacaggaaaagagatacattttagattccaatatattgtttaaatttgttgtccgttctttcactggattttgaagacgtgacattgtgtatgttattgagtatattgtttgtaatgtcgcagcttaaagctacagatcataatatatgatatgatatcttgaaaagaaaaactacgacttccagacatttttattccctggacaatacgtgacaaattatttctaagtgtctcagagtaaat

SEQ ID NO: 41192 - DNA, 1373 bp, Zea Mays
actaacacccctgaagtagaagaaaaatgccgtgagcgcagcagatgtcgtgcggtgcagtgcagtgcaggtgcgggatctctgaatcgctgacgcccagcctcctctgtcatctccctcctcggacctcgccacctcacgcggaaggaggggaagaggaagcgcggagactggaaatcgggccccaaatccgcttcggtctctcgatcggcgagcaggcatgattcatacaaccggctaggatggcctcaaaagctataaaaagaaggcctatcagcgctgagactgatacaacaggggaaaaacaaatggatacagcactgtcagatcctgtaacagaacctcttctaggaaacactcctcaggaagagaaatccaagacatatgagcctattacacggtcaggtttctgggatgggacggcacaggagtgtcttcgttggacacatcttttagcagcttttgttgctcaatctgcaagaaacatagtaaatgttctttctgaatttggatatttgctagcaagactctttggttgctcttctgcttccaaaagttcacaaaatggacagacacttccagttaacctcagtccattacaggaagaaaggttaagattgttgagacaaaggatagatgtgccatatgactgctcctctgtcaagcatcaggatgccctgaaagaactttggaagttggcttaccctaacagacaacttcctcctctgaagtcagatctctggaaggagatgggctggcagaactccgatccatccacagattttagctgggttcatgtccttggagaatctaatatattttgccagaaattacccagattcctttcacaggctactgcataaagcagatggaaaaatgagaacaaaagctggtgttcactttgttcaactactcgatgatgacggtgtggctttcgataaccttttctgtgtagcatttcaggtgcttgattctcaatggcttgcaaggcgagcgagttatatggaattcaatgaggttctgaagtctacacggggtcagttagagcaagagcttactatcggaggtatttctcgcattcaagacatgccatcattcagaatgctgagaaggtagcgctgtttgtacttcacaggaaaagagatacattttagattccaatatattgtttaaatttgttgtccgttctttcactggattttgaagacgtgacattgtgtatgttattgagtatattgtttgtaatgtcgcagcttaaagctacagatcataatatatgatatgatatcttgaaaagaaaaactacgacttccagacatttttattccctggacaatacgtgacaaattatttctaagtgtctcagagtaaat

SEQ ID NO: 41193 - DNA, 543 bp, Zea Mays
atggccatggcagccgccaccgcgaatgccatcttgctcttggctctcttcttcgccggcgctcacgcgaatgtcccatgcatactccccgtatgcaagacggtgggtggcgggagccggttcttcgacgtgcagttctgcctggcggcactcggctccgatggccggagcgtcgaccactgcctcgactaccagcaagtgttcaagctcgccaagctcgctgtcgcgctgttgcgcacggtgtatgctagatgaataggcttcttcgtgcagtatgtaggcagaaaatgttgttgtactggcagtctggaactgcctttttcagaataataataataatgacaaactaaaaatggtgtgacattctatctaattactgtttgatgtatcaagcaaagcaaaccaacctgatgtgatttttatttattcactgccagattgctcgcatgttggaccttgctaggtgagcgcgaataagggtttagagtcaacaaccatagtttgaatatccatttgtgtataattttagcttttttatcattt

SEQ ID NO: 41194 - DNA, 2188 bp, Zea Mays
gtcactcgcgccgggggcgggcgggtcccggtcatctcttgcaacaatttttgtcgtcgtcctctgtccatggaccatggctgctggcccccgcctgtggaaggaaggacgacgatgagccatcaatcaggtggactggcacgcctaccaaagtaccaagagggcgccggggagaagcggctgcctggggccaccgcccttcctcgacgtttctttctttccttccacgtctctccacctcctcctcctcctttctctctcagtctctctccagcctccgcccgcttccttcttctcctgagagtcctgttgctgtctatctcccccgcgcgctattcctccgcctcgcgatagcaatccgcgcattggacgtcgccgcctcaccggacggagccggtcgaaatggaggaggcggcgcccgcaggaactaataaggtgtactacgacgggtgccccggctgcgccatggaccggaggaaggagagccgcgccggcgtcccctacaaggagctgctgttcgtcgccgccgccaccttcgcatccgctctgccaatcacgtccctgttccccttcctctacttcatgataagggacctgcgcgtcgctgagagggaggaagacattggattctacgctggtttcctcggcgcagcatacatgatcggcagaggcgtcgcgtcggtcttctggggcgtggtggcggaccgcgttggccggaagcccgtcatcgcgttctccgtcctctcggtcgtggtgttcaacaccctgttcgggctgagcgccaagtactggatggctatcgctacgaggtttctcctgggcgccctcaacggcttccttgcgccagcgaaggcgtactccatcgaggtctgccggcctgagcagcaggctctgggtatatcggtcgtaagcacagcgtgggggatgggcgtcataatcggcccggccatcggtggctacctcgcgcagcctgccaaacagtatccgcacctgttccatgagaaatcagtgtttggaaggttcccgtacctgttgccatgcctgtgcatctcgttcttcgccgccttggttgtcataagctgcgcatggctcccggagaccctacacaagcacagaggcctggagagagcagcagctgaagtggcagaaggcacgacagcagcagcagcagctcaagaaagcaccccggagccggagccggagccacctaagagcagcctgctcaggaaccggccactcatgtcctccatcgtcacgtactgcgtcttctccctccacgacaccgcgtacgtcgagatattttctctgtggaccgtgagtggcagagatcacggcggcctcagcttcgcgtccaaggacgtcggccaagtcctcaccgtcgctggcgccagtctcctggtgtaccaaatcttcgcctaccgttgggtcaacaagatcctcggcccagtcaactcaacccgagtttcgtcggcgctatccataccgataatcgccgcttaccccttcatgacgcgcttgtcgggaataaggcttggtgtgcctctctacgtcgcggcgatgctcaaaagcgtcctcgccatcaccagagtcaccggcacatcgctcctgcagaacaacgctgtgccacaggagcagaggggcgctgcgaacgggatagctacgacggcgatgtctctgtccaaggcgttcgctccggccgtggccggcatcttgttctcgtgggcacagaagcgccagcatgccgcgttctttccaggtgaccagatggtgtttctgctcctgaatctgacggaggtcatcgggctcgtgctcaccttcaagcctttcctcgcggttccccagcagtacaaacagtgaaagcggtgctgcgtgcgtgcgtgctctgcatggatactatagagaggtagctagctgctagccagtgtgtgtgggcgagagcgagacgagggagatggacatgtcaagtagaagcagaggatatgatgtcattatacatatttactttgcgagatatgtagttcctcatgagtcttcgctgtgcggttttctaaaaaaaaattgagataaagttggtctctcaattatatggtgcattccggacatcattgttacatggaaagtgtacttcctctaactcaaactagagtattcgttttaattagcttttgagcttttatatatgtctata

SEQ ID NO: 41195 - DNA, 2079 bp, Zea Mays
tcaatcaggtggactggcacgcctaccaaagtaccaagagggcgccggggagaagcggctgcctggggccaccgcccttcctcgacgtttctttctttccttccacgtctctccacctcctcctcctcctttctctctcagtctctctccagcctccgcccgcttccttcttctcctgagagtcctgttgctgtctatctcccccgcgcgctattcctccgcctcgcgatagcaatccgcgcattggacgtcgccgcctcaccggacggagccggtcgaaatggaggaggcggcgcccgcaggaactaataaggtgtactacgacgggtgccccggctgcgccatggaccggaggaaggagagccgcgccggcgtcccctacaaggagctgctgttcgtcgccgccgccaccttcgcatccgctctgccaatcacgtccctgttccccttcctctacttcatgataagggacctgcgcgtcgctgagagggaggaagacattggattctacgctggtttcctcggcgcagcatacatgatcggcagaggcgtcgcgtcggtcttctggggcgtggtggcggaccgcgttggccggaagcccgtcatcgcgttctccgtcctctcggtcgtggtgttcaacaccctgttcgggctgagcgccaagtactggatggctatcgctacgaggtttctcctgggcgccctcaacggcttccttgcgccagcgaaggcgtactccatcgaggtctgccggcctgagcagcaggctctgggtatatcggtcgtaagcacagcgtgggggatgggcgtcataatcggcccggccatcggtggctacctcgcgcagcctgccaaacagtatccgcacctgttccatgagaaatcagtgtttggaaggttcccgtacctgttgccatgcctgtgcatctcgttcttcgccgccttggttgtcataagctgcgcatggctcccggagaccctacacaagcacagaggcctggagagagcagcagctgaagtggcagaaggcacgacagcagcagcagcagctcaagaaagcaccccggagccggagccggagccacctaagagcagcctgctcaggaaccggccactcatgtcctccatcgtcacgtactgcgtcttctccctccacgacaccgcgtacgtcgagatattttctctgtggaccgtgagtggcagagatcacggcggcctcagcttcgcgtccaaggacgtcggccaagtcctcaccgtcgctggcgccagtctcctggtgtaccaaatcttcgcctaccgttgggtcaacaagatcctcggcccagtcaactcaacccgagtttcgtcggcgctatccataccgataatcgccgcttaccccttcatgacgcgcttgtcgggaataaggcttggtgtgcctctctacgtcgcggcgatgctcaaaagcgtcctcgcctattgttgatcagatcaccagagtcaccggcacatcgctcctgcagaacaacgctgtgccacaggagcagaggggcgctgcgaacgggatagctacgacggcgatgtctctgtccaaggcgttcgctccggccgtggccggcatcttgttctcgtgggcacagaagcgccagcatgccgcgttctttccaggtgaccagatggtgtttctgctcctgaatctgacggaggtcatcgggctcgtgctcaccttcaagcctttcctcgcggttccccagcagtacaaacagtgaaagcggtgctgcgtgcgtgcgtgctctgcatggatactatagagaggtagctagctgctagccagtgtgtgtgggcgagagcgagacgagggagatggacatgtcaagtagaagcagaggatatgatgtcattatacatatttactttgcgagatatgtagttcctcatgagtcttcgctgtgcggttttctaaaaaaaaattgagataaagttggtctctcaattatatggtgcattccggacatcattgttacatggaaagtgtacttcctctaactcaaactagagtattcgttttaattagcttttgagcttttatatatgtctata

SEQ ID NO: 41196 - DNA, 2105 bp, Zea Mays
gcccttcctcgacgtttctttctttccttccacgtctctccacctcctcctcctcctttctctctcagtctctctccagcctccgcccgcttccttcttctcctgagagtcctgttgctgtctatctcccccgcgcgctattcctccgcctcgcgatagcaatccgcgcattggacgtcgccgcctcaccggacggagccggtcgaaatggaggaggcggcgcccgcaggaactaataaggtgtactacgacgggtgccccggctgcgccatggaccggaggaaggagagccgcgccggcgtcccctacaaggagctgctgttcgtcgccgccgccaccttcgcatccgctctgccaatcacgtccctgttccccttcctctacttcatgataagggacctgcgcgtcgctgagagggaggaagacattggattctacgctggtttcctcggcgcagcatacatgatcggcagaggcgtcgcgtcggtcttctggggcgtggtggcggaccgcgttggccggaagcccgtcatcgcgttctccgtcctctcggtcgtggtgttcaacaccctgttcgggctgagcgccaagtactggatggctatcgctacgaggtttctcctgggcgccctcaacggcttccttgcgccagcgaaggcgtactccatcgaggtctgccggcctgagcagcaggctctgggtatatcggtcgtaagcacagcgtgggggatgggcgtcataatcggcccggccatcggtggctacctcgcgcagcctgccaaacagtatccgcacctgttccatgagaaatcagtgtttggaaggttcccgtacctgttgccatgcctgtgcatctcgttcttcgccgccttggttgtcataagctgcgcatggctcccggagaccctacacaagcacagaggcctggagagagcagcagctgaagtggcagaaggcacgacagcagcagcagcagctcaagaaagcaccccggagccggagccggagccacctaagagcagcctgctcaggaaccggccactcatgtcctccatcgtcacgtactgcgtcttctccctccacgacaccgcgtacgtcgagatattttctctgtggaccgtgagtggcagagatcacggcggcctcagcttcgcgtccaaggacgtcggccaagtcctcaccgtcgctggcgccagtctcctggtgtaccaaatcttcgcctaccgttgggtcaacaagatcctcggcccagtcaactcaacccgagtttcgcgctatccataccgataatcgccgcttaccccttcatgacgcgcttgtcgggaataaggcttggtgtgcctctctacgtcgcggcgatgctcaaaagcgtcctcgccgtaagtgtatacgaactttcgctcgctacggttaacatctgagatcgaccttgcaagatctgagaccttgcaacacgcaaaagcgtactgatgtgtgtctaagtattgttgatcagatcaccagagtcaccggcacatcgctcctgcagaacaacgctgtgccacaggagcagaggggcgctgcgaacgggatagctacgacggcgatgtctctgtccaaggcgttcgctccggccgtggccggcatcttgttctcgtgggcacagaagcgccagcatgccgcgttctttccaggtgaccagatggtgtttctgctcctgaatctgacggaggtcatcgggctcgtgctcaccttcaagcctttcctcgcggttccccagcagtacaaacagtgaaagcggtgctgcgtgcgtgcgtgctctgcatggatactatagagaggtagctagctgctagccagtgtgtgtgggcgagagcgagacgagggagatggacatgtcaagtagaagcagaggatatgatgtcattatacatatttactttgcgagatatgtagttcctcatgagtcttcgctgtgcggttttctaaaaaaaaattgagataaagttggtctctcaattatatggtgcattccggacatcattgttacatggaaagtgtacttcctctaactcaaactagagtattcgttttaattagcttttgagcttttatatatgtctata

SEQ ID NO: 41197 - DNA, 1976 bp, Zea Mays
gcccttcctcgacgtttctttctttccttccacgtctctccacctcctcctcctcctttctctctcagtctctctccagcctccgcccgcttccttcttctcctgagagtcctgttgctgtctatctcccccgcgcgctattcctccgcctcgcgatagcaatccgcgcattggacgtcgccgcctcaccggacggagccggtcgaaatggaggaggcggcgcccgcaggaactaataaggtgtactacgacgggtgccccggctgcgccatggaccggaggaaggagagccgcgccggcgtcccctacaaggagctgctgttcgtcgccgccgccaccttcgcatccgctctgccaatcacgtccctgttccccttcctctacttcatgataagggacctgcgcgtcgctgagagggaggaagacattggattctacgctggtttcctcggcgcagcatacatgatcggcagaggcgtcgcgtcggtcttctggggcgtggtggcggaccgcgttggccggaagcccgtcatcgcgttctccgtcctctcggtcgtggtgttcaacaccctgttcgggctgagcgccaagtactggatggctatcgctacgaggtttctcctgggcgccctcaacggcttccttgcgccagcgaaggcgtactccatcgaggtctgccggcctgagcagcaggctctgggtatatcggtcgtaagcacagcgtgggggatgggcgtcataatcggcccggccatcggtggctacctcgcgcagcctgccaaacagtatccgcacctgttccatgagaaatcagtgtttggaaggttcccgtacctgttgccatgcctgtgcatctcgttcttcgccgccttggttgtcataagctgcgcatggctcccggagaccctacacaagcacagaggcctggagagagcagcagctgaagtggcagaaggcacgacagcagcagcagcagctcaagaaagcaccccggagccggagccggagccacctaagagcagcctgctcaggaaccggccactcatgtcctccatcgtcacgtactgcgtcttctccctccacgacaccgcgtacgtcgagagatcacggcggcctcagcttcgcgtccaaggacgtcggccaagtcctcaccgtcgctggcgccagtctcctggtgtaccaaatcttcgcctaccgttgggtcaacaagatcctcggcccagtcaactcaacccgagtttcgtcgcaacttatgcaggcgctatccataccgataatcgccgcttaccccttcatgacgcgcttgtcgggaataaggcttggtgtgcctctctacgtcgcggcgatgctcaaaagcgtcctcgccatcaccagagtcaccggcacatcgctcctgcagaacaacgctgtgccacaggagcagaggggcgctgcgaacgggatagctacgacggcgatgtctctgtccaaggcgttcgctccggccgtggccggcatcttgttctcgtgggcacagaagcgccagcatgccgcgttctttccaggtgaccagatggtgtttctgctcctgaatctgacggaggtcatcgggctcgtgctcaccttcaagcctttcctcgcggttccccagcagtacaaacagtgaaagcggtgctgcgtgcgtgcgtgctctgcatggatactatagagaggtagctagctgctagccagtgtgtgtgggcgagagcgagacgagggagatggacatgtcaagtagaagcagaggatatgatgtcattatacatatttactttgcgagatatgtagttcctcatgagtcttcgctgtgcggttttctaaaaaaaaattgagataaagttggtctctcaattatatggtgcattccggacatcattgttacatggaaagtgtacttcctctaactcaaactagagtattcgttttaattagcttttgagcttttatatatgtctata

SEQ ID NO: 41198 - DNA, 1947 bp, Zea Mays
gcccttcctcgacgtttctttctttccttccacgtctctccacctcctcctcctcctttctctctcagtctctctccagcctccgcccgcttccttcttctcctgagagtcctgttgctgtctatctcccccgcgcgctattcctccgcctcgcgatagcaatccgcgcattggacgtcgccgcctcaccggacggagccggtcgaaatggaggaggcggcgcccgcaggaactaataaggtgtactacgacgggtgccccggctgcgccatggaccggaggaaggagagccgcgccggcgtcccctacaaggagctgctgttcgtcgccgccgccaccttcgcatccgctctgccaatcacgtccctgttccccttcctctacttcatgataagggacctgcgcgtcgctgagagggaggaagacattggattctacgctggtttcctcggcgcagcatacatgatcggcagaggcgtcgcgtcggtcttctggggcgtggtggcggaccgcgttggccggaagcccgtcatcgcgttctccgtcctctcggtcgtggtgttcaacaccctgttcgggctgagcgccaagtactggatggctatcgctacgaggtttctcctgggcgccctcaacggcttccttgcgccagcgaaggtgcgtgcgtgcacaatacaatacaatacatactccatcgaagcgtactccatcgaggtctgccggcctgagcagcaggctctgggtatatcggtcgtaagcacagcgtgggggatgggcgtcataatcggcccggccatcggtggctacctcgcgcagcctgccaaacagtatccgcacctgttccatgagaaatcagtgtttggaaggttcccgtacctgttgccatgcctgtgcatctcgttcttcgccgccttggttgtcataagctgcgcatggctcccggagaccctacacaagcacagaggcctggagagagcagcagctgaagtggcagaaggcacgacagcagcagcagcagctcaagaaagcaccccggagccggagccggagccacctaagagcagcctgctcaggaaccggccactcatgtcctccatcgtcacgtactgcgtcttctccctccacgacaccgcgtacgtcgaggcgccagtctcctggtgtaccaaatcttcgcctaccgttgggtcaacaagatcctcggcccagtcaactcaacccgagtttcgtcggcgctatccataccgataatcgccgcttaccccttcatgacgcgcttgtcgggaataaggcttggtgtgcctctctacgtcgcggcgatgctcaaaagcgtcctcgccatcaccagagtcaccggcacatcgctcctgcagaacaacgctgtgccacaggagcagaggggcgctgcgaacgggatagctacgacggcgatgtctctgtccaaggcgttcgctccggccgtggccggcatcttgttctcgtgggcacagaagcgccagcatgccgcgttctttccaggtgaccagatggtgtttctgctcctgaatctgacggaggtcatcgggctcgtgctcaccttcaagcctttcctcgcggttccccagcagtacaaacagtgaaagcggtgctgcgtgcgtgcgtgctctgcatggatactatagagaggtagctagctgctagccagtgtgtgtgggcgagagcgagacgagggagatggacatgtcaagtagaagcagaggatatgatgtcattatacatatttactttgcgagatatgtagttcctcatgagtcttcgctgtgcggttttctaaaaaaaaattgagataaagttggtctctcaattatatggtgcattccggacatcattgttacatggaaagtgtacttcctctaactcaaactagagtattcgttttaattagcttttgagcttttatatatgtctata

SEQ ID NO: 41199 - DNA, 1608 bp, Zea Mays
gggatattttaaacgctaaaatgtgacagtcgccctcccggcgacggagtccggcgaggcggggagctcaccgtcggcgagcgggggcagatcgcgcggcgcggaagtccgggcgagcgaagccaacagaaggtcctccggcaagcgatcgatctcgcagcaagcgggctccgtggctgccgtcgattccatcggttcccccgcctcctcggctcctcgattttcacgattcttccgctgtcggtcttggggtgggggatgacggagggggagagcggggtgcggcggtggctcgtagacatcagccgctggcgcccttcccccgcccagttcgacgctgcagccgccctcctaccgccgcacgagcgccccgccatctccaggctcgcccttgcaggttcgtgaaggaggacgacaggaagcgggcgctcgtcagtcgtctgctgcagtactccctcgtgcaccacctcctccgcatcccgtttcacctgatcaacatacgccgcacaaccgaggggaaaccgtacctacagaataattcttcagccttcccgaacttcaacttcagcacctcgcaccatggggactacgtcggtattgcatccgagccactttgccttgtcggcctggacatcgtgtccgtttccgagccccatggagaaaccgccgccgagttcgtcagcaacttctcttcgtgccttactgaccatgagtggagctgcatcgttcgtgctggcactcccagggacgtgctgacagagttctacaggtattggtgtctcaaagaagcatttgtcaaggccataggtgctggcgtcggatttgggttgcgccgactggaattccaccacgaaggctggactaacatttctattcgcatcgatggagaagtgtctaagaaatggagattctggcttttcaaacttgatgagacacacttggcatctatagcaaaaggggatccagaggatgctataaacaccttcaagaaaacactgtccaatgtgatcattgcagagaaccagttatcttctgcgctagacagtccagaagaaggtttcactctacagacagtggaagagcttacacgatctcaggggtaactggccaacagatgctaggcattcttgaaacctacagtgacctacaacagctggagcgtgtgtctgaatcctagaggactccagcctccgataatctaaatatacaggcacatgtgaatcatggaagggcttctattgcagaaagtggctttatatcctttgattttctatgacacaaggccataccaggggattttgaatcgtctactttctctataccaagtgatgctgtatggatgttgttttgatatatctagtatacgtgagtgattgcatttttttctaacatttaggatgcttatgtttaagagtttttaaaatgggaaatatagatcatttcgacgtatggatcatttgccgggggaaaaaaagcggttcttgaacgcgtccttttcatcagtgggatagatagtcaaccatgtgcgtggataaacaaatacaaataaccatgtgcgtgattaattaaaactaatgaccattggtatatatagctaaataacatgtt

SEQ ID NO: 41200 - DNA, 2501 bp, Zea Mays
ctcacgccccccacgacgccgtggggccctgtcggtggaccaggcccacggttggctcttcctcgcttcctcctccattcctctccctctctctctcgtcggtgggaccgtgggatacgctgacggacggacgggctgaggcaaggccgcctgcgggcgggaggaagaaaagcgaagctgctgcgccctcccctcccccatctccgccccccgcctcacccaccagacgagagagcgagcgcagttcggccgccggtcgcgtccgactccagcaaagccgagcgcccaccccctcaccctattaccttcctctcgggtccaattcggtgcctggctgactccgcacgtcttccccccttttccctccctcgaccgacgaccgtccgtccaccaccggatccaggagcgaccctccctcgtgctcgtcgacgatcgaccggccgccgatcgtccaggatgtcgagcctcgaggagccgctgggtctcggagacctgcctaagttgagtattaacagactcgggcggttcgtgtcgctgggcgctcggaggccaccggccgacgacgacgaccacagcactggcaaatacagcagcagctcctgcaacaatggcagccatcagatggccttccatcatggcagcaactcctcctatccctggcacccgcagtgccgccaggccgccgatccatcacgcgatgcagtggagcttagagatctccctcgcaaggtcatgtgggagctgccgaggttcgtgaagatagtggaggtggggcctcgggacggcctgcagaacgagaagggcaacgtcccggcgtccgtgaagatccagctgatacacaagctggtcggcgcgggcctgtcggttgtcgaggccaccagcttcgtctccccaaagtgggtgccgcagctagccgacgcagaggaggtgctgaagggtataaagcaggagccaggcgtgcggtacccggtgctaacacctaacctcagagggttcgaggctgccatcgcagccggcgcgaaggaaatcgcggtcttcgcgtccgcgtctgaatccttctccaggtccaacatcaactgcaccatcgaggagagccttgctcggtaccgcggcgtcacagcggctgccaagaaacacgggctaagcatccgggggtacgtgtcatgtgtgattgcttgccccgttggaggcgcaaccgatccggcgaaggtggcgtacgtagctaaggagctgtataccatgggctgctcggagatctcgctcggcgacacgactggtgtcgggacaccaggtgtagcgtggttgctatgcttcaagctgtcatgtcgtttgtcccggtggacaagattgccgttcatttccacgatacgtacgggcaggcccttgccaacatcctcgtctcccttcaaatggggatcaacatagtggactcgtcggtgtcgggccttggaggctgcccgtatgccaagggcgccactggcaacgtcgccacggaggatgtcgtgtacatgctccatggcctggggatcgagaccaacgtcgacctcaacaagctcatggaggctggtgactacatctccaagcatctgggcaggccgctgggttccaagaccgccactgctctccgcaagctgaccgcctgaaaaaaccttttcaagcactcccaagagaaatgtatcggttcgaggtcccatctctcagtcatatgaatgtcctgtagttttactttatgctttttttccgctcagacattgcctactctgagcattttattcacacactttgtacccgccgttggatgattctgaataatcttggtgttcctggacgcgagttatgtttgcggaaacgagtgtacggacaaatgtatcagaatatctcggttaacgatctaaacaacaaatgctgctgcaacagtttcttgctgccggacaatctcgtgtttcttacatgcacatgtatcagaatatcacggttaaggataaggatctaggcagtaaattagcaaaactaatggaagcatgcgcctatctcccctgccatatgacacaaaacggagggagaactatgccgtattctgtaccacatgcatacatccgaatgagtttcgaatcaccaagagaactttactatgtatcggaacgagtttacaatcaccatgagaactttgcgtgttccctcttctggtttctaatccgtcgtcatggttactccagggagagctttaagaatggccaggcattccttcagaatcgcctttgcttgttcgcttttttcagactcgcagagctctgtgagttcatcctcgaacttggcctctgttctgttcgacagcgggaagtctctgtacagtttgctcaaatcaagaaggcactccgatgcagcaacgtgaacctgcaaaaacacaggtgatcaattgtggctcgtgagggtaaggtttgctctggacactaacagctaatggcaaactcaacaaccgcttctaaaaccactggtttaag

SEQ ID NO: 41201 - DNA, 2574 bp, Zea Mays
ctcctccattcctctccctctctctctcgtcggtgggaccgtgggatacgctgacggacggacgggctgaggcaaggccgcctgcgggcgggaggaagaaaagcgaagctgctgcgccctcccctcccccatctccgccccccgcctcacccaccagacgagagagcgagcgcagttcggccgccggtcgcgtccgactccagcaaagccgagcgcccaccccctcaccctattaccttcctctcgggtccaattcggtgcctggctgactccgcacgtcttccccccttttccctccctcgaccgacgaccgtccgtccaccaccggatccaggagcgaccctccctcgtgctcgtcgacgatcgaccggccgccgatcgtccaggaaggatgtcgagcctcgaggagccgctgggtctcggagacctgcctaagttgagtattaacagactcgggcggttcgtgtcgctgggcgctcggaggccaccggccgacgacgacgaccacagcactggcaaatacagcagcagctcctgcaacaatggcagccatcagatggccttccatcatggcagcaactcctcctatccctggcacccgcagtgccgccaggccgccgatccatcacgcgatgcagtggagcttagagatctccctcgcaaggtcatgtgggagctgccgaggttcgtgaagatagtggaggtggggcctcgggacggcctgcagaacgagaagggcaacgtcccggcgtccgtgaagatccagctgatacacaagctggtcggcgcgggcctgtcggttgtcgaggccaccagcttcgtctccccaaagtgggtgccgcagctagccgacgcagaggaggtgctgaagggtataaagcaggagccaggcgtgcggtacccggtgctaacacctaacctcagagtgagatctactccgccaccgttttcctttttcctctaagaaacctacgtgtattctgctactactagtagagtcgagaagaaggtgtgggtacggtctgtgcatgatgaatcatgagtcgagcgcttttccaggggttcgaggctgccatcgcagccggcgcgaaggaaatcgcggtcttcgcgtccgcgtctgaatccttctccaggtccaacatcaactgcaccatcgaggagagccttgctcggtaccgcggcgtcacagcggctgccaagaaacacgggctaagcatccgggggtaagtacgtgtcatgtgtgattgcttgccccgttggaggcgcaaccgatccggcgaaggtggcgtacgtagctaaggagctgtataccatgggctgctcggagatctcgctcggcgacacgactggtgtcgggacaccaggtgtagcgtggttgctatgcttcaagctgtcatgtcgtttgtcccggtggacaagattgccgttcatttccacgatacgtacgggcaggcccttgccaacatcctcgtctcccttcaaatggggatcaacatagtggactcgtcggtgtcgggccttggaggctgcccgtatgccaagggcgccactggcaacgtcgccacggaggatgtcgtgtacatgctccatggcctggggatcgagaccaacgtcgacctcaacaagctcatggaggctggtgactacatctccaagcatctgggcaggccgctgggttccaagaccgccactgctctccgcaagctgaccgcctgaaaaaaccttttcaagcactcccaagagaaatgtatcggttcgaggtcccatctctcagtcatatgaatgtcctgtagttttactttatgctttttttccgctcagacattgcctactctgagcattttattcacacactttgtacccgccgttggatgattctgaataatcttggtgttcctggacgcgagttatgtttgcggaaacgagtgtacggacaaatgtatcagaatatctcggttaacgatctaaacaacaaatgctgctgcaacagtttcttgctgccggacaatctcgtgtttcttacatgcacatgtatcagaatatcacggttaaggataaggatctaggcagtaaattagcaaaactaatggaagcatgcgcctatctcccctgccatatgacacaaaacggagggagaactatgccgtattctgtaccacatgcatacatccgaatgagtttcgaatcaccaagagaactttactatgtatcggaacgagtttacaatcaccatgagaactttgcgtgttccctcttctggtttctaatccgtcgtcatggttactccagggagagctttaagaatggccaggcattccttcagaatcgcctttgcttgttcgcttttttcagactcgcagagctctgtgagttcatcctcgaacttggcctctgttctgttcgacagcgggaagtctctgtacagtttgctcaaatcaagaaggcactccgatgcagcaacgtgaacctgcaaaaacacaggtgatcaattgtggctcgtgagggtaaggtttgctctggacactaacagctaatggcaaactcaacaaccgcttctaaaaccactggtttaag

SEQ ID NO: 41202 - DNA, 2639 bp, Zea Mays
ctcctccattcctctccctctctctctcgtcggtgggaccgtgggatacgctgacggacggacgggctgaggcaaggccgcctgcgggcgggaggaagaaaagcgaagctgctgcgccctcccctcccccatctccgccccccgcctcacccaccagacgagagagcgagcgcagttcggccgccggtcgcgtccgactccagcaaagccgagcgcccaccccctcaccctattaccttcctctcgggtccaattcggtgcctggctgactccgcacgtcttccccccttttccctccctcgaccgacgaccgtccgtccaccaccggatccaggagcgaccctccctcgtgctcgtcgacgatcgaccggccgccgatcgtccaggtactgcgcaagctcatcaccgccgcagcttcgctgctcgcttcttactgcctagctggggtttgtggttctgtttcgtaccgcaactgattcatcatcgaaacggaagccgacaccaccaaggccgagcgacttgctgagacggacaaggtactctagtccacgacgaacgaaattgagcttatggattccctgttcttctcaggaaggatgtcgagcctcgaggagccgctgggtctcggagacctgcctaagttgagtattaacagactcgggcggttcgtgtcgctgggcgctcggaggccaccggccgacgacgacgaccacagcactggcaaatacagcagcagctcctgcaacaatggcagccatcagatggccttccatcatggcagcaactcctcctatccctggcacccgcagtgccgccaggccgccgatccatcacgcgatgcagtggagcttagagatctccctcgcaaggtcatgtgggagctgccgaggttcgtgaagatagtggaggtggggcctcgggacggcctgcagaacgagaagggcaacgtcccggcgtccgtgaagatccagctgatacacaagctggtcggcgcgggcctgtcggttgtcgaggccaccagcttcgtctccccaaagtgggtgccgcagctagccgacgcagaggaggtgctgaagggtataaagcaggagccaggcgtgcggtacccggtgctaacacctaacctcagagggttcgaggctgccatcgcagccggcgcgaaggaaatcgcggtcttcgcgtccgcgtctgaatccttctccaggtccaacatcaactgcaccatcgaggagagccttgctcggtaccgcggcgtcacagcggctgccaagaaacacgggctaagcatccgggggtacgtgtcatgtgtgattgcttgccccgttggaggcgcaaccgatccggcgaaggtggcgtacgtagctaaggagctgtataccatgggctgctcggagatctcgctcggcgacacgactggtgtcgggacaccaggtagcgtggttgctatgcttcaagctgtcatgtcgtttgtcccggtggacaagattgccgttcatttccacgatacgtacgggcaggcccttgccaacatcctcgtctcccttcaaatggggatcaacatagtggactcgtcggtgtcgggccttggaggctgcccgtatgccaagggcgccactggcaacgtcgccacggaggatgtcgtgtacatgctccatggcctggggatcgagaccaacgtcgacctcaacaagctcatggaggctggtgactacatctccaagcatctgggcaggccgctgggttccaagaccgccactgctctccgcaagctgaccgcctgaaaaaaccttttcaagcactcccaagagaaatgtatcggttcgaggtcccatctctcagtcatatgaatgtcctgtagttttactttatgctttttttccgctcagacattgcctactctgagcattttattcacacactttgtacccgccgttggatgattctgaataatcttggtgttcctggacgcgagttatgtttgcggaaacgagtgtacggacaaatgtatcagaatatctcggttaacgatctaaacaacaaatgctgctgcaacagtttcttgctgccggacaatctcgtgtttcttacatgcacatgtatcagaatatcacggttaaggataaggatctaggcagtaaattagcaaaactaatggaagcatgcgcctatctcccctgccatatgacacaaaacggagggagaactatgccgtattctgtaccacatgcatacatccgaatgagtttcgaatcaccaagagaactttactatgtatcggaacgagtttacaatcaccatgagaactttgcgtgttccctcttctggtttctaatccgtcgtcatggttactccagggagagctttaagaatggccaggcattccttcagaatcgcctttgcttgttcgcttttttcagactcgcagagctctgtgagttcatcctcgaacttggcctctgttctgttcgacagcgggaagtctctgtacagtttgctcaaatcaagaaggcactccgatgcagcaacgtgaacctgcaaaaacacaggtgatcaattgtggctcgtgagggtaaggtttgctctggacactaacagctaatggcaaactcaacaaccgcttctaaaaccactggtttaag

SEQ ID NO: 41203 - DNA, 2445 bp, Zea Mays
ctcctccattcctctccctctctctctcgtcggtgggaccgtgggatacgctgacggacggacgggctgaggcaaggccgcctgcgggcgggaggaagaaaagcgaagctgctgcgccctcccctcccccatctccgccccccgcctcacccaccagacgagagagcgagcgcagttcggccgccggtcgcgtccgactccagcaaagccgagcgcccaccccctcaccctattaccttcctctcgggtccaattcggtgcctggctgactccgcacgtcttccccccttttccctccctcgaccgacgaccgtccgtccaccaccggatccaggagcgaccctccctcgtgctcgtcgacgatcgaccggccgccgatcgtccaggatgtcgagcctcgaggagccgctgggtctcggagacctgcctaagttgagtattaacagactcgggcggttcgtgtcgctgggcgctcggaggccaccggccgacgacgacgaccacagcactggcaaatacagcagcagctcctgcaacaatggcagccatcagatggccttccatcatggcagcaactcctcctatccctggcacccgcagtgccgccaggccgccgatccatcacgcgatgcagtggagcttagagatctccctcgcaaggtcatgtgggagctgccgaggttcgtgaagatagtggaggtggggcctcgggacggcctgcagaacgagaagggcaacgtcccggcgtccgtgaagatccagctgatacacaagctggtcggcgcgggcctgtcggttgtcgaggccaccagcttcgtctccccaaagtgggtgccgcagctagccgacgcagaggaggtgctgaagggtataaagcaggagccaggcgtgcggtacccggtgctaacacctaacctcagagggttcgaggctgccatcgcagccggcgcgaaggaaatcgcggtcttcgcgtccgcgtctgaatccttctccaggtccaacatcaactgcaccatcgaggagagccttgctcggtaccgcggcgtcacagcggctgccaagaaacacgggctaagcatccgggggtacgtgtcatgtgtgattgcttgccccgttggaggcgcaaccgatccggcgaaggtggcgtacgtagctaaggagctgtataccatgggctgctcggagatctcgctcggcgacacgactggtgtcgggacaccaggtagcgtggttgctatgcttcaagctgtcatgtcgtttgtcccggtggacaagattgccgttcatttccacgatacgtacgggcaggcccttgccaacatcctcgtctcccttcaagtaagcaaagcaacgatggggatcaacatagtggactcgtcggtgtcgggccttggaggctgcccgtatgccaagggcgccactggcaacgtcgccacggaggatgtcgtgtacatgctccatggcctggggatcgagaccaacgtcgacctcaacaagctcatggaggctggtgactacatctccaagcatctgggcaggccgctgggttccaagaccgccactgctctccgcaagctgaccgcctgaaaaaaccttttcaagcactcccaagagaaatgtatcggttcgaggtcccatctctcagtcatatgaatgtcctgtagttttactttatgctttttttccgctcagacattgcctactctgagcattttattcacacactttgtacccgccgttggatgattctgaataatcttggtgttcctggacgcgagttatgtttgcggaaacgagtgtacggacaaatgtatcagaatatctcggttaacgatctaaacaacaaatgctgctgcaacagtttcttgctgccggacaatctcgtgtttcttacatgcacatgtatcagaatatcacggttaaggataaggatctaggcagtaaattagcaaaactaatggaagcatgcgcctatctcccctgccatatgacacaaaacggagggagaactatgccgtattctgtaccacatgcatacatccgaatgagtttcgaatcaccaagagaactttactatgtatcggaacgagtttacaatcaccatgagaactttgcgtgttccctcttctggtttctaatccgtcgtcatggttactccagggagagctttaagaatggccaggcattccttcagaatcgcctttgcttgttcgcttttttcagactcgcagagctctgtgagttcatcctcgaacttggcctctgttctgttcgacagcgggaagtctctgtacagtttgctcaaatcaagaaggcactccgatgcagcaacgtgaacctgcaaaaacacaggtgatcaattgtggctcgtgagggtaaggtttgctctggacactaacagctaatggcaaactcaacaaccgcttctaaaaccactggtttaag

SEQ ID NO: 41204 - DNA, 1911 bp, Zea Mays
aatagtcatgtgcgctcgacgcgtcgcgtgcctctctctccgctccctctgacttgttcgcttgccgtcctcgctcgcggcaaagctgcagcgtgtctcggctccggcgcgccaccgctcgggacgcccgacggatccgctcccgcgtgcgctcgatatcccttgcttcaacggtccaagtcaacccccccaccaaatcgccgtccgtccggccgctgccgcaccctagcaggatcgcagcgtgcacagctcttcttcaatctgcaggattgcagccacgcacaagtcgtagctgctcgctcaattgtacttcagatagcatcttctttgattgtcctcttctgcatactcttgttgatggtgctatcatattcttgaaaaccttccgtgctgtctatctggcattcttctgtctctgtacttgtcctttaacagtcacttgcttcgaggttccattttccatgtggatacccatggctgaatccactttgagattattacataccttttgttctagctgtttctgttgtttttctttctatccatacattatcacttggctcccccaatattattggttcatgtgctctttccaaagtttccttggaactttgagctttggaagatgccaaggagaacaggaaatgctgcttcgaccaaatcagttgaattggtcaaacaagaccaaatggagtttgatcatcctgatgaggtagatgaagaggaagaagttgagtatgaagaaattgaggaggaggttgagtatgaagaggtagaggtagaggaggaggaggaggaggaggaggaggatgaaattgaaggtgtgcgtgaagttgatgctaatcatgacagtaaaatagtggatgatgatcccaaggatgggaatgaaaaagaaaagcatgctgagcttcttgctcttcctcctcatggagctgaagtttatgttggggggctttcctctgatgtatcttctgaagatctcaaacaactatttgaatctgttggagaagttgcagaagtgcgaatgcgaggaaagggggataacaagacatatgcttttattaatttcagaactaaagagatggctttaaaggccatccaaaagttgagcaataaagacctaaagggaaaaaagataaaagtttcatcctctcaggctaagaataggctttttattgggaatgtaccccatgattggacacctgatgatttcaaaaccgcagtggaagaagttggtcctggagttttaaaagttgatctcatgaaggcaccaggctcaggtcgcaataagggttatggctttattgaatactacaaccaggcatgtgcagagtatgctaagcagaagatgtctactccagaattcaaactagatacaaatgctcctactgtcagctgggcagatcataagaatgctagtgaagctacatctacttcacaggttaaatctctatatgtcaaaaacctccccaagactgttactcaagagcagctgaaaaagctgtttgagcatgttggagaaatcacaaaagttgttattccacctgcaaaatctgggcatgaaaatcggtacggttttgttcattttaaggaacggtccatggttatgaaggctctgaagaacactgagagatatgaacttgatggtcagctgctggattgttcacctgcgaaacctcctgctgataagaaggatgatactggatcatctcctactgcaaaaggacgtccattacccccaagttatgccccacttggatatggactagcgggagcttataatccacttggaaaaggactggcaggtgcttacaattcccctggaaacggactggcagggggagaaacatttacaataggtgatgtccttctaactgttgtgcatttttggcatcaattgcacatgtgcag
